United States Patent Application Publication US 2013/0096032 A1 - sequence listing, part 28

SEQ ID NO: 985 - DNA, 111686 bp, Arabidopsis thaliana
gaattcatgtgttcgggtactggtttgagtctggaaaacccgttttcgatttcggagaagaacattacgctagtctgaagttgagtcctggtttgtcttcgtatgctgataatccggagggagcgagcgtgtcagtgacaaagcttgtggaattcgcgaagggaagaatccccaaggggaagttgaagaagagtgacattaggttaatggcgactgctggaatgagattgcttgatgtgcctgttcaagaacagattcttgatgttactagaagagttcttagatcttcagggtttaagtttcaagacgaatgggctactgttatctctggttagttttcggaatcaatttttttattccatcaaatgcaattatgtttaagttgatcactgacctacaattatacattgtgggagtttacctttctttggtgcacttgtaaacataagatttttgtttcattttgttttcttttagcttagttgagtgatagtaaatgtgcacatatccattggcaattggaagtgctaattactggggggaaaattttattcaggaactgatgaaggtatctatgcttgggttgttgccaatcacgcacttggttcgcttggtggtgatccattgaaaacaacggggattgttgaacttggtggggcttctgcgcaggtctagtctctttcccttctcaaatttgttatccagaagaaagtgtccttggctctgttccttttgtcaaactacactagtttggatgtattatgaattgcatccaaaagatttggattttatggatacaatgaaaagtagggtctgttagtccaaaactatcaaagactaaacatactagtacgatatacaatgattgtaagccattttctgtatttgtataggtgacatttgtgccaagtgagcatgtgcctcctgagttctcccgtaccatatcttatggaaatgtttcgtacacaatctacagtcacagtttcctcgactttggacaggtaacttctgagagcagagcatttgtctaaatgtttttgagtacttattttctatgatttcacccttttcaaaaagttatccggaaacttaagtggaaattgcgtcccagttttctacttaataatattctgatttttaaaatttccttgtagaaaatgctaccaaaagttttgctaacttttgtcgtatcgtgcaggatgcagcagaagacaagctattggaatcactgcagaactcaggttagttgttgataacttcttaaagtaatcattagtttactgaaattggaattttttttgttaaagctaattagtaatagccctcttgagttggaaataatcttcttttacctcaaaactaatttggttttttattccatacagtagcagcctctacaggggatggaatagttgaagacccttgtactcctaaagggtacatatacgacacacattcacagaaagattcatccggattcttatctgaagaaagcaaatttaaagcctcccttcaagttcaagctgctggtgatttcacgaaatgccgatccgctacgttagcaatgttgcaagaaggaaaaggtaaatagcattacttgtatagatgatttataatgggaatatttgatctcttatggctatatttttggcattttgtgtacagagaattgtgcttataagcattgttctattggatcaacattcacacctaatattcaaggaagttttttggcaacagagaatttcttccacacatccaaggtataatcctttgaatttcatgttggtcgatgtcaagattccgtctgaatgtgaggagaattgtttgaacattggtctttaatttctgtcttgatcagttctttgggttgggagaaaaagagtggctgtctgaaatgattttggccggaaagagattctgtggagaagaatggtcgaaactgaaagagaaatacccaacaactaaagacaaatatttgcatcgttattgcttctcatcagcatatattatctcaatgcttcatgatagtcttggtgttgctcttgatgatgaaaggtaaatgttattgcacaagttcaagatcaatgcatgttggttttctgtgacaaagatataaacaaaaactatatgtttgctttgtttgcagaatcaagtatgcgagtaaagcaggaaaagaaaacataccactagattgggcattgggcgcttttatactgaatactgacacacccacttctgattacaatggtaaatctagaaaaatgattggctttaagtaacgtggccaaatacaaaatatatgatatgatcgtaattttgtattctacgttacattgtgtttgaaacttgtattctacgttacattgtgttttgaaagtatagtcgtcgtttccttttgtggaataagtcagctagcagctactcattaataaattgaacgccaatatgtggtaatgtattatgtatgtggcggtatgtgtataatttcgacattataagaaaacctctgcgaccttacggttgtttgaattgccaattataattttatcaattactttttgtttacttgactttacgttctttgaactattcaagtcaacaacaatacattagataaagaattaccactagctgcttatcccgaactctacgtagaaattatatagtacggctagagaataaagtctattctgctgatagatagaatcatagaaagccaaaaaaaaaaaaaaatttcttgtggcaaaaagcctactataatctatattcgcaaaatacactttttttttcttctttactttgtaatactagatatcaaaggttgtgtagacttttattttgtatttaattttttctgctgttgagaattcattactcggtgataaatcttttcccaaccgggtgacaaatgtaaaatcacatttcataatggtctttagatcttatttttttatagctagaaccagtcttggatcttacgcaaaattaatctaaattctaccataagtcgttaggacgctaaaatcctaaaaaactaacatttcttggttcgacaagctaattaacaaaaaaattgtataatagtaagggagtctatctgcatttcacctatctgtgtcagattatatataaagaaacatatgtatacgtgaccatgtcttttcttgttaaatctttctttactgaatacttgacaatttctataagaatagctcaacggtcaataattttcaatccgtacaactaaggactatatagacatgtatgttccctgatcatttatggtcaaccacattaatatgtttctaaaatattagacgtgagttctataatattcttcaaacaaattgtttatttagtgaaaatgatcaagtgtttacttgatttaatgaatctaattcttcctagttgtattttgccaataaccttatctattccaatatatctacattataatgcgtataatactactgtataatacaacagagtatatataatccagcgtattattgactttatactcaaatattgcattaacagaaaaatgcaaaatatatattttttaaagaattatatgtgaaataacagtttaataatgaaaataaaatctaaaattaaagattagaaaagtaatatttattatggaaactgacgagttttgaaaagatcatgggattaaatggtgtattatttgtagttatacgacttggttttttaaaattataatcaaaaacaacatgttgttaattaaagaggtactagatgctgtcagaaatagaccaacaaaaaagagagactactttagattaccactaggagccgttatacttaagttctggtcaacggctatataactaacggagccgttagtcttttcagacgtcgttatctttcccgctataaaaagccattttccattagcttgatttccgggccaaacaaaatcttttgtgaagaaactttctctcatcttcccaagggagagagcaaataccaaaaacttctttttgcgtctctcttctaacattccttccttgccgatatttcagctcacgacgagaaaaatctcaccgttcacgctatatacatctatttgcaggtgattttttttcttctagatttggtatctcgttttctccgaaaatctcgatcttgatctttgcttttctcggattcgtaacgcatgtgtctgattagagttcatatacttgtgaatttcttgtttttcgtatttagggatttgatttcgtagaagtggttttgggaaacactgagatgagtaatcatcacacggtcgtatatgttaatggattggttcgaccggttctcgcggaggctgagtatagtatgagaacagagtctccggcggataatgcaattgatatctacgacggagatactacggagaatgaggaggaggattcactgatttcttccgcggagtgtcggatttgtcaggatgaatgtgatattaagaatcttgagagtccttgtgcttgcaatggcagcttaaaggtagttttttccttcattgtttcatgatcactataggaacctatagttagttatcaagagaacatttgagtattgacttttaagttttacgttgtgatcagtatgctcacagaaaatgtgttcaacgttggtgtaatgaaaagggaaacactatatgcgaaatctgtcatcaggtatatacattctttctcttgatactaatgatgtatgatttgtagaggatgcagctcaaattaaactttctcttattccagccataccaagctggatatacctctccaccaccaccaccacaatctgaagaaactactattgacattgggtatgatcattttcattattctgtttctgtcatacactttaggtttggtttcatgacttgtaattgttctgacttatttgtctgttttttagtggaggatggagaatctcgggtttggatttagatgatccacgtctcttggcaatagcagaagctgaacgtcagattttagaatcagaatatgatgattatacagcttcagataccagtggagctgcatttttccgctctgctgctttaatagtaagtctaaagctcctcaacaagtttcaattactcccgagtatttttactaatttctcttctcttttgcagttgatgactcttcttctattgcgacatgcactgactataccagattattcagatagtgaagatgatgatccttcttcaatactttctgtaagttactacttcttccttttttccagcatatactggaaaagtttcgtataagttctaactccaaaccacaaaatcatcttgcagcttttcttactccgagctgccagttttcttcttccttgctacatcatggcatcagccatcagtatcctgcatcgccgtagacagagacaggaagcagcggacttggccactcggtttgcgttggtgctcagctcgcgccaacctagacccgtgattaattatttgtcaatggagccatgattttatagttccactctaagagtttcaggtgtatatgcttttcaaatatttcatcagaaaaaagattcatgaactgctgttaaaagagtggtttacagtaagtagaaagaagaatctcttcttcttcttctcacttcttgcaaagctattgaaactatcttttctgatgaaatcattgaatcatatgtggtgttaatcaagatttggtagcaacaagaaccatcacaagatctacatgatggtccttctgaatcagctttcttacaaacaaggagtgtcctaacttagtgcagagtttttttttttacaagtattcgattctaagaaagattgtgtatgtagattaaagagtttctgattctgtagcattaagattttcaataacacttgattgagagatgagcatttcactttttaggtaaagaaaaacgagacacataatttgtaatctgtgtaaataaatttgttttttgttccaaaaagattcatctctaccatattagttcatacattactgtcatgatgttgtaataaagataactctaccaaaacccaaattgcattaagtatgaaatctgttctcgaatacaaaatatcttactaacatcgagcacataatgaagctttttgatgttaaatgcggacagcacaaagagcatggctcagagctagtttgcctgcaatagctccttaatgtcatacccttggatctacaaaaaacaacagagacaaaacaaacataagctaagagttgatatgttattttgacattgtagtgatcataggaatgagttttctacctgaagaaaagtgagtagcaaaataactcccgagttccagaaaccgtgtatgaccattggggtaatgagattgcgggtttgtgcatatgataatcccaaaacacttcctaaaccaaaagatacttattgttcatccagaaatgttcataaccatgagaaaatgcaaatggttttgtttttagttatgttttacctagaataaacagctgcgggaattcaccaggtgtgaaatgggcaagggcaaacgcagctgagctgatgatgatcgctattggggtcgggaccctgaaatacagaacgtaacaaaatgtagtaagcttttgtccagaaccaaatgagaaaaaagaacagaggttttaccatttggtaagagagaccatgaagaatccgcgaaacacggtctcctccagaagtggagcaaggattccagttatgcccactaagcttaaggtgctgtattatgtgcaatgtgtgatcaaattctagtattaacgcacatcgcagtttctatttctttgaggaaataccttatgtttgaggatccaattaatggaagaagcttcatcaaagagtctacctgaaaacatcacactaggcctcattactattatccaacaaatatttcgaaaacaaaacataaagcatggttttgaattctcctaacctccctttcaggtgcttctgtcctgaacacggataaaacaacacctgttaacgcaatagcaccaacagcaccaaccagaccgattccaccccacacaagccatcctttttgcaggttgacgggttgtctcaaatctgacgatcgaacaaacagtcaactaccaataaaagagcaaaccatgctgatagaaaaaaaaaaaaaaaaaaaaaaaacgtaccatagcgaagaatatcttcaggaagtgggtcgaaggttttggcaacagtgaatatgacagcaagtaccaccgcggttgttaggctgccaaatatttagacaatgttattcaacataagccaaacctcaagagagataactaattttacaatgtgaaatcagctaaagcaacgagattatataatgagtttacattaacagagtaaaaaagagcaaagaatacacaaaagagtagtatttttttggttacccttgatccaggaacaaaatctccgccttatcgtccaaggtcagtttctcaacgtcgattcctaaaaacggtatgactgccatctcggttaatcctgtcaaaacaaaactgcctgggaacaaaattaatctcactccatgcattacacagagaatagtcactgaacattaaactatttaaccataacagagagattatctttcagatcagtctactcaaccatcacatttatcttagcacacagtctatgtactttcatcaaactccaaccctaaagtcatcaaaagggaaagcttttgatgagagtaccttagtgcacaagcaaacgaagttaacgaaactgtctgccatccccatggaacttcccatctctgaagtatcggccactctgagctacctccttgtaactacaacaaatataacaatcaaaacttcaaataatttctcaaaggtctagtcttttttcacattccaatagaatttggattcaattgaacaagttacatagagctgcctcagaaaaattcagaccggaaactaaacaagaatctaatttagatagagtcagtgagacagtaacctttccctctcctccaggttcctttccagagttgaaaatgcaggccgatctccatttcttccgattaaccgtaaataaccggcggctagcaaatcctggagaaaaccggctcaaaccgccgtaagtacaagtcttcggaagaattaacctccttgaatcggataaacatagaagagacgaagattgagataaacacgagattatctgagaaaccattttgaaattttctgttgttcttagagaacttccacacatgaaccaacacgattatcagattgaggaagaggataagatccgactaaaacgagcgggtagaaaaaaaccgttacttacttaaaataacgttgtttaaggcccatttatgtcagtataggcccaaagcccattaacgaccaactaactcgacgacaagtctttgtcagtatatcacaaaatacgtacatccctcgtgtcttctaatttgtaattttgttccttgggagaatcatgtccactatttttcttttttcattttccttataaccaagacaaaatataattaatattttgtttatacattagcacaaaatcactggcaaataggcagtcttgtcccagtaatggaacccacacgacatagcttcaaaaaaaaaacaaggaacttcctcatttcttctatttatattactcaaatctaaatcatccctaagaaatagtaatacacaaaaagaaacaaaatggtgaccttaacttcatcttcttcaactccaaacgtatcttttgatttcatgatgaacaataataataacagtaacaatctctatggtcctttctcttcttcttctacttctttctcttacttgacaagcaaggaagatgctctcacccagaagaacctaatgagtggtatcaccaatgatgttcttggaattaacaagaaagcttctgaagatttggagatcagtgtgtttggagctgagaagtacttcaatggagatatggattctgaccacagtcctagacttgtgtctcctctgccagatccagaagttccaatagagagaatctttgttggtccgaagcaaagctcgaagaattcctcggaaactcctagtcttcggtctgaatccagttggaatagccagagtttgttgcttcagagcaaatatgtagagaagaagaagaacatcaagaaaaactctagttgcaacagttactttcaggagaaggatatgagtagcaatcacaaggtgagtaataagaagagttttctcgctactcttggctgcagatgcgtgtgttcgaactggagttcagtggatgtcgtcgacgacaagagaagaagctctggtctgaagaagatcaagactcaattgagtttctctggagatctaagctcggagatgaagattcatcaacaacaacaagaagcaatgctagagcagaggaagtctctggaaatatttggatctcctcttattgagaagagaatcattcagaagaaatttccatgggaatactcgagctctgcgaaaaaagaagaacatggattctctgtgaagtatgaagaagaagaagatgggagtgtgagcgatgtaagtacggatctttttgagattgagagcttaacagggaaggcaaacccttttcttgcaaggcaaggaagtagtgatccagactcaccagatggttatgcaccaagtgaggtaagcatacaatggagtgtagtgacagcaagtgtagcagatttctctgttatgtctgaatgtgctacgagtcccgtcaaaaagaaccggtcttttcagattcctcgaatccctatcatggcaaaatcaaaccgagaaatcgcgcctcagagacggaaatctagcagtagcggtttattaatgggatgcaagagtcataaatctgtcagagtttctggtgattcatacacaagcatgaacagaacaccgagctatgttccaagattccctgtagaagctaatccaacaagcactgaaacaagaaggaggatcagcagtagttctgtttctcacacgcaatcgccttttttgtatacttaattatgccaaaaacctgagctcctttcgttttacatgtaaaatgtctattgagtggaaaatatttgatttgctaataccatcttcatattgttgtacctgaaaacagtagtttttgatttaactggtttattaaggaagaatgtcgatagagaagtgtaaatcaatctgtatcatcaatcaatacttatctgctgaccacaaatgagtaaaagatgaaatgtgatgccaagaactcatctattgttgccagagattataaggaactgcaccatgtgaacaatagacacttgggtctaatccgcaaataagacataaccaagagtgcaattccatgtgaaatattaagatgtgattgtaaccttttgttgacttaggagacataattaaatgcagcacgtagactagacacaaaacacatttggtccacctcattttcatgtgcttgtctcaagaatagaaagataacctcattaggcttagatttaacggtttaatcaaagaccgtacgagttgcctaaaagagcctttaatgaggaaactcaatcaaacaatgatagtgtcctttcacctaacatgtcttaaaagccactccagagtcttctggtccagaactcatctccagtgtcaagaccatgtgatgataatgagataaagtagacgtcgacaaaaccttaattgtgtcattgatgatgatatgtctctgtaaccaactcaggaggaatgttaggttttgggaaaaagattgatttgtcatacagtttaaagttttagttcaagattcagatcttacagctggatctaatcaagaaacaaccttttgatattaaacccaatcaaccatgtcacaaagtatcaatagatcttgaagataagtattgtatccttttcaaaggtccacttttgaaataattgaacagtgacttcatttagtctatgaaactaactatatagagaaaaactaccccgttgctgccatgtttggagaggataagaacaacaaaagcgagaagccctttgcataaaagaaagaatcaacgactctgcgtatgtcaattcgtaacaaaggagatcaatgagactctcacaggtctcaaaacctggaattataaagcagataataataacagagaagatctgaagttttggctattacaagataaatttactgctggcttacacagaaacatatgcccgcagatcgaaaaaaggatagattggaattgtatgtacaattacaagtacgcaaaggttacagtggttctctaacgagcaaaatgatgacttagcattgacaagaagccccaaaagaaagaaagagaaattactcatctttggatactttgattggccgtgtttcaaatcctccattggctcttttctccaatgaataaggcaagtaagtgccgagaatcctatcccacataacaaagaatggctgcgagaagttgtatttggttccatagagttggtggtgaacatcatggtaagcagagttattactgaagaagatgtgaaatggatttcccggaagccatagtccacaatgatcatctactgttttgatggtagcgaaggagaagaaaaagatggctgttcttggggacataccagagaagaggaaagacaaagcaccaccaatagtgtccaagagaagaccttctagtggatggttgtatagagctccatacgaataaggcacaataaggcgatgatgctgagagtggatgtgcttgtataagaacttgttgaggtgcatatatcgatgaatgaaatattgccaagtgtcaattacaagcatagcgatgataaactgcctagccagaagtagaatggaaaattgctgtgtcgtagcagcatctgcatcacttcctgttatctaaagagaacaaccaaattccaaacaaaatatttcaggtaaacaagaaacaaatgctccaaaatgctaatatatgaagctctatcaacaaaatatccagagtgtaccataacatgagaactagaaacctcaatcaatttcttccaatacagagaaacatcacaagctcacgactctgaaacacacaaatagtgagaaattccaagactatctataacggtctcccatgcaagagaacaaaaccttgcacatgtgaatgatgaagggtaaagattgtattcctctaagcactattagacaagggaatcacaaatctagacgtaaaagcttttctaaagtaacgccttatgttcaagaatttcaagtgaaacaatctagcaaattctctatataaaacagcaagaagcaggagattcaagttttatttcatcaaacaatctccagaatctaaactattcttaatgcagcctaaatctgtaaccttgatccaacagcttcaggacaacaaaaggtgaattgaaatcagaaaacccctaattcattctcatcgacctaagttcactaaccacaaaattagattaacaagaagcacaaggaggacaacaacattattagcataatccacaaccaaaatcctataacattcacaaatttgccacaatgttcaaagaagggagagagagagagagattcaataccttgaagagaataacggagataatagcctgaagagtctgttgaagaagaacgcccttaacgacggcagatttagaaacgagattcttctcatcctcatctatcttcgaatgcaatctatatttatccaaagatcctaagcaaatgtacatccctgaatacacccaatacaccagaatcggcacaaatgtccccagaaattcatctgaaatcacgaaactcatcatctctaattctaatcaatctctcccccacaacaactcgagaatacgaaatcaaacaccgccagaagaaaatcgcatcactcttcgctaaactacacgaaggagagattagattataatcttcttcttcctcgttgcttcggtgttttctttcgtcgtcgagaagaataggagaagaaaatgcagaggaggagatgatgaagagatctaacgtgatttttcaggtgggacccaactattcggaattttccacgtggctttaaacgaatggtcaaggcgccaactggtttcaattttaatgtgtgctaattaattacaatctctacatattaaaaatttaatatacgaatggtgaaaatatgattagaaacacatgccaaaaaacataaaagtctaaaaacaaaatcattgatttgattttgcctctctgttctcttatctgtacaattgtggacacatttggtggctacctcgtggggttggcaataatgtggtgtttatcgtttattaattgatatttctataaaatatgtaaaaaacattaactcattagtagtttaattagatcttctctgcttgatttccgattcagattcaaaacaattagagaagtagcaaaaaatgtgtgtaagaatacacaaatatattgtctaacgaagataacatactataatgtctaatataaaataaaattacaaccaaaaatagaaaatggagcactaataagatcgcgtaagtcaataacgaatctagtgttacaactagtagtgcacaagatgtagtagtaactctttcataacaggataagtaacttactttgcgagggcagccaataatggggactagagtcggagaacaacaaataatgaacttcaagactctgcttttgttggctccaacgactcttccggacctccagcttcctcaacaagctggttaaaaacggcacagcaaataacggttaatagtgagaaagatgctatcttaagtcctgtagagttagtcagtgagtgagattagagggagtgaacataccaaagaaccgacttgctcataggctctcattgctttcggatcttcttcatattcgtatcccaattgtagaatccgtgggccgttgactgaccaaaatgcccttcgacctgcctcctgcaacatcaaaagtagttttgacataacagaggaccttttgtaagttttgggtttgattggtccttcacaagagttcacaagaagggaaagcgagacagagaaatgttttacctctaagatgatcaaatatatagcttcgagtgtctgaacgcgaatgtcaggatcagtaactggttctcgctcaatggacagtgcacttccaagctcaggtggcatttttgcgacatcttgctcactgtatgtctaaggaaagtaaaacccaataatcagaaactattttctcataaaagaagaaaacctttgtaagcaacaacgtagcagctataaagcaaaatcaacaaaccttgctgcctgcaactggtaggagcagagcgggccaaagaaactctgatatcaagagtatattctggagttggtttttggcttcaaaacaacagttacgaatagtcccagcaacctgaaagccgataagcataatccatgttaaattgttcaaagggtatagactaagcaacatgttcattaaagagtaatctgccaaactccttttaaacgtacccctttctttcgcaattgatttgttgaatcaaactgcctaatgatctgttttaatagtcgtctctttggctccagtaacaatttcctcccatcttctgtttttgatatgttgacaaggatcgaaccaacatgctcaaactgatcatctggtgcgcaaataagaacaatattcagtaattcattcctctttttatacagtagctatgaaacttgattgcaaactaaaaaaactaccagtaagtaactacgcataatattcaatggtgccaatgcaaacattaaaattctagactgtcctaccgaggattagatttagatatatgaaacaaaaacgtgatatatgaaaaggaaattccaaactatcatatctagaagtagatatatatatatataaacttggacaaattatattacaatactaaagtgggaagtacataccagcagtttcaccagaagacctgcaaaatgacctaacaagcttcatgatatgtagtccatgcatcttctcatcgtcaatctaacaaaggcataaagttttacacgattagctacgtcaccattagactaccaaaagataatccccactatatattacacaaatttaacttatgataaacgacctgaagcaaagaagaaaccccatcatccaactgagtaagattcactagaagcataacaagtaatctggtaatacaagactctggcttatacaacatgtccatggccactttaatcaaacccatttgaatcatcttctttgccaattcacacttctgagaaagattaacaagagcttgagctgctggctctgatacctcctgcaaaattgaattcaaaacaacatttcaatatctctcaatccaaattcaggaaacaattagtgcttcttaagagttgattcaatgaccttgctttcatttagaagctgagacaatgatggaagaagaatctcggaatactttgatagagattgtaaaccttcctcggaaccagttaaaccactaacaatttccaccgcagctttcttcacctacaagtttgtttcttcattcaatcagactcatcggtaacaaaaaccctagaatctaaaattatcaatgcatccccatagctcagaaacagatgaaaccaaaaagcttacaggcggtgaaggagatgacaaaaattcgacaagctcttccagctccgtcaccatatctccgaggaagaattttccgtcgagagagagagagtatcaacgtttctgcgcgtaaatgtcaccgccggcgaacacgaaaaatcctcagggtttttgttgtacaactaaactaaacactctaaattgttcagaaggtttaaaaaaaccccaaattcagtaatattgcaaaacaacccacagactaatcaaagttttcataatcaccttccaattaatagtaatacgttttgggttattttgtcaaaattttagttagtttgaggattgttttaaaattttacctaaaataaaaccagtttcatctttgagacaaaaatttgtccgtggaagaaatcttgacattttcggatttgacaaagatggaagcttgtttgagatgttcacgaggaagctatctaattgaagccatgagaccactctccagctctctccggccttcttcttctgtctcttttagcaccggttagtttctactttctaatccttctctgtttctcaattaaaatgaccaaaattgaattagagtctgtgagttgcattttgattttggaattgggtattctgtaaattagggttcttattgtatgtctgtcaaaatctgacctttttttttacttcaattatttggtcattgtgaaggcaagccaatcaagagagcttatgatggattgttgcttgatgctggaggaactcttttgcaattgtcgaaacctgttcatgaaacctacgcttccttgggccaaaaatatggtcactttcttacactctttgtctttgatctgttccaaaaccaatttcagatgttctcatgttggcatttgtttctagttcaggtctcaagacaactccagctgagatcaaggaaggtttcaagagagttttttctgccccttggcctgagaagttacgttaccaggtccctaaatgcatgtgtgaatctctctttgtaatagattctatctttgctcgttactgtaagcaaacgtattaaaagagaacattctttcattgttagggagatggaagaccattctggaagcttgttgtttcggaagctactggttgttctgataatgactacttcgaagacgtctaccaagtgagtatcgagtgaaagactctttctttgaggcttttgactagtctttcggttccattaacaatccatcacattgttttatctcttaagtattatgcgaatggcgaggcatggcatctcccagaaggagcttatgagacaatgtcactactgaaagatgctggaggttattattactctctccttgttaacttagataactttttgtattctttatggcggatttgtaaaattggtgttagatgattgcagttaagatggctgttgtgtctaatttcgataccaggctaagaaagctattgaaggatcttaatgtcatagatatgtaagctttgtcatgttttgttatataaaccagaagtctgagtaccaaagttaacaccatgaatggtaatcgtttataatgcttgcatctcttgcaggttcgatgctgtgattgtatccgcagaagtcggatacgagaagcctgatgaacgaatcttcaaatctgcgttaggtattggcatattgcattctaaactgaagtgttgtttcgtttaaattataagaaaggtttcagagttaacattttgtgtcaagcggagaacaaattaacgttaacattttgtgtcaagcgcagaacaaatcagcgtagatgtaaacagagcagtgcatgtcggagatgatgaaggagctgataaaggcggagcaaacgccatcggtattgcttgttggtgcgccaaatatacttttcatcttgttttttccgaggtttttaaattctcatccatcataacacatagtgctttttgtttatctgttttctttgaaaatttaggttgtggggagaagatgtgcagacattttcggacatacaaaagcggatcttggtttcagaactctaagcttcaaagattttgttctgcaatatttttcagaccctgtacacacttactcaatcaacactgtaatctgtctctttaaaaatttaattaataatgaaaaagctgcaaacttggacaacaagaatctaaaatttaaatcaaatagatggatccacgagaagcaaacaaaaagaagaaaatggtgaaagttacaatatagagattaaactctcgaaataacaaaaaacactatctccgcaacgataggtgcctatggaaactgaatcaacagatttggttttgatatcatatatcatcagctgtctactatttgatctaggacaacacaaaagcttattcttctccaaaatggctactggtaatgattgcgtaacactacgattcactatcgaatatatttgttcccaggtcttgttctctgaattgaacgaccatattatcatttgttggagaggtttactaaccgataagcacaaacggttattcaggctgcgtgtgataatgtttctatgatctgcttccgcaaaaggagctttagagataacttgaaaagtttcggtgtggagatctaacgctaaaactttaatttctttcttcccggttaaccaataaagcgatccatctacatacagagcatgcccccgagacgaggaagtattaatccgataaggagaagaaggattgatatacctccaagtgttggtgctaaaatcaaaaacttcacatgtagtagcgttttctaggccaagttcggaagagttatacataaccaaaccggtttgtatatgccactgattttgtctttgccaaatccaaatttaacgtgactaaaataacttggctgctcaagacagatttgttgcaacctggaaacagggaaacgtcgatgccatcgagtggcgggattataaacaatgttgtttaaggtttggtaatcaaagaggcaaacaagaccgtcacaactattgtggaaaagttggtaaatatgatatcgttctgatgatatcaacaacacgttagttttaagtggaggagaatcagcagtaacatgatggggcaacaccaacgtactgggtacttcagacaccaatacaagatttagatctttcccgccagctgagcagatcaactgtttcgcctggaaatattgagattcgattgtcaacttccattgtttgcaagcagacttgaatctgagcagagatttcaccggaactctctcaagaatatcctcaacggtgtcgtggggaagcaattgcattatttctctgtctattgagaggattttgttctgagtgatggataacatgaaagatatgcttatttgtatcaattcaatccaatgttgattttttccttgaggaggaagataaaaaaaaaaaaacgtatatacaatcgatgggccctaaccctatccctaacaaatctctttaatatgtaatgcgctttaatagttaaagcccattagttaaaaacccagagctatattgttgacctagcaaatttcggatctataaattgaagccattttctaggtcattagttttttcgtcgagcagccgcgctttttggccgaggaaggataaagagagacgccatgggaagaagtaagtttctctcgatctcttgtgacttctctgtcaggatttctgtgttcttccgattcctccatggatttaattaaccaaatgttctctctttgttgcgattttgagattctgcgattcagtttttctattcatcggataaatgattaggtttatatagtttctctttagataccaattgattgattaggtttttatatactgtgatgattttgagctatatgagtttggtctgagctgaaatctgaataatctgaatattgatttaggacctgcgaggtgttaccgtcagatcaagggtaagccatacccaaagtctcgctactgtcgtggtgtgccagatccaaaaatcaggatctacgatgttggtatgaagaggaagggtgttgatgagtttccattctgtgtccatttggtgtcatgggagaaggagaatgtgtcaagtgaagcacttgaagctgcccgtattgcttgcaacaagtacatggtgaagtctgctggaaaagatgcttttcatttgaggattagggttcatcctttccatgttctcaggattaacaagatgctttcgtgtgctggagctgataggcttcagactggtatgagaggtgcttttggtaaagctttgggtacttgtgctcgtgttgctattggacaggttcttttgtctgttcgttgcaaggatgcccatggtcaccatgctcaagaggctcttcgtcgtgctaagttcaagttccctggtcgtcaaaagattattgtcagcaggaaatggtatgttcaaagattgatccttgaatcattttgttgtttgattgttttatggatacaagtaagctaactcatcaagtctttgacttttttttcaggggcttcacgaagtttaacagagctgacttcaccaagttgaggcaagagaagcgtgttgtccctgatggtgtcaacgctaaggtattattggctttacatcagaattgtcactctttgatcctatagcagtgatagttatcattggaaatatcatttgttgttgaattgaacaatgttttcgtttttttttcagttcctctcatgccatggacctttggctaaccgtcagccgggaagtgcctttttgccagcccactactgaagagtatcagaactgaagtatccttctcattccggtgaagaagaattataatcagcctgaatctttttacttatcgttatctctggtgttgttttaagtttttagttggacacaatcagtattctgaatctttttgtgactcttttgtttaagctctgaaatgattttgttccttcgttcttggccatatatctttcatttgcaagttttatcatggctttagctttaaatattttaattgaagatttgcttgaaaatcgttgaagttttagatagagatgggtgattgccttgttggatcatttagtatgcataaaagatttgaaattagcatagcaagcccatcttaggtattgtcatgcaaggctgagagttcaaagagaaaatgacagagacctacctacacgtcaaaatcagatgcaaactgccattttcctgattaagtctatctttgttttttttacttttcaaagaattaattgccataatttctgaagaaggaagcaaaaatcccaaaacagagaaccaagagaaaggagaaaaattgaaaagtttatggtattacttgcaagcaaaagatcaagttatcttgcaaacaacaactataagattaaaagctctttttcttctcttatcagagaattgaaagaagaacacacaaaacacataatatagtctctttgcgaaaaaatgaatgaaacgaatataaacaaaaattttaacaaatagtatagcagaactgaaaaactctagattctgaactttctccaccaaacttattacaagacctgtttctgttctttccaagaaactaacaataccaccaagatgattgtatccaattgaattcaaataaatttcttttataaccaaaattaataagaaaaaaaagactgcaactttcgacatctccaacggcaggagaatcataaaaatcatctgaaagttattgttgaaacccttttatcagcaacccatcaccgcgcaattgtaaacaaaattcgatgaatgtttcctaccgagcaatgtccatagaggcggacttcgatcactagatggtatccatgaattcagttcaatgtaccctccacctgaactcctaggaccaccaatcacaatcaacctctcaccgcaagctctaaacgctaatccccaaccgttaaccgagtcagctctttcgggcaatctccctaaagtaaaccatttcttactctccttatcatacttcctcacttccatatcagcatgatcagcagcatacaattcgttattcacaaccgcaacaagaggcggcgcctctgctgctgccggcatttcccggctccttggaggcgacatttccggtatctcagtccatttcttcgtctctaaatcaaactcctcaccacaagtaagcactttcgaatcatttccaccaattcctccaatcacatagaacttcccatccatgaaaacacctgaacacatcttccttggtttattcatcttcggaagtgtagtccaagtctgaagctcggagttatacatctcagcggaatcactgattttgccaaaagaatcaaaaccaccagcaaagatcgcaatctctcctagactcgctgagccaaacaaacacctcggagaattcatcctcataccggaagaccaagagttagtcaaaagactatatctatatataacatgagaagagtaatcatctttgcctaacacaagcaaatccgtaccaacagctaaagattctttatcggcacacatgaatgtaacacctgaaggcattgtaggcaaattcatccatcttctttcaaaaggattgaaagcaacccattccaaaagctgacaagagaagtaaacccaatgttcaacaatctggttttgcctcctgagtctataaatctctccggtcttcaccaaagaccgaaaactccggtttaaagaagcaatcgaaccgtaaccagacctcgagcaacgaatcaaacagcttatagaattgtctctgccaatatcattgataagtgaatcgccatcgctattaccattgttgttagaatcagattggtcttgttcttgttcatcttcttcaatggcttcattcccatgaattgaaaatcccatcaatctgggagacttgctctgtctgagctcatcaacatcattctccaatgctcttttgccattgatgagattagattcagaggaatcttctggttgtggatacatgtatggccactttgattctgaaagacgagaacttgagaaaatccttgacatcaaatatgtccgatcttccaccatcttctccgtacagattccgatgttagagaaatcagatcgagacgagaccaaacacgaaatgcaaaatggctaaaagagagagagagattctgagaaatcaaaagacgattagatgatccaaatctcgattgataaaaatggattcagaaggaaaaacaaaaatttgtctctttattgaaacatcaatcgccaaaacaaatttggtagcttcaaaagtcagatctttagattccaaatttgactcggaaaacaaaaaaagaaaacccagaaaaacgaatcactgatctgaatatgattcctttagcggagaagaagaaggagagaacaatggagaatctttaacaaggaagagattatataataataataataataataataagaagaagaaagtacttacggatttggattaacgaaagagaaagaacaaaaaaaaagaagattaagaatatttattcaattgtggtctgttggaaactctctgcgaatcggaagtgaagcgtaatgagtttcctcaggtctgaaagttaaactctttggatgtcgaattcaacttctctctctctctttcctctgttttattcttcttcttttttttacttgggttaaagcttttggaaacttaattaatttagtaataatggtttctctttctacatgacgtccgtagtccaaattattcagataagattttcataaaaggaaatattttagattaaaaaatcaagaaattcaaaactgtttctagttttgttttgttttctagtgttttgaagttaattaaatgttctaaagtttcagtactttacttgtttatttttttcctctggtcaaaggatgttaaattgctttgtagtaaaactctatgtacgtcatagtttttatttctttgtttttctacaaatgtacgtcaccaaaaaaaaacaactttacgttttaaaagatagatttctgtatgtaactattgacaatttttgaaggtaaagttgatttttgtgaagcacaggctaatttccgtgttcaatattttttttgattaatatacaatttatctgaccaattacacgttataaaatcctatattccacaaagaaaaatattaatattatctctattgaattattttagttgtttgctaatacgaaaaaaaagaacatataaacgattttaactagactactaaaacttttttttttcttttttgactagtaaaacttgaacactacaataattatcttagacgagatatatgaattttggtttgaaattgtatcgatggaatataattagtgggacaaataaaggacgacctagacgcatttccacgaaatattatttaggaatatatagtagtactttttcattggaatataattatactttttctgttcttcgaacataacatttcagttaaaaactgtactggaaagaagaggatgtatgtttatctgaataagctgaacagataaattaggaaaacgagaaagctgtcgacaaagtgatctagaggttcacggagcacgtgttgacgcacgtgggagtatatctttgcacattaaatcatgaaattagtgtattaataccattgttattactagtagtttattaccgagattaatgcattacttatttgttgtccgttgaccagaactgatatggtgggtgggctcttttatctcatcggaaaaaatattattcgtccgttctcttggacgtgttggtttatcataatttttattcatctacaagtgttttatcgtttagctgatggcctttttcaaagcatgagataaatctaaatgtaacaaatactaaaagattagtaagacacttattattattatggataaaggtcttgatcgtaccatatgttatctttacatatttcacgcattgattagaattttgataaatcatcgaagcttaagtcgcgccgaaagattttagcgtgcaactaaaggattattatattgcgagttgcatcttggcagctgtaatccactcattaattgccacgtgtgaaggccatctttaaacattatttggacggtagaaaagagctttatcagtcgttagaatttgtgagtaatctaatcaaatcatttgcatatctatctttctaaactgtgttttttctcttattttgttatatctatctttttatttagtttttgctttatcttcttaaggcgagatgtatggtatcgttaacagttaacacggtattttgactattatccaagctcgtgaaaccttttcataagtaattcaaggtgcaatgaaaatgaaaaaaaaaaaaaaatcgttgaagttgacatcgtatagaagaggtctaagatccatattttatgtactactttataaataaattacaaatttaatctttgagacattgtggtgttaataataaccattttgtatttactgaatttcgataatgtttgtgacgtattgttctatcaaagtttccaagtttgataagatttttggagtcaaaggtcaataactatgaatttaaaattccgttacctttcaacgatatttatctaatactatctcagcagaaatgcagttacccttaattaataaaaatatatatatattctacagagctgtttgtattttcatatggtaaagtttcattatcttttcgttttcaatgaatattggttttgacttttgaccacaaaaacaaaatgaatattggttggagaaaggttaaatataaatttatttatttttgctttcgaattttcttctaaaattatcgaataggtgactgtttttttttggcgtatcttattagtgacttgtgtctgaaagtgaagtcctaagagctgtccacgtgatctgtttgtattgtgtgttcacattccttttctttccacattaatctctcttatattaagtgtcttaattgatgactacattcctaatttatatatgtgaaagtgttattaagaatctgagtattgtgttacataagaatgggtataagattgctaaagagaatccccaaaattttgtttgtatttattttcgagtagttgatataccttctcatgtgagttacattactttacgagccattatccgacgcgtgaaagcccaggctacatctgtattcacaactgaggaaaaagacaaaattgccaacaaaagtattaggttgaaaattgatcattacaagttgcaagttgcagcacattacaatattttcttctcattacaaaaaatatcgaaaaagattttttgtgtgtgtatttgaatagctgttataccagctaattgttttgaattatccgtcgtaaggagataacgtggtggctcctaatacctttacttcttcttttcttctcttttggcaatgccttgtcattcaagtcaacgtcgaatttcaacacgtgctcttcgtaaactcaagattacatagatttgaatgtaactaacttatcacatcttatatctagtcttctaaattttgctgtctatggataatataacataatatatggtatataaacaacacattatgataaatatcttaaatacattcactttaatgggatcgtatgaaaacattttgtgtttcttttggtcataattgcaagttgaagtattggttaatgctgaccatcaggcaaatacgaagagtaaacaatacatgattaacatctaagaattgtttgttctggtttcggccgttttagttttcggtggatatggaaaaatgtgtagaacaaaaaggttcagaactccagaattctaccacacaaaagaaattgtttcaggtttgacgcttataatttatgatttgtggaacaatgacaaagattatcatcgactaatcttagaagacacttattaagaatcacatatgaaaaaagcttactagatacaaataatataataacaataaacaaactctattaacaatagaggaaaattgggagatatcaacttggaatgtgatatttgaatcgactaatcgagtcaattaaagacaaagaaaattatgatttaagaaaaacaggtgagtttgataaaacacgttgtagtcttgttgtagatctccgaattgacgtcaactcaatatcaaaatctttcactatgaaattcaaaatccgaatcaaaacgtctaacctagctatagaatatatacattagtcaatggtcaaccttttatattttattgttataatcatatatggtgaagataattgtatttggaggaccaatattcaactatttcctgtaatttagaacatttatttttttcttaaatatatgttttttgcttatatatagtcgcaatttttagaagttccataatccatatacttgaacttctaaagctatagtcgcaagcaccttattgttgttgtttaataaaagttctaattttggtagacaagtgaaaaaacaaaattaaactatctggtgtttacatatatgaaaaatatacatttccagcagtgaattttggttttgcatgaaaaatacataaatagcaattcactgcagcaggggtcagaatatagaaacatgaaccacacacataaaaaaaaagtagattctgactagatcaatctgaattaaaaactagtaaattttgacagacggacgtggccgtggaaagaagtagaaagagacaatgagagatggagaaagagagacgtaagtattgatttggccaacggctcatatgcaaagaatattaataataataatgttctttgcgtttttttaccaattacatcaaacatttgttaggcacacgtcttttctttttctcctttttagttaagggcatctccatccatgaaaaacccacaaagtttctcaaacaaaaaaaaattaatattatattataatttgattttttgattaaaaaaatatttttattaaaaagttgaatcaataattaaaagggaattatcatgatggattgtagagaatatctcagagtttctcaagtaagaaactttctactctctctccttcatttttattatttttattttttaattgtgagaaactcttataaaaaacccccaatgaaaatggtctaactttcttttccgttgaatttctctcatgtattaacagtaacataagtatttatatcacatacacttgtcaaatttgtctctttagagattttaaaaagttatcacttagagaacttttacctgtttggactttggacggttagacagataatatctaaaattactccaatttttatatatacatgcaatactaaggtataaaaaaggttctagaatgttaaaatcgttgctgaaaaaaaacaaaatcgtctatagattgttaatttttgcttcttgtacaaacacttagtaatgattaatgatttaattttaatatgtaaagactgatttttaaaataaaaaatagcataagatgaaaatttatgtttcaaaaaatatttgtgattatgggttgtttgagactggaaaataatcaaacaacattgggcctttcatgtagaattttttattacatttagaaccgttaacgatatgggctaactcaagacattaaaggcccaacattgagttactaaacggcgcagtttttagctttttaaaattgcgtctttttcgttcactgaaaaggtagtccttctctttcccactcacatcatcaacttcatcaattcatcacctttgtctctctttcaagcttctctgtgtgtgatctccgttggtcaacaacaactacaacaggtaacttctattcttcgattccttaaatttcttctctagagcttagtgaatcaacgatttaggtctgaacatatttggcaatctgtccttgctcaaatttcgcttgaaaatttcaatcccaaatcatgtaaagctaaatcggaaagttctatgtagttcccaaagttgaatcacgaactggaagtaatttaatttattgacttaggatatgttgaaatttttaggttttttgttttgtttttagcttattgagcagagatggatcatcaatttggatatggtgttgaagttactgggttatctccatctgttactcataatgatcttatcgatttcttctctttctctggtactatccaagatattgatattgtcaggtgagtctttttactttttagcaagtttgttgtttgtttgcttattctggattcaaaagagtacactttgtaatgttgttaatgagactaggtcgggtgagcaagcttgtactgcttatgtgatgtttaaggattcttattctcaagaaactgctgttttactcactgtaagtgttagtttggatttgattcactctttctatcttttttggatgtctcttgagaaatcactcacttctttgatatcttcagggcgcaacgatattggatcagcgtgtttgtataactcgttggggacaacatcacgaagagttcgatttctggaatgcgacttcgcgaggttttgaagatgaatcggactcacaagtatgtatcgcttttgacacttctctcaactttgatctttctgtcttctttttttgttaaaatagttaaatctaacggtcactggttcagtagtctttatgttgaagtttgatgcttggtctcaattctaaagcttattcgttcttcaatcatgtagcattatgctcaacgaagcgagttcaacgctggagaagcagtgacaaaagctcaagaagtggtgaaaataatgcttgccacaggattcgtgctaggcaaagacgctttaagcaaagctaaagcctttgatgaatcccacggcgtatcagctgcagcggtggctagagtatctcaactagaacagaggattggtcttactgacaaaatctttaccggacttgaagctgttagaatgactgaccaaaggtatcatgtttcagatacagctaaatcagctgtctttgccacaggaagaaccgcggcagcagctgcaactagtgttgtcaatagcagttacttctccagcggagctctttggctgtctggtgcattagagagagctgctaaagccgcatctgatctcggtacccgcggctcaaggcagtgaatagaccaatggcccgattcagaaccgtattcgtctgtgaatatatatgatgcaaagctgatcatgaataactggctcatgaagtgtgataagaccaaattttatcaaaacgaataccatatagaaatctatcaaagtatactctcacatgatgatgctgatatagagtttggttacattacctacatcttaactcttcattagtagcataatcttttttcttatataatttctgatttatatcattctatggttgatattgattcaatatttggatagatgttgtatccatagagcttaggccacgtggcacaatttgcgccaaaaaatcaaatccaaaaaacagagaagtcatcatcttttcactccaaatcttccagtcactcaaatcattctctcatggcagcttcttcctcaattccgccgtcaaccgccgtaacctccgtcgttcgcaaatctctcctcctctcaaccaccttctccttccccgcttcttcattgtctccctccacgaaactaccacaaagacacattcaaagattgctcctagcttcctcctccgcatccgcatccaccgttccttccgattccaaaccggcgaagaaagaaacagtctacttcgacggcggagctcattacggagatctattagccaatctcattctaggtctaaccatcctttggctcccactaaccttagctgcagtgtctcgagcttttaaccttcgttacaggttcactaacctccgcgtgacggttatttcgggactcaccggagatgatcggagcgatttctcgtacaaagtgataaaagacgttcaagttgtgccgaggttcatcggagaatggggagatatcatcattactttgaaagatggaactaaagtggatttgagaagtgtccctaagttcagagagattgctaagtactgtttatctatggctgatcaacctgctgttttgaaagaatctggtgctaaaggcttttgattatttctcatttctgggcaaaattgattcttcttgttgtgatttcttcagtacaaatcgaatcctttccatgttctttcatttgttattgatttcttcatctctgtattgttaagacgatcgtatctaaacggcgcgcgattttagctctacaataagaaacggcgtgatgtttggttaatgttgaaacggcaggtagtcctcttttagattagagaaatggcatggatattaatactatcttcttcttttttattcatatggctgcattttaagaatatagaggattaacagcccaaagtttggattaaaaaaaaaacagcccaaagttatttattaattattcaagttcaaaatagcgtcaattatctttaatttatatacacgtttatttatttctacttttctaataaccaagattcatcataagcaaattaatctctaaaaagtaaaaactatcaagtttatacaaatgggcaaacgaaaatgtataatttgaataatgtgcccacattaatttctatactcgcatatgaaaatatgattacgttttttatgggataacggattcaaatacaagaaatgggattacatattcaatagcttcctttgttagtactttaattctagtagttcaaagactaattaataagaactacatatggtcctatctgttaaatttgaccatattaatctaataatctccattggattccactaaaatttgttaaaaaaatattagtagagaatttcgtaagagaaggttgatgagtatgtatagggagtcttattaaagcttctgcctctgacacattctcatcaaatcttatgtagtcttccccatttcccaattttgaccatattattcttgtttttattctttgtttatcataccccgttgtcttctttcattgtttatcctatacgttttctaatcacatatagggtgtgatatggtgaaagcaaaaagatgtgggagtaaaataaaaatagattttggcgtaattatttctgtccattttctctaattgttttgtagcggaaaaaattataaagttttcgacactttcagctcaaacctttttttttcctttttctgtgaatcataggcgaatctagagtaatattttattttactctaacaaatataaccaataacacccatagtttttatatctccactccaatgatgcactatttttagagaaacatccgaaatatgaatacattatctccaaaatatagtgttagaagttggtttcgcaatgtgagttcatagaagttgcatataaagcataaatatacaccgtaaagatagatggctcactatccaccagcaactttcaattaaaaaggaacattttgcagaattcatatttctctctttgttcccaagctttatgtcacattgtttcacatgcatgggcagaatgggctgattggcacatatgtgcacttacatgtccgtgcgctgtgcgcatctgtaaaagttcatgtctacatggtaaacaagtacgcgtattgaatacgtacacatacatacctctaaaatggcgtattcacgagaaatccaaaatacaatatgggatcaatatccaatatcagctgaattcttcggataacttagaatctatatataaagcaaaaaccttataatatactattaactttatctcaaaaaggaaagtggttaattctgaatttggtcagtctttttaattttaaaataaatagaaaaagggcggcgcatagtagaagttttgtcaaatgtcaggctaacacgcatccttaaattgtgcaagaatgtctttcttacaccctcccattgtttcctcatataacagataaactgaaaaattctgctggtagatcattttgaataatttcagaaggataatccatatatatgctaactttaacaaaacagtatatatataaagcaatgaaaagaaattagagtgatcatatctaaaagataagaaaccttagtataaagccaaactaaaaatagaaaggttagtgtatataatatatacaaggaaaatctgatgatcaagggcaccttaatcgaatgataacggaggactaactaaaattaaaatggacatcggattcctgagactatataagagcttttcgttgtagccttgtaggtataggaggaagtattttaaaagaagaagtaaagctggctccaatatgagtgaggccccatgcgattgtaggaatcccaagcaagttaacctctactaaacgtttatattttaaatgccggaaaaaataaaaaatagtagtgcgtgttttctggattaatttgaggtgtgtgtatattttgatccaattttttttctaaaaactaacctttttgttgttgtctatattactctatatgtttcggaactgtcaatatactgtatttaagatataaaatgttcgttaaaattcagatattatggagccttcattttggaaaatatcatatttatcgtcttcccctctcctcctctgccttgactagaagaagtctagaacccaagaggtatgggagctgagcccttaaaccaaatgaatcgacttttgttatataaaatgagtccatactatacgatgtggcgaataaaagataaaaggcaacttagtgatgatacgagagccgcatgaaaccgaaatccacgggcacggcctaattgtactatagtatataaaagtgtacatatctatataaaatattttttttttgttagaataggatgatggtcaaaagatatacattgcattataaaatatgatctaaattttgttctctactataattttaagtaagagtcttagaaattttaagtatcttttctactgttattttaagtaaaagtctagaaattttaagtatatatgttttctacgtgacaaaattaattgacttaaaatggtttaatcctctaaagttatcatgcattgagtgagttcgaattcctatataagtagagatgaaatggtacatgaccattagactaaagaaacaggaagatataacattaacgcataaccatacgtacgtaactactactaccgtactacgtacgatctatagtaacgtgtgtatataataataattaataccaatacaattgttctgaagaatcgttaaacggaatcgaataatcacgtagtatccgatctacgtagatataactctctctcttttttgtttaattgtatttcaataacatagaaaatcacttactcttttcttttcagaaaatctcagttttcttcgaagtcgctaatttttgttttggtttaacatgtagacgtagtgggcagcgacgtagggagagagaagaaagacacgtggaggtgagtggtatgatttggagaccgctcctacttgggcatgatgtgatcagaaaaagagccccacgaacgttttcatctcattaaaactataatcaatctctctgggaacttgggccattccctccaacaactaacaccatcgacacatactttttgctgagttattttgtttatatattaattatgattatcaatgtattaatcttttgattatgtttgtcaagatatttttttttgtgtgcaaagtttgtcaaaatatttgagtcaccacttttattgtggatcttcacaagttcgcatactatcccacttatcattaaaactaacggaaacttttgtagtaatagattatcaaaacataatatatatgtagttttaagtatttcattccgatgattaattttagttaagtagaagtccataaaacaatgaggattcactgttggaaaaataaaaagaggattcaccactgctcaattctttttctttagatgcatgctaagtagaccatacattgtagtgttgctttcatgatgaggataaggtttaatctctttagaacacaaagtaagaaaaaatatatgccatattatgcatatgtattagttaattaaattaaattaaatttactgtgtttatgacgaataatatgacaatattgtcacggacttggtcaaaaatatttgctgcaaagtccacatagggttggccatagccttggaaaaaatagaatattttcaatcactctttctatttggaccctttgcatatttcattaatatgttttcagtcttttttttttttgtcaataaaatatattttcagtcttatttctcctaaattgacgtcgatataaactcaacataatatggaaatcaatattgtgtatagagtatttatgcaaatttatacaatccgagagctagtggagataacaggtgcttcaaaagcattaggtattgatccaatgggattgtagatgtgatggaagatgtatgttcactctcaatcacagtagatccaaaaaaagccacacaaaatggcataaagagtcgagaacgacccatgtggtggagggaatacttttctttctccccttttaaaaaactatcttgaacatatttacgaaaaccaaaccttaacagatatttaatgtatacataatatttacatgagtattatctcaaattacttaagacatgatttgctaatctcgacttatacgacgatctgctcatctcgactttcttaaaatgattgttttcccaatagaaaagttaaaagggggaaaacgtttccattcaattaaatgattgatattcagttaatcatttaacagcaaaatcaacatccaattacacgttcatgtatccatttaaaaaggattaaaagaagaagaagaagaagaagaagataaagtagtaaaagaaaatttaaaaggcatcgaatattataaagacctaagacttcgttggattaattttaaaagaaaattaaaaagtgaatgagtttgtagtagtagtgtaaaatgtgaactaaaaggaaggcttttgttgaacaaaaaaaaagaaaaaaggaaggcttttacctagggttccattatttatcatagactttagtccttttttggtttcttgtaactctatcggtgtctgcttgtgggccttctcataccaccgacccttttgctccataacatatatacacacacctttgtttatttagtaatttgtgagaatgactagtttttgttatttgtccccaaaaaaaaaaaaaaaactagtttttgttgttatacgatgttcaaatatttgtacacattggaaacataataagtcaattcaaattacgcaagctaccaccttatggtaatatctataagaatgtaataactaagtaggtttccacattatattggtttttaagattacctcaaaaatctattatcttttgtttcaaaatatttatcgattttaggcatcgaatctagttacatacacctctattatttgaaaatgaatgaactgatgatgattgaagtgttgagaaatgtgggtgatgtcatgtacagtaagtcaataatattgtagtggagagaacagaatgaagcagtgaatcactgattcttccccgccaaaacatccgaatctaatagtattaacagttcaaaacatcgttttctaacctgatactagcttaattatattgcatttagagttttgtttggtttactaaaattgaacccattgatttttccttgacatgcacttgtcagcaatgctatgtgctttttatttggacatatatgtgtctcagtctcactgtctccatgtgtatacatcattcagttacaaatcgataatcatattttataactgatacatctacctatttattgcgcgtacttacgacggttccgttgagacttgagatagttacgttaattcacgtatcgatcgttttcattcaaaatattgttaatgtattctacataccttgatatgcactagtacgtacattcagaaaaatcgagtccggtgatcgaagaatcatacaacacgtacgtacgatcgtacgcaaacatgttaatgagcaaatatatatagttattattgttatcaaatactaataaatatacataactttgatacttggtacttggtagtactattatttagagatattatatttaataataaaaataataaactgggctggaccaagattgacctcactgtttatctttttcttttttgataacttgttttaatatatgtcttttcgaaagaaacttgagtgaaatcgaaaaaataaaatacaaaacaaaacaaaaagaaataatcttgatatatatgctaccgaaattttcgaaatgaagttaacatataaacataaaactataacgttaagtttaatcgcattgatcgcattactaagttgaatccttatatttattatactcatgcagaacaaaaaaaatcacgtgtgataattttggtatagttatgatccaattagaaacttttttgtttcagaaagaaattcacatcaatcttaaaagagaactcccacttaataacaaaagagaagattcatgaaattgggtagaagctttaggaaatgttcctttgtttggacacttattataagttatgtcaatattatatgttattgacacttcattagagtaaaatacaaactagaaactgagaagagaattaaacttgggcctaaaactatatagtctagaaaataaattaaaagcaaatataattacacaaaaggatgtagacaaaagacaattaagtaacagtaaaataatactacaattttcttacatccactgctcataaaatgtgatatgtcagaagtgcttcgctgtctaaatttcaaatccaaggcaccacgcgctaatgtaccgcttgtatctcatgttccaattaaaattcgacaattcataattcatcaactattcattcttgtttttgttgtcaaaactgaattttctccaaataaaatcaaactttgaaatttctctcttggatatttataaatacatgatcattctgactaataaaaagaaaatcactaatccggcttaatttttcaaaagttaattattctctcgaaagagtagataaatttgagagaaattaatgacttcaaggataattactttagttatttatttgtttgtttattccatttgtacacacacacactaaagactagagggtagcaagtagttaccaaaattaattgcattggtcgtgactggtgggagctttccgtttgggtctatctaaattaaattgaaacagctcactggacatgactttgcatttgagattaaaagaaattaattttgggaaaattcaaaaatttgaaacctaaagaatcgaaatcaaacgaataatggccgttgaatcacgttgcttgtcatgtaccctctttaacaaaacaccaatgaagtgttgccaatatccatcgcccatttctttttgttccaatccaacgtacattttctaattcttgtttactctcctttcgttgttatttttataataaatgaatatgctagtcttttgttttcttttccaatattttttattataaaaactacaattaaattcgatagtttagttgatgaattttacgagaaaacataaaagtgaaggccttcaaagagttcaaacaactaaaagattactttacataaaatcgtacttgaaactaaaataaatcgttacatgtaaacagaaatgtcattcctcataacaaaatgatatacatatttatacatgcatccatgaatcgtgtatattgaaccatatagtagtattagctgaaagtgcacacttcaaaatatgggtgtaggaaacccataaaagtaatcatgttctccacaaaactctagacactagtaccgtaacataatggcaagtgtttttcttacaatatcttctactactactactactatactttaaaaaacacaatggcaatgggactagatgtaagattaataaatgaaaatagctagagtctataaaataaaataaacaaaaatttggggaaaaaagaaagagaaagaaacataattggtgaagaagagaggcagtaatggagaacaaggtcatgggtttcagcgttttttatttttcaaacttcccttcatacccgcgcacttactcttccttccgttggctttcctttttatttttattagtatctttcttctttaaatattttatagagttctacaaatttaaaaaggttttcatgtggagagagaaataatttatattcagattgaatcaagaaaatgtgtggttcttttgttttctcatttttctctctagcattttgaatttggtaagacaaaacccatgtcttcatgattcttgaatgactcataaaaaaagttttcttatataaatagccattttctttttgctgttttggagaaactcgatctctgtcaaaaaaaaaaatcgaatcagaggaattatattggcagtggagaataaaaataaagcaggtaaaaaactcgagagttttcagtgacgaaaatgagttccttttcagagtttgtctttaattaggtttttttctttctttctttttttttcctgcaaaaaagttgaagaagtcattgtgtgtgataggaggagttggatttttaaaaaaggtaacggagcgtcgaagaaaaataaatagaaaataaacagagacagaaagaggacatatacagtaagaaaatataaagagagagacagtagtaagaaagaagaagaagaaaaatggaagatacgaagaagaaaaagaagaagaatattaacaacaaccaagattccaagaaaaaagagcgtcatattgttacttggtcacaagaggtctgtacatatatatgatgaaactctgtttttgttttgtattgctctgtttttgagtgattctgaaatgggtttatggagttgcaggaagatgttatactaagagaacaaataactctacatggaactgaaaagtgagctttcattattcatttcactcttctgtttatttgctatgaaaagtctttttttttcttatataaaatttttttccttggaaagtttttgttttttgaaaagatggattcttaaaagaggttgttgagatatggtttccgttgtgtgttttgatgatattagttgggcgatcattgcatcaaagttcaaagacaaaagcacaagacaatgcagaagaaggttactgaatcgattcaatatctgtttttctgttttttttctgtaggcaaaaactttcctgggttctgttttgaaatccggagatggatttttgtttgcagatggtatacatacttaaactctgatttcaaaagaggaggttggtcccctgaagaagatatgcttttgtgtgaggtgacttcacttacacagacttccattacatggataagatttttaagtttggtgtttgtggtttatgtctgatctttaatggacttttgtgtgattggtttctcaggcacaaagagtatttggtaatagatggactgagatagcaaaggtggtttcaggcaggtatagctcaagctcaaactctaaaggtgtaggtgaagtcatcattataagaccagagtggttaaactaatgttctgttcgttatgtgttttgtagaactgataatgctgtgaagaacaggtttacaacactttgtaagaagagagccaagcatgaagctatgactaaagacagcaactcaaacaccaaaagaatgttgttcttagacggtatcagtacaccgcgaaaatccgagaatgaaactcctattgctaagaaattgaagtaagttttgtttcttttttgatcaaataaacttaagtttcctgagtgtgttcacttttcacaaatttcatgggggtttgttggttattatacaggagaagtcacattctagatctcacagagatcagtaactatggaagggccgaggcatgtgtgaatcagcagataaggtctccattttcggttttagctcgaaatgccactggtattgatagcttggaagaacagaatcaaacaagcaatgtgaatgagagtgatggtgaagggatgtttcttaagaaggatgatccaaaagtgacagctttgatgcaacaagctgaacttttaagctccttggcgcagaaagttaatgcagacaacacagaacagagtatggagaatgcttggaaggtaaaccaaaaaacaacaaacttcgcagcatatcaaaatagcgaaaagtttcaagcttactaataacatacctcttgttgtatgcatatatacaggttcttcaggacttcttgaataaaggcaaggagaatgatttattcagatatggaatacctgatatagattttaagatcgaggaatttaaggaccttatagaggatttgaggagtggttatgaagacaatcaattatcttggaggtagcttttcatcaccacaaaaattttgtgttcatcttaaggttttgattgtataaccatttcatttgatgttctttaggcaacctgatcttcatgactcaccagctagctctgagtatagttccggatcaaccatcatggtggatcagtctggtgataaaacacaaccattctcagcagatactcagacagaacataagcaagttggagaggagttgctcgtcccgaaaaatcctgatgagaatatgcccatctcaggcgaagaaaagttcagctcgcctattcaggtcacgccattgttcagatctttggcagacggtataccaagtccacagttctccgaaagtgtaagcttcgcaccttctttgttcatcatacaatacttaggctttgaaaaaacaatgagtcttaaaagactgattgcttttgtaggagaggagcttcctgctaaaaacactagggatcgagtcctcatctccatgtccaagtgctaatccttcaaaaccacccccttgcaaaagagtccttctccatagcttgtaaaccaaccaaccatctctctcataccctaaaccgcggtttagtctccatggagacgtaattttttccacttttgcttagatttcatattaggttttgcagccatatcggcctggaagtttttgtgaagcgggcatgccatgatctgcattcctccctcaaggtttttaagtttctttcctggtcctagaatgttaacggtaacattttctagccccatcaaagaatgttctcaagaatctgccatatactcagattcagatttctctttcttttcttacttaacataaggaagccatctacaaaagaaggcaccagtgtgtctttaagaaaaaattctttggtttgtctctaagggctttactcagatacatcatctgagcattttccccagatttcttgatttgttttcatcatctctgtacagaatctctatcacatatatataaagaagttttccagagtgtaactttaggaaaaatgaaaaactcagaaggaagagtttgttgtattgttaagacaaatatatatgagtggaaatatatgatttgtcttttggtttgatatatataagtttcttctaatgcattagtttacattttgctaatggactaagctttcttctctctaactttcagacatatttggaagtaaaaagtttccaaatcaaaaacaattttcttgaagaattaaatattttgatccccaatctcagcttcaggcctttttcttcttctgcattctctgcagcttcctccatttcaggtaaatttggtaagacaatccaccgaacaccatcgacacacatccccattgtttggaagataacggattcccgctcaaaactgaagataccacgatgcttacaaacttcctggttgtggttatggtcgtgttagctagagacccgaatctgcttattgtcaagaagatgaagttttggcctactgcaccgcataaacagtacataagaatgtcccatgctgcctcagggtgttgcttgcagaactgcacagcttcaaatccgctcccatgtggcaatccaaacatgtagaccatgttgtatatggttccccataaattcattcccagcattatgtcccatgcgttagttttggggtacctgtatccatgtatggcgatgattaatgtccaacatctagaccatgttgtagatgtcagactgggttaagtatctgacagaatgtcaagagtcataccttgcggtaatggaatcctgggttgcgtttgtgaatccatcaaaggcaaggtttaagaagcaaagcccgtaaccaaggggtgcattgggatgtgctagcttgctgatggttttagagcttgtctgtaaaccaagtcaaagacggtttactacatttccacagacaaagtataacaaagattatgatcaaagttcctgaatgcagatttgcctaccttaagaagggcaaacatagatactcctccggcaacaagaaaggtgcaaagatactcaggcaaagtgtatcttatgccataaactaaggagcccatcagcataactacatgaaagaaaaaacatatataagatacacatagcagcagttgagagcgattatggattgatgctctaaattgacacctcacctggaatcattttggaagattttgcaaggacctgcaagaagcaagttttgcatcaatattacttcccaagaaaggttattacctcaactatcaaccataatcaagaaaaatgaggtttttattacactaacaatgcctaatttacctgagctgggtaactaatatactttaaagcttcaatgcccatagcaggaccaatggtattagtaatgccagcactccaatacgtccaccatggggctccaccagaacctccgttggaccagagcttaatcactgctcataatcaatcaaaaatacttcagttccatttattcgtctgttataaacttataattctaaggaataaacaatgaagatgccctactcacttatataagaccaaaccaagcagattacattctgagccaaattcagaaatgcaagatgctcgaatctcttcccatcttcaccaaatttcttcgtcgacctaattcgaaaatgttagagttctatcagctacatttctataaatttccaataattgcaaacgcatcaccaaccaggattccgagaatagaaacaatctcgaacaaacagaatcgagcaatgtcgagagaaaataatcaacgagctaaaataagattgatcgatttcgaccctaacgagttttacttacaaggtctcttgaagaatgccttggtatatgtaagctgcccagatcccagcgacacagaacgacaataacagaactcgccggagaccggaaccgtgagattccatcgccgcacgtcgcttattgttttatccgacggagctccggcgaaaatttgaatttcaattttacgctatttgatcagttttgcgatcaaattatgagatcggtctgaagtggaaacgaaagttattagagagagtgtaggaggcgcgagaaagacgtagattttccacgtgtaactgtgtcattggcttaataatctgacatgacacttctgattggctataggacgtggatttatttctggaatccaagtcatatgcacattcatgtctgagataggaatgggaactatgtgccgttttattgtcatgaaaacgtcacgcagtttcctagaacttgtaaacggatgttctttttacagcttgggccttaatttgattaagcaaacttgcacacagctaatcatgtcagtttgactaactgatgaattcatacaaatctaagatcacttgtggtaagaaaatgaaagaaaaaggcgtatatacacaaatggaggaaagttgccaacatgatttaattgattaaaatttagtgatgacccattgttaagattactaaaacaaaatatgatatatcttaaagtaaatgtgacaataacgtcaacatagcgagaaaagtttgaaatatcgaatttccattatattaaaacaaggtatcacatgcatgcactcatgcatagttcattatgatttgagtaattttctatacgaataatattatactatatctcaatgaaaatagaagttatatatattgggaaacggaatttatatgacatacttaatcctcatgggagaaccaattatacattttgaagagtcaaaagtcaaaactcaaaagagtgactcttaccggatacaaaatgaaaatagaagtcttggtgagataacaaattaatgtgtaacataacaatataatatcataaaagattccaaatggggcttttgtccacacgtgatatgcaatatgcaaaagaaaaaagaactctctttcgatctgccggtcaataacaatgtgaatatagattaactgattaataagtagtttcttgggtcaatgcatgggatattatatttaagaaatacaccaaaaatgtattcgacgttagccaccacgttccattaaaaattcaaatctaaatgatgattaccgtcgtctacatctatgattacaaattttttgtctactatgcgtttagttatttaccatggtttgacgattatatatataacacacataaattatgacggtttaacgttgtctcttaactcaaaacttaattttacaaaaatattatttaagagttgaatctcatactttaattattcatttggtcaactagaatgcgaaaaatccacaatacttcgtaactaatttcgggtcctttaaatcttgatcacctgttgatcaacaaaagatctacacataaagattgattcatccattgactaaacttttatttatcgaagaaagactatatatatctaatgcatgcatgccatatgcacaataatctaatagtaaatccaatacgtctcagaaagataaaatcgtccataataccaaattttattctaaggttttgatatctctcataatttggaagtgtatgtaaaagtttcttaaacataaatataacatccaaagaaaagttgtaaacacttaacatcttgattgaaggggaatctcgctaataattgtgactgaacgatagtaagtattattgtaaaatatcgatcaaaatttcaacgatatgggcgatccagacccaccactttgttgtcccttagcagacgtcaaccatgaccataattagttaaaaaaaacaccaaacaaaaaccacaacttccttttaattctttttaaattctaaatttcagactaacaaaaagtattcataagctgtttcatgtatgaatttaatatcatgaatactaataacttgagccattaactttaaccaaaaaaaaaaacttgaacaatctaatataattccctgtaacatttaaaagatggagatgggaaaacaagaattctaaagaaacattgtaaaaatgaaacagagacaaatattttcaagcaagtcttgtttcatttcatttctgtttgaaaaatgacaagtttaaagtcatgtctcatatgtgtaatattattaactttaaaatataacaaaataaatatctttgattactttttgaaatgttttttatctcaagaatttggaaattttcgttgattgatacattataaaatctgaaaattagatgtgaaacacgactttttgtccaccaccaatcctcctagaaattatcagtttatcactcgattactgaatgaatgaatgagttatctctgaaaagttgtcgtaccatttattatcccacgcggatttactgccgtgagcatgacgttaccgtatctatctcaaattactaaaattgtcctttccgatggccgtctaaaggaactaactcgagggcattttgtcattttgagaaattgttatgagtttgagtacaaaacaaaaggacacgacgactttgtattatttgcttcaaatcctctgttcttcaccttccttgttccttcttctctccttcttttttatatagattttcctttcatgttgtaatacttttattctattagcgttcatattcagctaaacagacattgcgccgccgttaagtcgaaaggatagaaagaaattaaagaaagaagaagcttgttgtctttgcttcttgaggctctcttcttgtcttgatcatctgttacgttgttccacgaaaagaacagtagctttgtctctccatatagggttattatctgaaatgggtaattgtttagattcatcagctaaagtggataatagcaaccatagcccacatgctaattctggtaactatttcctctcaagtctttattgcttaattgggttctatgttacagtttcttggatatttcttcttattctcaaaatgggtttttcgaataagtaatttgtccatctctggatcatcaaaagtcaaactcttttgaattgctctgtttagtacatgtgtttgatccatgtttgtatctgtattgatgttcttagcatcatgagtttgattgaaaacacaccaaactaaagagattttactatgtttgaatgatcattttaatagcttcttcgggctctaaagtttcaagcaagacaagccgttcaacgggtccttcaggactaagcacaacttcttacagcacagatagtagttttgggccattaccaacacttaggacagaaggagagatactttcatcgcctaacctaaaagctttcactttcaacgaactcaagaacgcgactaagaactttcgtcaagataatctactaggggaaggaggtttcggttgtgtattcaaaggatggattgatcaaacatctctcactgcttcacgtcccggttctggaatcgttgttgctgttaagcagcttaagcctgaaggttttcaaggtcataaagagtggttggtaagttcggtttctcgccctttttcggttcaccgtgattaatgagtgtgtgtttgctgacattttgagatattgttttttttttttttttcagactgaagtaaactatcttggtcaacttagtcacccaaatcttgtattactagttgggtattgcgcggaaggcgaaaaccggcttcttgtatatgaattcatgccaaaaggaagcttggagaatcatctttttagacgtatgttttcagcaactcaacaatcttgaattcaagaagaatcttacatgtttctttgtttttcagttttcttataatcatccggtcaatgttacttgcaggtggggcgcagccacttacatgggcaataaggatgaaagtggcggtaggtgcagctaaagggctaacttttcttcatgaagcaaagtcacaagtgatatacagagactttaaagctgctaacattctactcgacgctgtaataaacccgagcatatactctctataaccactttcgggatttgcttctgattcctaactgtttgaaactgtgtctaaatgcaggacttcaatgctaagctttcagatttcggattggcaaaagcaggtcctactggtgataatacacatgtgtcaacaaaggtcattggtactcatggatatgcagctcctgaatatgttgccacaggtttgttctaaacttacatacgcggtaataaactagacaataccacgagcccatctatggtctcaataaggttttatcagtttctgtgtaagacaacttcacaagctttttccaagaatgtttcaaaacctttgacttattaatctcgaaacgctttatctttctccaagaactcgtcaagagctttgacattaaccaaaaatctttgacctttagattgtttttgttttctctaagaactcatctaaacctcatcttcatccactgcaggtagattaaccgcaaagagtgatgtgtacagcttcggggtcgtgctactagaactaatatcaggacggcgtgccatggacaattcgaatggaggaaacgagtatagtcttgtagattgggcaacaccgtaccttggcgataagcgaaagctttttcgcataatggacacgaaactagggggtcaatatccacaaaagggagctttcacagctgctaatcttgcattgcaatgcttaaatcccgatgcaaaactccggccaaaaatgtcagaggttttagtcacattagaacagctagaatccgttgctaaacctggaaccaaacacacccaaatggaatctccaagatttcatcattcttctgttatgcagaaatctccggtaagatatagtcatgatcggcctctgctgcacatgactcctggtgcatcgcctttaccttcttacactcaatctcctcgtgtaagatgaaacacatttaagaaaacagatcgtgctttatgcttgtatgtgtactatatgtaaaaatgcaggcttgtctgtgtaattagagaggagtgattgcaaaggtttatacagagattaactatttacttcaactattttgtgtcttcaaacatatcagagtaaattgaagcaagatatgaaaatgatgtaatagactagacatgaacactgaccaaacactctctaaactcaccaaaccaaaccaaaatgcagaggaaacacactaagtaattgaattcgaccatgtaagatgagtagatgacactctcttttgcctgagccttcaccgtttccagtcggttctggttgacttgtctgaaacaatcaagaaagatatgggttaaaaggttatttatctgagtaaagcttcaatacttttataagaattctgtaaatttgagtcttgcttacgagttatgtccttggaagaagtaaaagatttgtcgccgttcatagatcctttggcagaggctaagagaagtttttgagcccttggagacatagtagtagtactcagcttaccattggctggagaaggcagtgaatggcgccgtaatgccccatttatctcagtcttcgcttgggcaaacctcggagaggcttctcctttgactctggcctttgcagatgcagtcggggccatgtagctggggattttccgtccgctaagggtaagcccatcatcttgtttgtcaatatttgcaggcagcaatgctcgtttttcactttgctttgtgttatcagaaccaacattaccattctcagagcttaccttcacatctgcacatttaagggcttcggctttgtcactggtctctgcagttttcagttcatcttcctccgtcctatccaaaactggtgacttctcatcttttacaatatcaaattcgatgggaactgcatcagctttatctttctctttttcaccaaattcaatattgtctcctccttcaagaacctttccttcagactctatctgcacagaatctccagtatctttttcttttccagaagactcgatattgtctccttcttcaagaaccttcctttcaggctctatctgcacaggatctgcagtatctttctccttttcagtaaacacaatattttctccttctcctccttcaagaacattccctgaaaccttcccttcagactctatctgcacagaatctgtagtatctttctccttttcagcaaactcaatattgtctcctccttcaagaacattctctgaaactttcccttcaggctgtatttgcacagaagaatctggaatatctttcttcttcttctcagcagatctaagggtggctttctttgacccgttcgaaagagaagaccttttgagactaggactgggcttctcatctttaatctccaaaggcgacccctcctttgagccgcttctactttttctcgaattgtgatttgctttgtcactctcatttctcaggggatctttactaagcgtggaagccttcctcacatttcgtttaggtttatttctttcagctgtaaaacggctagggccagttccactagttgtgccagatggtttcttgatacttcgctttggccttttcttttctgcttcaaccactgcttggtagtttcgcttctttgactgagattttggaatctcaatcctaggtactcgtgaaccagaagaccaaacttgtaattgtgtccagcgttcaagccaaaccttggctgagttaggttcctcaggaccatactggatcttcagaggcaatgcagttggtgaagaagctagaagctgaaaagccagagaaataataagttacaaaccagaaaagccaatgttgtgttgcaagattggtaaatccgggtttactgagcaggagttatggaaattattattccaccaagaaccatgaaacataagttaaagataccttatcaacaaagacgaactttgtgggattatccatccaactacacgtgctcgattgcaaaacttctgaatcacttgcttcctaatagaagaaagaaaattgcagcttgattataacaagcctacaaaatcagccaactatgtaatgaaggcgtgataaagagtctctaccatatgttttttctgaaactgaatcgcaatatctgaagatctagctttctggccacgaacaagagcctgaaacttcacaattccccatatacatgaatatgtagcaatggcttgtcttctcaccaagtgaccacggataactgcctgcagcctgatgatacctttaagagttcgaaatgctctacgtgccttcagtagatgaataaaaaaacatcattaacactaccaactctattcacgtagatttgtctttgttatggcaaagaataagtacctgatgagctctgaaggtagcttgaaccttaattgcagcttgttcaagctcgacttctcccaagtcattccttgactcgagattatccttggactcatcaccattgattggagaaaccacattttgagcagtagaagctggaactggttgtgatgaaaccaccggaggatcaactgttaagtttgacaaatcttctgtcaccgattccaccagctcttctttcttagcagatttctttgtacatgtgaacaacattacagttagaataatcctcattcattttaaggatgagttaggaatcccaaactcttaccagtttctggcttcggttatccgaattcgacttaggcgacttcttcccgagaagcaaagtcttgatccatttaccaggagtctttcccattcttgatggcgcctaaaaataatgagttgctaaacgtagaaacctgcagaagaacaagccaagtctgtaaattctcacaaacaaagtaaacaagctcatccagtgaatttcaccagcaaagaaacaagccaattctgtgaacttttacaagcaaagaaagtagctaaatttgtgaatgttcacttttaacacagcaacatagccaacgaacatgaagaagttgcagctgaaaagtatttaacaggaacatacagtaccacaatccatcagctaaagacaatggttcagtaatataataacataaaaaagtagcatgaatcaaggcataaaataaaaaaagtaacggaagccagaaataaaacagatggcattaaatgaagtgaacaaaagcagagatcttgaagacagcaaaccaaaatcatgaagatccagcagataaaccaatatccaaaaattaagctggtaaagttccaattgagaaagaaaaagaaaaaaagttccaattgagcaagataccaaagtaaaaatcaaacctttctatcaaattcagagctgaggaagtgatataaagataaatctaacgatcagagattaatcagatctgggtataaatcaaaagcagacaattttagcaaaaatggtgaaaaaggaaattaaaacgtcaacctcagagaattgaattgatgagtagtagtaccaaacttactgtggttgttcttcgaatgttgtccttccttctaaaagtcggaaacaagatcaatgacctaaaaggcttaaaggcatagtggtagctcactgtgaacaaatagtcttccccaacggttccactgatagcgaaagaagaagatgacagatattaccacttttaattagaaagaaaaaattaattaaggaatagacaaaaacaaaagaaatttcggttcaaagcgacgtcgtttggaatgatgtgtaggcaaagtctaaaactaggcctttctgggcccaattaaaggagtcaaagggagttatttacagaaataccctcctttttcttggatcatgatcatgacattgatgataagtgataaccttttttctaaaacaatactaacaatcaagaatgatgggtgtcattatccaagtggttagttcgcttaatccaaacatctaatctagtattcctaatcaattatttaaatcgtaaccactaaccagctcatgataggaatgtattgtattctaactagatattttttgacgtttcataaacgaatgtgaaagaaacatgattaaattatcactataataaagtttagatttgattctgttcgaagttgaatcctggttttaagaaatgaatatcttaaaatgtttgaattttttttgtggataactttacattagcaaattttatgtcacaactaaactacagtgtaaactttatgatatttttttttttctgaatttattcaactatatgctatataatttgggtaatttattttgaacatgcctaatttatatggacctaaagatgcatattttgggccttaaattagttggatacatatatgggtttaaattctaacctttaataagcctataagcccaaaaaataacagtttgtaagttatctgacaaaggattttaataataaagctgcatataaaattgaaaagaaatgcatgttgtataatattaattgatactttggcagtgtcgcttattacaaaggcagttgcatgtgatgtgcttgcaaactcgcattttatcttcccttacctttttgtttttagaaaatagtatattttttcatcatgattacttggaaacttggaagctgtgacaaaatattggttttgagtgcttctgataaaaccttgtattttgaacttgaaaacttttgttttcagccatttttttaacttactacgatgacggtcacttgttttgggatgaaactttttactacttggtgttggtgatgcatggtttctataattcctcttatacaacaaaacttttttggtttttgtcaaaaattgtatataaccaaccttctttttattaggatcgcacgtcaggccacttaaaaagaagtaaagaacaatgagagatcgatgtaaaaagaataaaggaacaaaagagaaagtaatggacagttcatcacaattcacacaccaaaaagaaaacagctgaacatttgttagaatctcaacactttccaaacacacgaaaacaaaatgacactcatttctcaccgacaatagtgatgaaaatatatcatggccgaactaattggtagtattattagtttgagattggtattttttgtaacagtttgatattgaattgttgattgatgaccacgagaaaaaagaagtacgatttatatcatttgttggtttactgtatatagatgatcatttggtgtccttctggtttcgagaaaaacaacaagtggttaaaagtgtagttcgagaaaaagatttggttaggacatgtaattctttatttgagcttttaatccaacgaacggggttagattttccttgcgacggtggctttggatgatccttaacggcacgatctgatcattacatatttacattgacgaaagagcacgtgtaaaaaaactcgttcactggtctggttgacttttattacatactgtctggtcgctatatatctatcaaatctctatgcattaacaattaatgcaacgttgctcattaattaagtatgtattttttgttattttacaagtagtattgatattacaggagttaaaatgttataaaagaaactacaaacatttattcgtaagtttattcatttatattttttaaaaaattggtaaagatgaaagaatttaccttggggaagagatcaacggatttcgagagaagtactactacacaacatttattcgtcaaacatgtatgtatttgtatgtttatgcatgtattatgtatcaaataaatgcatgttatatgagtaataaagaaaggtcttctgaccataacagagaaattaattaagaaccagttgaagtaaataaataactctaaattgtggaaattttagatcaaaagtagataaatagtcagatatttcatgtggattttacgtattttaaggatctaattcattttatgcttttaaaaaatttcattcactttcttcgaagcagtaaaacagtctgtcaatgtgaaacttatgaacaatcaacataagaaacaaaaattaaacaaaatttgtatttattgtcttcttctcagcagaacttctctccacttaattttgtttcttgctctgtcccaaaaacattgtttcatttttttatctcccaatttccctagaaaatctgcttccgatctaaaaaaatctctagaatttatgtacaaaacaccatttttttagactactaaacaaatactaacactaatctcggctacaataacagaaagaccttctgttccttaagccacaataacatctttctttctaatttctctgtaattcttcctgagagaatgcatagttcctctaaaagccaggccttttctctcacttttcttctctttctttttcttctgccatcagtctcagaatcacagctaatatcaagtgaatcaagaactctattagaaatccaaaagcatttacaatatccaccaactcttcgatcatggagcaactggaccaatttctgctacctcccttcttctccttctttcaaaatcctctgtttcaatggtcatgtaactgaattaaccgtcacggggaacagaaccgttaagctccccggaagattctcaagcgactcactattcactgttcttacaaaactctcaaacttaaagacattgtctctggtctctcttggcatctctggtcctctcccttcacagatcatcaggttatcttcatctcttcaatctctgaatctcagttctaatttcatctctgggaatattcctaaagagatctcgtcgttgaagaatctgagaagtcttgttctagcgaacaatttgtttaacggaagtgttcctgatctcagaggattgtcgaatcttcaagagctgaatttaggcggtaataaactcggtcctgaagttgttccttcacttgcaagtaacttgattactatttcattgaagaacaactcttttggatcaaagattccagaacagatcaagaagctgaataagcttcagagcttagatctttcctccaacaagttcactggctcaatcccaagattcctgctttcgcttccttcgcttcagaatctaagtttagcacaaaacttgctgagtggatcacttccaaattcatcgttgtgcaactccaagcttagaattttagatgtttctcggaatcttctgactgggaagcttccatcttgcttctcttccaagaaacagacagtactgctcttcacattcaattgcttgtctataaatggttctccttctgcaaagtatcagcgtccagttaccttctgtgaaaacgaagcaaagcaagcagtagctgctgtgaagtctgacactaaagataaagaaaggaaagaagaagatacaggaatcgaacttggattggtgattggcattatcatcggtgtgatcctcgtttcagcggttttagctggcttggttttggttaggatgagaaaatcaagatcaaaagaagagcctttggaagcaaacaacgtcgatcaggtcactgtttgcagcaacaccaccaggtccaccacatcaaagacagtaccagatctaagtaggctattactttgaaatcttgaatcaagttttcacacccattaacctaactagcttgattttttcaaatgcaggacgtgtaccgcaaaccatgagatccgcggtgattggactatcaccataccgagttttctctttggaggaactggaagaagcaaccaacaattttgatgcagagaatctctgtggagaacaggtaaaggaaaatgtaaataagacatgatttaaaattgatccgagtgtctaactaatcgatatatctaatttcaaaacagctgtacaaaggttgtcttagagaaggcatagcagtgacagtgaggtgtattaagctgaaacagaagaattcaacacagaatttagctcaacaaatggaagttttatcaaagctaaggcatatgcatttggtcagtgttcttggacactgcattggtacttatcaagatcatcatccttatgccggaagcactattttcattgtccaagaatatatctctaacgggtctttgagggattacctcaccggtaatacttgaaaaagattatcgatttcaagaacttatatttttgttgggaaactaattatttggaaatgtttttggcagattggagaaagaaagaggtgttgaaatggcctcagagaatgtcgatagcgattggagttgctcgaggaatacagttcttgcacacaggagtggcaccaggaatatttgggaacaatttggaaatagagaatgttttacttgatgaaacactcactgtaaaactcagtggttatagtattcctttaccatccaaggtatataaacaaaccagatataatataatcaggatatagcttctaatcttcagtttaacctctcatgaaatatataaccttctgggggaatttcaggttggagcggagagccctagtaatgaagatggagagaaagaagatgtgtaccagtttggagtgatactaattcagatcatcacaggcaaagtaatagcagctgcatcttcagagttggggagcttgaagcttcagctggagaacagtttgagagacgaaccatcggtgttgcgtagcttggcagatccgtgtgtgagaggaacatatgcatacgagtcattgagaaccacagtagagtttgccattaactgtctttgtgaagatcagaggaagcggccatcgatagaggatgttgtatggaatctgcagtacacaattcaagtgcaacaaggatggacaagcagtgagaacctcgggcttggtggttcagaactatagaagagaaatataaaatcaccatccttgaagaacatagagaaactgatcaatgtcaaattcaaggcctatatgagaatacataaagttgaacctactaatacttaaggtacttacgagtctcatgtgaagcttcagattttggtgtagaaattggattagcgtcacaaagaaagcaatgcaattgttaaggcaatgaaagggtgtaacagaaggataaggccacaaacccttaaataaaatatcgcaactttgtggaatttgggtacaaagttgttttttgtagctagcaagtaaatcgtaatacatatatacacaaaagtgaataattcagatggtttggtacaaagttgtttttttaaggatgttgggttacatcaaagcatggaatcacttaaatagttttggaaacacaagacatgaatgaaaagagaagaaagctgttgctgaatcgtgattgagagaaagtagagagagctacaacgcttacaacaaactactactagtcagcagtccagctttgctcaacaacatcacgcactctcctgttgtactcgcgcttgctttcgctgtacatccgagcagcttccgagtttgcaggagaattcggattagggtcacagagcaaggactgcaataacaaagggaaaaacggattagagaagaagaaagcaattcaagcttttaagggcatcaagagatgttcatatggcattttgaattcacctggatggaggtaagtatagcagcaacatcatagattggactccactggttttgtagaatgtccaagcagatactcccatctgcataaactacacaacgaatagagcagaagaacgttaattggaggcaaaagctgaacatcaaccaggtggatagaaaatccaatgttgtatctctataacttactattaggatgaaacatccgtgacacaaaccgaactgttggtggtttattgggataatcttcagagaactgcagtgagagtttgaaagtacctgaacagcatcaagaaagagacataagaacaccactacaacgatcccaaaaatttatgcttcttgtcaaaatgcaataacatatcataaccatacctccatcccatggtgtgtcatcaggcctacaaatttagaaacaaaaaggtctaagtaagtacagaaatgacaaaagtttcagaaatatttagccagtatctaaaggtacttgttcccattacccaaatatgacagcattccagagcataatgttgttgtcctgtggagcaccactaatacccgcaggtgggtcttgctgcaacctcttgaaatccctcattaacctcttccttgctggcgtcgacatcctcctttctttctaataaacaaaacccaccaaatattcatcaccttttaaggtctcgaacctctatcaatctagaaattactactaacgatttacgtatgctaaagttgctaactttgtactagattcgaatcttcctaacaagtctacgacctatgattagcttagaagaaacatataaggcttgaacctagaaacagcttaagatcgcatcaattcaccaaaatagccacacacaaatgataagatgaaagtaaaatcaacggatccagtaaacaaacatagaagaacagagatcggatgaaaatggtaccgtggaaacagatctcgttgttgaggtaaagatcgcggagagaagaggtcgtcaaacaaacatatgtgttcagcggtgttgaccgccggtaatcagagaaagttttccgatcgattcaggtcggcgattctcaatatcaccgtgcgatgagagaaatgggtaaaaaaaatcaataatttgggaagagatcgtataagtgatgaatgaatgatcttctagaagcttggctcctctctgacatatctgtaaagttggattcgctttgccctttggacgaccgagcgagtggttggtttgttcctaaccggaattaaaccgtttagggcaatctacactttaaccgggagattagtgttagttaacatacaacgatgacatgtaatcttttttatgtaaatcttcagatgacaaattagagtacttttcttaatgtagcgtaaactatatatttctaataaaccaatataaaccattgtaccactaaccggactaaaatccagacccaaaccacaagagtagagtagagtgatgtttttgttactagagagaaatgtttttgtggtatgtcttgtttctccaatctctctagacaaaccaattcatcttcaagcctcgtctcaaagcctaggcatttggatcatactagctcgtactcagacttcaaattgagatttgctcttaaatcaaaaacaactaagatcagactgatgttttgagatacaaccgcttaccacgaaatgatatgtggcttttgaacatttggtcaaaaggacgaaaaaataaactacttttagtctcttctgctacctacgaacatatatcaatcctgacgaaacctatcagcaaaacaaaaagggtaggatgatctctgatatatgttcctgttatggccctaagattcatcatctattccattcatagtctcctccatagttaggcgaagcgttgttcacacggcttgtctcttctggtttgatggagtttgcaaatgcatgccagcctataaggtaaggcaagacaaacttgcaatatagaagaaaaaaaggagtttagtaatgtttctttgaaagttcatgccggtaatgttaaagatgagatattttctgatcttacattgaatgcagagataagaacagcaaactctgctcgagtaattggtatgtaaatgctctcatccacattcacaagcttgttttgaacacctaatatatacacggagatcgttagagactatcctttttgacaagaatcaagaagaagattaaatttacttacttaggttgaagaaatgaccagaaccatctgggagaggctcaactttcaacactttccttacttttccctcatcactacatacaacaaacaaaccgatcaggagcaatataataagaatacaaccaatattatcagtgtaatgatgctttttaccttttccccttgaatggatcatggaagaattcacaagattccctcgggcctaggctaactagagttccaatttctgtaacagacaatgagaacacctgcaattttgacatgaagctttaccaaattcataatagaaaaaagactgccttttaacaccaaatccagtcaaatggtcttaacaaagttacagctcaaggatcatctgaagttaaagagataaaaccaaacctgtttcttgctccaatcatattgtcgtacaccagcagaaggagcaaactggagcaataagaaaccatcttttgacaacttgaaagctccagactgcagaaaaacaacagaaatcaaatggaaaactcaaagcatgattattcagttagagctctttgatctttaattttgggatagagacttacgtctaaagccacaaactctggtgctcttgggtccactgttaacgcagctttccctttgtatatcgaatgacccacgtaaaatctagcaggcaatccttcagctatcaaatcgaaacaaagaacacaagtaaacatcacctacgagctccatctatagatataaaaagagttctctttttggatttcaagcttcaaggttacaaatttctcgtaattaagagtacccttttgtgtttttaagcttccaatttcttaattaagcaagctaaaaccctaaagtaaccaagtgagatggcttaccaggtgaaggagaagaagaagagtcaccgaacctctgcttctcgaagtaatccgtctggcgagacttaaccgagaagagcttcaccgtcttcgtcgtcggtttcaaggcgaatccatgccgtttcactgcaaaacctccggtgacgagtactgaagacgaagagagaaagcgaggattggagttgaccgccattagaggagtcgataagagttgcgacatcgctttgtgtttgttccctctcagtcaatgtagtgtgtcttctctgcgaattacgatggaggagagaaaaaggcgcttcctttacacactcagagactcgagactcgagagagatgacgagacaaagaaagtgataacttttcgttaattcgtttctacagctttatttcttcaaaaattacaaatagacccaaattttataaattttgttggaatattgagagaaagaagaaacagagtaagagataatatctcttctccttagagaagacaaaagaacgaaagagaaacttttattgaactgaaacttgtctatatacatctgcaggcacatacaaggtcgtttgtctatgtacctctgcattaataggtctagaaaacgctactacatgcgaagttttcgattttaggaccaacgattggcccgaccaagtgataagacatgagacaaaatatgttccatagatctatatacaattggacttggctatgctgtctcaacaagaacactgttgacacttgacttcgaaaccaattcatatgattatgctttctggaataaatccatatctactggatttgttctctgttatttcccaagtttggtctctattcagtaatttgattattgtcaatgcatattgtaatatttgcttcttccatcaacagtttgttggtcaaattttgcaactcttcaagatattgttttggtccatatagctaataacattcgagacaagataagagagctaattgatgaaagtattacgaggagattgtataattagtataaagatctaaggtattttgattttctcatttttccgtagaaaaaggaacctggatcctattaagaataataatccgaaaactgcgcattatatatgcagtcttagttacaaaacaccattcatagaaaaacattctctttcgttttctctcctctctctccatattgtttttcttgaacaacaagcaaaaacagggcaaaagctttggctgtttgttggaagggggcaaaatggttatgtaatcagcaagcttcaccaagtttgcagccaagtactcctgcatccatggtaagtttccggaccatcgttcccggtttaggtcgaattgtaaacttgtttgggagcggggttttcggtttagagctccacgcatttgcttttccggattgcacaaaataagctccgttgagaaagtaatctccttctgattgccaattccaagatttccattcaccgtatggtgtgtactctctttttgtaatctgtttggcttcttcattaggaggagcaatgaaacgattgccttgactaataattgtagggttcatgttcccaccaattgcatacatttcccaatgtgtgtagtcattgttcaccacatgtatcgttccgtatctgcaacgaggcattctctgttccaatcgcttaccgaagtggttaaacgcaaccgttatctgcattttcttgtcgatcacgtgttcgtccctcgccccaaacaacatcacctgttctctcacaaaatttaaaacaagactctaaattagaggtcttgattgtttcatatgcaacttcacatgagcgaaaacaaaggaatctttttacctcttggtggtcggtgaaatgactgttggaaatagttacagcagtggagccgtcaatagcatcgatcataccatctgcacatcttgtcattgagacatggtcgatccaaatattggttgctccaaacaaactgattccatcaccatcactttttgtcctaagccctatgtgagcctcagagtctctgatcaacccaccgttcccaggaacaatgtgcttgacataaatattgtgaatgatcacattattcacaaattgcaacgttaatccagcaccttccatgatgtaaaccctagctcctcttccatcgattgttttgtcgctcgttatcatcagttcttgttgcagttttatgatcatgcttcttgcgaatatgatccaaagcggtccgtctcgagtcactgcatgccttaacgttcctggtttagggttgataagatcgttgtcagacgcgtctttgacgacgtatatcggtccgtcttttcctccggtggttctccggccgaatccgagcacacagtcggctagtttcttccggttattagcccagttacgatcgcatcgccagcagttgtctatcgggttataagctaggcattttccgctgcttttgtgcgttttacgaccacttctcacctgagtaagctctctccttgtatcgttccttgattccgatgcatccactgctctgttaaaaaaaataaaaagtgtttaattagtacttgtttaggaagttaggttaaacatttgacctaacaaagacaaaaactcacatattgacatggtaattaaaatggttggtgacgttaagtggatgaggatcgtaagagccgatggtttgtttcaatgcatcactttgtcgttgcgtccagtagctatcaaagacagcaacattgcctcgaacctgtggggccactatagctaagaacgaagagaagaaaacgaaaacatagccgccaagattcaagaaagctgctgccattttaaatatattgcaaatgcagagaccaaagcctgtgaactttatattttcccggcaaaacctcaaacggaggttgttgtttcagataggcctgccgggattaaaagattaaagatttgaatcacctgattgctttaataaccaggaactggggagagagaaaaggagatgagaagagtcaatagaggattgagaattaacatagattagacaaccattgatttaaatctctatggtcatttctccaaaaaacccaattatagattttggatgcctttgtttaatccttcttttctggatattttcagttatttttgccttgatctaatattatttttactgagataattacccaatagcacctttaaaacttgaggtaactatttttgtatttacttaattaatcatacatactacatatgattattaaacgtagtatatatcaagtctctaggtctattgaaaataattatcatacaagtaattaaaaaaattccccatggggtcagaagctaattaatggcgggactctctgttcccccaaaagaatttgaagacatgactataaaaaaaaaagaatgaaacaattttattttggactcctgatctgtgaaagactgaaacagttcatacgcaaactgatataaaatccaaaatgttatctctaagaatatggtccgtgatcaataatacagatctaaaattcaccaacttatatgcaaattgcaaaatgcaataaataaatcttgaccatatgttacaaatctaccagatcattatgtacagagagcactgcgagtcttgatcacacatttcaccagaaaagtaaaacaatacaacaccataaatgtttcttctcctaccgatttcaagaaagacactaataattactcaaagaagctttaaatgttaaatctctttcaccggagaaagaagattcttagctgaaaataatgacgcaagaaagattcaagaacaaccttaacgccgtcgtgatatcattcttcttcttcttcctctgttccacgtcggatttgctccttccacgttcaccgttagctattctcaccggcgggaggtgggatcttctgcagccgagtgtaggtatatccgcaatgcacatgcagcttctacacaacaacaaagtcgtcatctttgaccgtacggattatggaccttcgaatgtttctctcccttctcaaacctgccaaaacgccaccgtttttgactgctctgctcattcaatactatacgacgtcgcttcaaatacctttcgcccacttacactacgttacgacacgtggtgctcttccggttctttaaacgcttccggttctttaatccaaaccggcggttatggcaacggcgaaagaactgtacgggttttcacaccttgcgacggaggagttggaagcgtttcgtgtgattggattgagaacagagcgtatctctcctctcgccggtggtattccaccaatcagattcttcccgatggtcggattatcatcgtcggcggaagaagagctttcaactacgagttttaccccaaggatccgggagaatccgttttcaatctcagattcttggcggagacgagagatccgaatgaagaaaacaatctttatccgtttcttcatcttctccccgacggtaatctcttcatcttcgccaatcggagatcgattttgttcgatttcgtcaatcaccgaatcatcaaggagtttccacagattcccggcggcgataaacggaattatcccagcactggctcctccgtgctcctccctctctttctcaccggagacattaacagaacgaagataactgctgaggttatggtatgcggcggtgctccgccgggagcgttcttcaaagcggcgaggacgattcctaaaatcttcgtcgcgggatcacgcacgtgtgggagattgaaagtgaccgacccggatccgaaatgggtcatggagcaaatgccatcgccacgtgtcatgtctgatatgttactgttaccaaacggtgacgttttgatcattaacggtgctgctaacggaaccgctggttgggaagacgcgacgaacgctgttctcaacccgattttatacttacccgaggagcctgaccagacccggagattcgaaattctcaccccgactcgaatccctagaatgtaccattcggcgtctcttcttctgtcagacggcagagtcttagtcggaggaagcaatcctcatcgaaattacaatttcacggcgaggccgtacccaacggagctcagcctcgaggcttatctcccgcgttacctggatccacagtacgcacgtgtgagaccgacgatcatcacggtggagctcgccgggaatatgttgtacggtcaggcttttgccgtaacgttcgcgattccggcattcggaatgttcgacggaggggtatcggtgaggctcgtggcgccgtcgttcagcactcactcaacggcgatgaaccagaggttgttggttttgcgcgtcaggcgcgtgagtcagttatctgttttcgcttataaagctgacgtggacgggcctactaactcctacgtggcaccacctgggtattatatgatgttcgtggttcaccgtggaattccgagtgtagctgtttgggttaagatttaaagcaatccttttattatttcattagttttttgattgattttttgaagaattgtagttaaaaaaaataaaaaattggtgaaagttagttaataaaaaaaaaggaaatttcggttaagacccctactcctcgggagaagatatttgattttgtttgtcctagtagttgtgatggtttgatatgcttctacaatctttataaatcgggtattgtagtcaatccagccactagatggcatcgaagttttcctccacctaggtataaacaagtcattctcgacaaatcttctagtgaatatagtagtgtctttcctttgcctttgcttggattcggcaaagacatcatcaatggcacatacaagccggtttgcttatataattcactagaaagaggactaagaaacgctactacgtgtgaagttttcgactttaggaccaatgtttggaagtatattaccccttcttctccttaccggatcattgctttccatgatcctgtgtacgtagatgggtcgctgcattggttcaccgaatgcaaagaaatcaaagttctatctctagatcttcataccgagacttttcaagtaatctccaaagttccttttgacattgcaaattgtgacaacattgccatgtgcaacttggataaccgcttgtgcatatccgagaacaagtggcctgaccaagtggtatggtcgtttgattcatgcaacaagaaatggcacaaaatgtttacgttagatctgaatatattttctcatgggtttgggaagcactttttggcagtctcaccagtagcagttttggaaaagaagaagaaaaatggtaagttattgttatcttctaatctaatatataagcaacaaatggtggtacatgatcccgaaaccaaatcttatgattttgttttcaagagtaagaattctggaaatcatgtttgttatttcgagagtctagtctctattttataaatagatagatcattttagctatatttttcctagtttttttttgggggggtttatattcatgaaaattgtaatttcaaaaagtttaaattattgttggcattttctgatctattaattgcttctacatcatacattgtaattcatagattttgtttttctacgaagttaatacgcaattgtactttttggaagaaaactaatgttctgttttcaattgaacttcaaaccattctggccaaaaaggcttctccaaactcgcgtggcatttttagttccattgaaggttttgaaaatttacgttgccttgttgacacatatactttgtaaacaaaatactaaaactcttaggttaattagaaggttttcttaatgaccagtgagttcaaggttttatgaccatccataaattttttctaatcatatcaaagagatcataacaggtaaataacatttgtgagtaatttgttttctgaaagattcagaactgaggtataatgtctatgagatctgagtatatttaaaatcaatcttatatgatccacatctctttaaaatgataattaaaagtttaacaaatatcaaatcccaatattttcaaaacatttaatctcttaaactctacaaagttaaatctcatgaccaaatatatacgcttgacctcagagggtctaacataacagttgcagatctctgtactaattcgggctcgatcgatcagtctttattgaagcaatatataggattgttttgcagagaaaatgtgatcaaaaagctaagagtaggaacaagaggggaccttgttttcagctacattaatggagtttccttcacaaaaagataataaatagggctcagaatctcatattttcttatttattgacacccaaataaatgtaatagtgacgactctccatcctacacatttagtccttactgataaactaaaaattacttggcgtcaaaaattaagtgcactatatagttcttatacaagattgtaaaaagttattatttttattctatggtatttcataatcaaattgtcaaaccaaaactcaaaaattgaaccgaatagaactccgaaatgacattctcacaaaaaaatcgtttgaaagaagacaactgaatgagttggatgaacgcattaaaaaataacacattcgacgcatgatacctgattattctatacagaaaccaaagcaaatcgaaacatgtgaacaaaaaacataacatctaattataccacaaatccttttatttatgaaatggcacattacacgaattatagtatacctaaaaaggtggaaatgttatttaattcttgaacatacgtgataaacaaagagggttaataaatgtgatctcgcttgtgacaccaactacatatttactcaaccttatacgtcacacacgagaggacatgacttgcaactcgttagtacacttttcacatctctgttagcagaaattattattttattttctttctttaaattttgttattttattgtatgtgcaagattgtaataaagaatgttttggcctaaagacacatcattctcctaactagataatacaatttttaagctaaggcgtgaagttgtggtctccataaatacagtatccattttagatactcataccgatttcagaagtcatgtagatgagctagggaaatacgtatatagcttatcttgcatgcagattttgtgagcacaatgatcacgaactgcgaaaagtctaatgattcaaaatgatatgtaaccaaagtagattttcttacatacccaaaagaagaagaagaagaagaaaaatacggctggtcatacatttattacaacaagattaatatatataacttccaaataaataaaacacaacaaagagcagaaaattatataaaatccatgggtttaacgagagatagcgaaatgagcttatatatataaaataaaaccaaaccagctagaagataaaattaaaaccctagtagctaacataaagataactaaataattatcaaagatcatataaaaataacgttattaattatatcatgggacgatcttagtcatgtcgttattaccggacagatcaacattgttgagattgttgatcttttcgttgtcgttgtcttcgaggttaatgttgttcttcttggagaaatggatcttgttgttgtgcatccaaaccttaagcactcttctcttcactccaatctcttcacaaaacctttgaacaacacaatcttcttgcctttgtattttccacccaactttctcagcaaaactaagcatcttctccttctgttccggcgtgaactttgtcctgaacctcttcttctggttgtatggcaggtttggtagcgatctagatgcggtggttacgccatcttcctccataaagtcctcggactcggagttgttatgcatgtaccggtagttagagactccaatgggcatgatcatttggtgtggcatagctgatctgatcttttggtggttgagcatgagttttcggtgtggagggtgttggtggtaaggggacatggcggtggctgcgagttcgccttccacttcttttctatggaagttcctgtggcaattgcaagctgagcaagtgagagcctcaatggagccatcttcaccacttggcataaactctccacacccatcagtagcattgcctcccatagctgctgcatggttcttgagacactccttgtactttatcataggcttcttgatgatagcgttgtaaccaacatgatgaggatcttgatgatgatgatgatcataattgttgccatgaccattaccatgtaacggcattggaggtggttgagtagtattgttgttgttgtgagttggaggagcagaattagcagcatgatgatcatgatgatggatcatgtgaccatgactaccaccaccaccaaatgtagtgtttaatgggatgggcatatcatgatcttcttgacttgcaatttccatcttttttaattgggtcttcttcaaaaaccttttgctttctctttgcaaattgtttcttggtttggggacagaggagagactagctaagaagaaaacaagacaattggaggaaaatattagtaactaataccaaaatgattaaactattaaaggtgaatactttcttgattaaaatcttaagaagtttccacttttttagaaacaactcacggaaagcatttttcaaataattttactaaaagaaacaaccaaaatttacaaaacccaaaattataggacaaaacgaaagaatacaaaaaaatggtaattaaggaaaataaaactcttattgcaagcctgcgcaaacaaaagctgacaaacgcacttcgaaagaagtcttctacttcaattcaagtgggaaatttattatcatgaccagtaagtaaaaagaaaataaataacaactgttctttgattaccaatctcctcttctctcctaattttgatgagaaattaacaaaagatagagagagagagaagtcaaaactggttatgaaagaaatttgaatcaggttcttgaacattgaactgaattaggaacacataccttcacaactaaaagtagaaaattactttgatatcttaatatgcttccaaagttcagaactctattgaagatattgcccttaagagagacagagagaagattagagatattagggttttgtaatgaaagactttgaaggaagagaggagacaaagatttgcatttgtgtttggatgtgaaggcaatgtcttaaactaagagagtattagtagtgaaagcctaaagcctaaaagcaagagagagaaaaaaaaaactagatattttcaatttttcactctctcccttccctcccagtgacaaatagaaaacaacagcatttaattatgtcagttttgttagtgtatttatattggttacacaaataaatatggtttctatttaacctaactataattaaaatgcccctaaaaaaaaaagaagatcagagaattagaggggagaaacaaagaaaattaaaggtcatggggtgattgctttgcttgcactatcagacatcaaaatttacacaagttttagagagaggactgtgtcagggagtggtgggcagagagtaagcagtgaaacaagcataaaagtcataataaataaaataacttaaaacattcatgaatcatgagtaaacgaagctaattgcaaaagaaaaaaaaggtatgtgttctgtatatttggggttatttgttttgttgacagaagtatttttctgtatattttatttttgcaaagaagataaacttactttggttcacaaagatatagataattcatacgtcgtctataacttgtaaaactttggactctcgaggttgtcatgtcatgcatgtgaattatattattaaccagaagttatggtcctacaatatttcttgtatattttattctgtataataaaaagccgtaattaattaatattattcaataagtttttaataaatgaaatcctaacattatcttttattttatgatgataaatgttttttcttgcatggattaacatttctcacatctgcatagtatccaaatttttttttttttacatcagtgataaagtgaaaatattggatgatataatacagttgataagatttctttaaaatatatatacaggcgaaataagatccatcacacgtcattcgaggccaagatgaattatttagttcacatacaccacatatcgaactattattataaactatatatatcgtaatttgtaaaaacgtttctgtaatcttttataagtactctggagttttcaatcatatatccaaccaatgaaccaactaaaatttcaccatacataaaattgcggtagcatgtaaaaaggcagtgtatttacagctgtagttataattatgtaccctcataatttttgtagtgaattaggaagcatgggcaaaaggatcgaaagttatgtgttcgtttgactataaataggaagtcgtggtaaaacagagaatattgcttaacatttcagaattactgctcttagcagtagtagtaatcatgtcatacaaccatttcaatttgaaattacgctcgtttaatgaaccattttttttgttaatttaacaaagacatgaatcactttgttctttacttatccctatggtctttaactctttatcctttactacaccagatcacatatatgagatactttatcttttaatttctttcttgtttctgttttgttgtatcttcttctggtaacttcttgaaatccccaattatatttttcataatgattatttttgtcagtaaatcatagatgactaatgtattaactatacatttatcatagtgcattttgaaaatcactcggtctggcataactattggatgaggagttgagctcaaaactttggatatataacagtattatactctatttttaaaatgtatttagtctattagtattacgtttttttttcaagtgacaaaataaaaagggtccacaagaataaatgacgttaggtcgatggtccaatattgttcacaattttcaagatgttcgtatttactcgttctccttttatattatgacactttaatttgtgtatatatgtaagtattttttttagggttgtatatatctgtaagttgtatatttatttatttcctatatatcaaaataaaacaagattctaaatgtatttttagtgctacaaagattgtattcctttaaaagacgggtgaaattttgtattaaaacacttaaaagatcaataatattaagattccttgtaagtcgtctcactaattatatactcgtacattaattctttatattagctagctattaattatatatataagtaaatactctatcaaaagttacaattcaaacatgtcgttttagttaaaagaaagttatagtataaactaatcataatacctatttttaagtgacaagcgtgcaaaggcagacgatttgtttcttcttttagatggaaccatcaatttttggtcaaccaaagcttgtatccttcaaaaaaataaaatcttcttttaagatgccaactctcttttcacaatctttatcacggaaattcaaatacaattaagatttcaatcattttacgttagctaaatcaaatataaagattcaagtcacatccacaactaatgatgaattaatattaggcttggttagtgtaaatatgataacaatatcatttgctatagtaatattagattgaaaaggtatggattatatatatcccgtaattaatgattgttagattttataatctcacgcatcagttattataattcatgagtatatgagttatcatatatgatatgctacggtataatacggtttggaagatgatactatttttatttatttgacaaatgaatcaataccaaaccttatacgcgttgatcttagttcaccaaaatgattttacgaataaaaacgtatttttgtaagttccatcattatatataccgcaacaagcatttactttgtaagcaacaccaaaaatgaatcttaaatttcacattttagtctttctcttccttattcttatatgcatgtgtgtgctgtccttgcttttctcacacaccatttcgattaaactcaaagtttgagaaatttgttttgatgcattttgttatgtataatgttattataaccatttaattaagtaactattttcctcagtcgacctatgatttcagttacaaaacttctccaataacatatacaatgaataaaaaatcgacacaatgagccctataaaacaaaccaagaggaaaaagagatattaattcagccgttgggaacattctcagtctttatatttcttttattaattccttttcgtatgagattcaaaagccccacaccacctcaatccaaagaaaagtataacatgtttaattaagttttatttgatttctagggatttccaacatctaatcatgtggttatatagtatacacggaaagctacgaatttttaaacctatactgcaacatttttatagcttaacccaagatgcctcgttatgtattacagtatatacacattcccatcaccttccatgattttatcttgataagttgaaaaagatatataagttggaattattttaaagtaaccttgctttgaatcttaacattccctgcttttttcttataattttaagtttttaactagagctagtttatttaatttttatcattattcgatgctgcatttcgatacactactagtctactcctattttttttgggtgtgtttatatatagtcatgtgacataagaacatataaataaataacgtacgtatttgatctggcattttatctaaataagtaatcaacttagtaatggatatcaaaattcaaaatctaaagtaaaatacataatgtgtacaaattattaaatattaatacatataaaagttcataagcgcacacattaaattatgtatactagaaacggtgcaacagacgaactggggaccaaattatggaccagctcatagcccatttgctttaaataatctaaattcagaaatgaataaatgttggaaatggttcatgatgtatatagtggaggaatattgattatctattctttttatttttatttttgcggaggaataatatgggttatctaaaacccaaagaattttctttatagatcttctttattcttaatcctaatttgcccaccaaacaaaataacagcaattcaaatcgaatttacgaaagaatcttcatctttttattgacaaaactttagtttcaaaagcattatctttaaaaggaacataaatgacatattctaagatctacatagtccttatattcatgactatattattgccattattttgattactagtgcctaattccgccattgaccggttgggatcatcataaatccatttttgtataagtaagaaatgtctttgggtattgtgaaatttcatgtaagcactatttcgatttgagtaatttctataattttcgcttaattgcgtagttactactagctagttagtgttcttacaaactatgcttaaattataatattcacaatatgatataaaatgataaataaaagagtaataaatatcaaaacgtttttatctagtggttgttaaaatgtttttaaaagatttatatcagaaaacatggatttgaatttttaaattacgagtagagagtagaagattcaaatatttgcaaagttttggtatacagttggaatcgtctgtcaaaattaattactgatgcatcctggaacatagaattaagattcataataaaccatggatactgttatgaggataaaacatatattgtttgtttaaatcaaaataaatcattgtttgcaacagttatatacactattagtattagttatactaaaacacttagtctacttgatatatattaagatacgtacatatttgctttatttatcaacatcaaagcacaacacggaatcagtacaaaactatttgagaattcacataaacaactaaaaagaaaaacattctgagaattattctggttatgtgtttactttaagaaaataaaatttcccaagaatcgaaaatttttcccacaaagcaaatgcacgagttctggttattttaacactattatgggttttacgtgcaatcagtttactgacatctgatttctcctcattcatctatttaattattatatctctttgattcactttttctatttgtaaaataataatattcgaaaggtacagttttatggcagatgaaatggacgtagcgtgtaagaaaatacaaacccgtaccttcataatttagtaaacaaaagcataaagttaaaaaaacattataataattgaaaaaattatacatatttttctgaatatatatatagcaatgagccaatttcatcactcaccttacttattagaatttgttttttccaacatgacaaataattggcaagtgtctcaatttcagagggccaaacaatgctaaatgtaatgggccaattattttatctgcaggcccattttgaaaagcacacaagactattctttttttttttttttttgtcgaccacaagactattctctactgcttaagttatataataaaccgccgacaaaaaaaagaaaaagttatataataaacctgaaagcaacgatctcttaaacgacgcagtttagctaagtagcaagtatcaaataagataagaatatgcagaatcttaacttgtgcgatacaaagagaacctttgagccaacaagctttacagttcaaatatagatatcaaattctttgtattcgatttaaacatgattattaagacaatccaacgaaaactagtaaccaagaagagaccctgagttcagccttgtgccactgtttcaagcatctgcaatcatacaacaaatattttcttgtaagagattatgatacaaaagaaaccctacactttagaacatacgcagaggcgagggatcgcaaccgactagtttttagacaacaaatgcctatgcccttaaaatttttagttactttgaatagttctgatcttctactcaaccttatctcctatgcgttattctaaattttccttcagctttgcttatataaaccgaaaaaaaatgcatgtagtagccacattctccactatctatacgctacataccagagttacaaaatcatttgaatagaggattaaacttggggtgagaagcatgtaatttgatcaagaccattgattccttcaggcattttaaaagctatataaccaactgcacccaaatgatgcaaaggagctcaccaaaaatacgatcttgcacaacattcactacattctcaatctatcctctctttcaagtgttcttttgatcacaatatacaaaagctaagcaagacaatactttgatcaagattcaagacaaattcacaaacttaagctggagctaactacgccaaatcttagagataacaaatggaaagaaactaaggatcactttgcaataaaaacatttcacaacattctcaggtttaagcgagttatacaaaaacaaaagaaatcagttttatatgtaagcataaaaactaagcactcatacactaactaaacgcaaagatcaatttaacatagacgagaaactacatctctacgttccaatcaaacgaagaaaaattcaaaattagcgacacaaaatgaatcaatcatcaaagatttacctcatcgaagaagaaagatgctcttcagtgagacggagcagtctgttcctggtggtggtgagatgatttggaaggagccaaagctttgttgtagatctgctcaccgacgagataaacgcagaaggcggcgacgccgattccaagtccgggaagagcgtgtctcatttgattcgaaagcatcggatgcttcctccattcatctcttcgccggaaaaattcgccggttgttcccaaaggcttcgccattttctcaggtattcgattaatctcctgcgaccgtactattcctcttaactttcttctcaaatgacaaatcatgggcttctttgatgtatatgggctttaaatttattttttgtcgtcatatgggctttaactttaggttatcatttgggcttcttttgaaaaaaaatcggaaaataataatgtcgtaaactagttttcttatggttctctttaatatcaaaatataatgtcggaaataagtaattaagtttaataatattgcatagcatcatatataaattatatcagaaatctatcattgtagagttgttattatttatttcttgttaaacagaaaataaatacaaatggtaaatcatagtgaaacatctactgatctttctagcttatgactctggtttatgggaagacaacatagtgatctcatcagaaaaaaatgtcttcaggcataaacatggtgttcttgtcgttagcggcttggcttggtggatgatgaccatgtcctggaggaggaggatcttttgcaggagaagatggaactgttgggccttttcctggtggtgaatgaccatgataacctggaggagtatgttttgaaggaggatatggaactgtttggattttatcggtttcgtcggtgaacggtctggcaattgtttggacggttattagaagaagaagaaacagagcaatcttcattgtttttgcagagaacttcatgatttcttgttgttgagcttacttgtattgtatatatggatttgtaatttgtatgtagccagtgattgttttgctttggtgagttcatgtgagtataagtagaggtggattgagtaaaatcgatatctttgaagattgaattagtcaatagtttcacttattcaatctctttgttgttacctaaataggtatttttttttggttggtcaaacctaaatattatttctgtgatattttaccttaaaagaaattttaaaagttgaccaaaaacaataaataatataaacaaatactaaactttttttatataacaaacaaatactagtattctactaacttgatacaagtatgaaaaatcgctttattaatattctcgtaagaattatattatatgtatctagtaagatgcttttacatatttctgctcctcctcgtatatatgtaggcaggcactatccgtataatttttgcaataatcattttcataaatgtttcgaaacaaatcctccaatacatacactaaagcaataaaacagtaacttttctatcaaattgagtactctaaaaaaaattacaaatcttatcatttacttattttgctatcaaattcaacattagcatataattacttttaactttcctatatttttcaataaacagtaaatatctcatagtaacttttcttacttccttggcctagcacatgcactgaacaaggagaaacgtctctctcgacttcttcgtgatcgcatagaagtccctttgatctataatcaagtaatcaaaaacgtcagataaatagataaattattttttggttgattgcaactttaaacaagattttgtgaatttaactcactttggttcttcttggagacttttgtgtgttccaacagaaaagcagactgcaaactcctctccctgattctgattcatatcctctgcacaaaccaaacaaaacaattgtttattatgaagatcttacttattcggttttctcttcactgaagcaagattacttacagattgtctttgttgtttgtgaagttactattgtgtagtaagcttggagaaacaggacaatgttccattcttttaccactctgattctcctgaaactcacccatttcacaaatcttcaagactttaactccattggtgtcttcttgaggtagaatttggttcctttcgggttttaaccggccttgtgaaccaggagtcttctgtaaccactcagtttctaatctctgttcttggatgattgcttcaatccttttcattggaatctcattcccactttcagtatatgaactagttgtcactgctatttgtctggtctgcttggagttgagtaactcagtttcagacaagaggattatcctgacctctacgtttcgccgtagtaccatttcaatcgagtttgtgatactgcttacaaacctttcagctctcgctttgatctctccttctccaaatgcaatataagcaactagaatacctgcaacgaaaaatctattagtatgcttagagttttttccttaaagtgtaaagtgatttaaataatttttcggcttaccttcaacttcactgatagataaaagcttcccatgagcatatagaagctgcttcaatgtctttgaatgacatctatctacacactttatccaaatatcatttagtttctctgaatttctgcaagtaagcgtcatggtgcttgccgttgtatcgtcatgtgaggccatggaagtgtcactctctaaaacttcgctagaagaggaggacaatttcacttcacgaacgaggtttccactttttcttatggaagttggggaggctgtattactacattgaaggcctgatctctgtttgtaagcaataacttctcttgaaatgctttcttcagttgctctagagctttgccttctactgctaccggtatgtgtggttccaggagaaggcattgaaccaagctgaagcaaggtagctatgaaccatgttgaacgatcagtagaaactctaagctgcttctcagcctcagaaagaagtttcaaagcatgctttagtctctccaaatccgcttcagtcactacaaaaaaaacaacaaaaacagaacaatacttagctgtttcattcaagataatgagaactaaacaactttgaagtttcagatactcacagttccttctatcaagaaaggcttcgctgtatttttcgtccaaagccttgtatgctccagcaatgatatccatgataagactggctagttgagacatcatgagtattggatcagctcccaagtccagtaactctctagctttcttaacggtctctgccgtgtcagaagacaacgctaattccaagagttcaagcaatttatcatctgaaacaacaccaacctgcacaaacaccagtagtcacatttacattactcattggtccaagttttacccaatgcaaaggaaaggaaacatagaacaaacaaaaaaacttacaagctcatttacaagatcaacggtgattcgttttcccatcaaactcaactgctctaacatggtttcagcatctcgaagcgagccatcagcattcaaagcaatcaggtccaacgcctgtgattccacatctagattttcatctgaagcaatcttccttagtctcacaacaatgtcaccatctctgactttgttgaagatgtacttctggcaccttgactgaatggtccgaggaacattgtcaaggtcagtcgtgatacatacaaagacaaatttctgcagagggttctcaagaaacttgagtaaagatagccaagtcctagatggtaataaatgacactcatctataacaaaaaccttgtatctttgagaactctgaggagctaatgtcaacaattttttcaaaaggtacctaactttctcggctccattcttcttaccagcatcaagttccaataaatccctacttttccctagcatgtaatcactacattctttgcagtacccacaaggtttcatttcttcagtgaccacatcacaattcaaggcggccgaaagaattctcgcggtagatgtcttcccagtacctctaggaccttggaaaagataaacatgagcaaccctacccttcttcacagcgttcattagtgattgaacaactatactctgcccaatcagttcatcaaagaacattggcttgtacttttggctcaagctctgaatactttccggtgtacttcctccttcttcctcttcttctctttctccatcctgactcttacaacaactagaccatctcctcccatctaatctactctgagcttctaaatcaatctctccaaaatcagtagaaagatcatcatcactatacccaattcctatagatgaccctcctctactatcaccaccatatttgagcaaaggtaaaacaccttttgcacttcttaaagcaagcttctgtttattaaacctcccagaggaatgcctatgtctacgatacacagattgactcccacataaaatgctacttcctttcctcctaagagtatccgaaaacgaaggagagcaacaactcctacatccacctctatgtttcagattcctcttagtccaataaaaaggaatcccacaaccttgtctccctttaaaatccaagttatcatcatccaactcatcatcaccatcctcccaagatccaacagtgctaggattacggataccatacatattatatgagctagtcgacaatgcaggtgtactgttacaagtatgagaagaatcctctctcttactagtacctctcaggaacttagaagaagaacgtgaccagttcttgcgctttagtttcaaaagcaaaggagatgatactttagtggggaaattctcagagttgctaaaatcctctgtttcatcagattcatctctcactacacttaaacctgatgcaacgtgaagatgatgacttggaaagttcctagctttcgcagtgctttttcttccgatactcaaatccaattccttactcttcttcttgataaaaccactctttcgaatcatcgaagcagatcgagtttcctcaagacacgaatctccaccattcctcgcgtcactcacatcatcatcatcgtcatcatcatcattgagactagcttggatccaagacgtttcatcttcaccctcagtcttctcgcttgaagttctctgagtcttccaattatacaaaaacaccttcttctccttctccttcccgttattcccaaagactcgactactcggaaactgagaatctaactgattgttactgagaatctcgacgttgttgctcgccggcggctcaacgacgaatctcgaggaagtaagaggagatttccatgaggaagtggttccaggatcgcgtaaacctttagaagcaactttcctgatatgagtaagctccttcttcagatgcaatttgctcggatccgaaatccttaaacccgacatttttctttctttctctccagaaaacaaatcttacatagttttagactaatcttctccgaactatttagtatagtcacaccggaaattgcgcaggtgataccaagaatctttttaagaagaaacagaagatgtgagagcgaaaggatgagagtgggagagatgaagaaagagattactgaagaaattcaaaaaattcacggtgattggctgattgatttgctttttatcaaacaaaaataaaagaatgaataaaataattaaaaaaagacacgaaaagaaatgtgaaaaagtgaaaaatgggtcggaaggagcggtgacgctcgggattctccttcttctggtctctctgtgtcagatctaaaacaagtcttcactcttctcacgcctcttcagtcttcactgtcttttttctttttgttgcccaaaataaattggagaacaaataattttttcttttagttgcattcataacaaaatatagatataggagtattatcttttctgtgacaaatgtcttcagtctttagatctcacgtctgatctgttttattgtttggtccgtttgaaatgtcgtccaacaaaaacgaattaaacatcacatgcctattttactgccattgtttttcttagaatacttatattttcttacattattaaaagagttttgcttttgcttttttttcctctttatgatcgtgttaatatatagtacacacaaatatgtgtatttacatgcatatgaacaaagctcttgggtccttatagttttgtgttcttttaatcatgcattataataattcatacatgcaaaaacaaactaacggtgaatatgcacatgcccactattttgtatgttttcgaagttttctttctggctctcaaattgattcattagtcttgtaagcaaacgttgtctccatgttattttggataatataacatgtagtcatgtagagaatacccaaggaggaatcaaagtcaagcgacagattaataatatcatagatggtcctgttcttttttgtaattagaaggaaagagtatgtacatatcctatgaaaatatcatgattaactattagtgatactttattaattcaataattaatactacctttttcttaatgattaaccaattgattaatgtgcttaatgttgttgttacattaaccaatcgtcctacatttaatgggcctaatactaaataatgggccttaacgagcttatcatgttcagttataaactcaaatattttttaaaaaaatcttcttccacttgaatacgaaacacggaaacactaacgaggaagagaacgtgaagctatatatatatgtctcgagagctcactgtatctcttgccgccatagcttcacaagctctaacatttcctcaattaaaccaaatccatgctcagctcattgtattcaattctcttcctcgacaaagctactgggcttcgcgtataatcagctgctgcacgcgcctccgtgcgccgtcttactacacgcggctcattttcgattcagtgacattccctaatgtcttcgttgtcaattccatgtttaaatacttctcgaagatggatatggcgaatgatgttcttcgtctgtatgaacaaagatctcgttgtgggattatgcctgacgctttttctttccctgttgtgatcaaatcggctgggagattcgggattttgtttcaggcccttgttgagaagttgggattttttaaggacccttatgtgaggaatgtgataatggatatgtatgtgaagcatgagtcagtggagagtgcacgcaaagtgttcgatcaaatttctcagagaaagggttctgactggaatgtgatgatttctgggtattggaaatggggaaacaaggaggaagcttgtaagttgttcgatatgatgccagagaatgatgtggtttcttggacggtgatgattactggttttgcaaaggttaaggatttggaaaatgcgaggaagtattttgatcggatgccggagaagagtgttgtttcttggaacgctatgctttcaggttatgctcaaaatggttttacagaggatgctctgagattgtttaacgatatgttgagacttggagttaggccaaatgagaccacatgggtcattgttatttccgcatgttctttccgtgctgatccttccctcactcgttcactagtaaaactgattgatgagaagagagtccgtttgaattgctttgtgaagacagcattgcttgatatgcatgctaagtgcagagatattcaatctgctagaagaattttcaacgagttaggtacgcagaggaatcttgtgacttggaatgctatgatatctggatacactagaatcggggatatgagttcggctaggcagctttttgatacaatgcctaagcgaaatgttgtttcttggaattctctgatagctgggtatgctcacaacgggcaagctgcactagccattgagtttttcgaagatatgattgattatggagattccaaaccggatgaagtaacaatgattagtgttctctcggcttgtggacacatggctgatctagaattgggtgattgcattgtagattacattcgtaagaaccaaatcaagcttaatgattcaggatacaggtctttgatcttcatgtatgctaggggtggaaacctgtgggaagcaaaacgggtgtttgacgaaatgaaggaaagagatgttgtctcttataacactttattcacagcttttgcagctaacggagacggggttgaaacgctgaatttactctcaaagatgaaagacgaaggtattgagcctgaccgtgtgacttacactagtgtcttgacggcttgtaaccgtgcaggattactcaaagaaggccagagaatattcaaatcaataagaaatccactggcggatcattatgcttgtatggatttgttgcgctgagttgataagcaaatagattaatcagccaaaggtagaatgtacagtccctaagaaattgccaatggatgcacgctcctcaatgccagtcttacatcaggtgagcataatctgtatttgaattgatttaatataaagttcaaaaaaatttccttacaacctaggaaaaggatagaacccaaaattaaaactaatactaaagtcccactcttgtcaatgtaataatatggtcgtctggttagaccccactttttgcctttttttgtttctttagttgcttcttctcccatttaacattccgtgtgaataggatatccttaaagtggtttctatgtgatttcttgggtcttttctttgttatttcttacatgtgagtgcttccctaaagttcacttttgttttgtctaccattctgtgtgggttcacttatttactggtttttgcttcgaagcttcctcctgaaactcccaagcttgccactttattttgtttaagaatgtgtatataatctgaattgtgggttagggcaacgaaaccacagtagaaaaccaacatctgcagaaaggaaactatctcctgaaaagaaaaacaaacttctttgttcctgtttatattgttctctttctcaattatatcagttttgcggagtttctattatataactgtgtcttgatcactgagtttctgcctaaatttttttttctatggatttgagactccaacaagctgctgagtctggaagcatcaatgagttgtatgctcttattgatgagaatccatacatacttgagaacattgatgcggtgccatttgtgagcactcccctacatgtagctgcagtttttggaaacatagaatttgccatggagatgctgaatcttaagccctcttttgccagaaagctgaacacaagcggttacagtccattgcatctcgctgtggaaaaggaacaaagcgactttgtctcccatatgctctggcatgatggtggcctgtcccgtgtcaaagggagaaatggcgtcacgccgttccatctcttagtgataaggggagacgatgatcttgtagcagagtgcctcataacttcccctgaatgtattgaagatgtgaacgtggatcgccaaaatgctttgcatctagctgtgatgaatgatagatttgaagttctccaggttctcacgggatggatccagagaatgagccaaaaagatgcttactatatcgagaaccgagttctgaataaaagggattttgacttcaacacggccttgcaccttgcagcatataagaatgatcagcaggcaagctttactttctttgaaattcgtttttcaatatcatgtatctgattagcttccatatcaatactaagtgataatgagtcaggtgaaatatgatcattattaactaagatctttttcagtatgagatgctctaatagaacgatcaatttcgtgcaggccttgaaactattactaaaatgccggttggtggagccgaacctagttaatattgatgatttaacattcgttgatatcttaaggacccagggagagaacgcaggtggtgggaacctagatttggaacaagctgttataaaaactgggtgtgtagaggcggcttctatgccaaaattcaaggaagagtctgatttgttgaaatcaccaatcaattttatgacatactattccacgtccatgaaacgcatgaagtcttccacttcagatcaagatcgcggagcatttctgattgtatgcactttgataataacagccacttatcagatggccctccagcctcccggaggtgtacaccaatctgagaatgcgaatgcgaatgcgggttctgtggtgatgaaacagacattcttcatccttctttggatttccaacaccgttggtttctgctgcgctgtattctacaccttttgtctcataccactcggtcagttgtttacgatatggtttttttatatagggacatgtctgtgcatttcttatgcactagcaatggcagtaatctcaccacaccctctagtgtttctctctgctacctttgctctcttccttgtttttgctctctatctcttgcttgaagctttcgtagatacttggcggaagcatcggacggtggtacctaagtcccgattcagctggttttggaaggttttacaatattattatatctgaagagagggctttaagaattcaaatggtgtaaccctttcttaagagttgtgtaatgtaatgttccaagtagtaactggcttatatagatattaaaaaaaaagacttggtatgtttattgtttaatgagtttcatcaggctttcggagttaatatttgttaatgatggttaacaaaataagttgatgctaagaagaagaaactagtttgcatagagagagttattaagcacacaattatttttgagaaacaaagaacgaacataaatacggcaaccaatcatcaggcaaagatgcagcaacccttgtgacttttgttagtaatgtcataatgttccaggaagaaaagaagcaaaccagctgcaatatagagagtgtttgtgatatcttagacatgttcgttggttttaactgtaattcaagtcttacaatccattctattcccaagattagctaaaatctatggtagagaccaccaaaccatgagatgtcttcttgttggagaaatcaattaaaccattatattatacattcaatctctggagctccaataaacaatgcataagattatacaaacgaaaaaacaaccattagagacaggcaaaaatttgtatgataaaatacaaaacttggggatagtcaaatcaaactacaaatatgtgaagtttgacactgcagaaaaagctaaagaagaagtgatagagagattaaagagtgagtcaattatgatattacaaagaatctaaaaatgcaatctttttgttgattcttgatgatctaaagaagaagaaaccctagtttgaacgagatggatttgtggtcagtacggcgatggagctttggcgttgggatcccaaatgacatcagagccacccacgtacatcgactctccaccacctccagagaccggcggcgattgtccctcctcttccccttccgccgagtttctttgctcttcctccgtagcaggtaaccggtgataggaagggttcttgaaactagtggcgacgaagtaaacagttccggcggcaacgagaggaccagcgacgaatccaccgatgactttcccctgaggtccggcgagagagacggtgaagaaattggagacgggaggggacaaggaggtaggaggtagaggagggaggaaagtggcggagacagagagaagatcgaactttccgtggaaagtaatggttgagccaggagctgccggagaaggctgacgcaaagtgacatcagcaacggagcctgagccactgaggacgcaaaagccgatggctttaccgcggcagaaacggtttagggcttcaacgacatcgtttccggatggcacttcgaggatgtaaggactcataggagggtcaatggtgacaaagattggagctttaggtttgtttttggaacctcgaggtctgccacgtggacgcccgacggtttccatggagggagaggagggagagaggtgcaagtgtcgctgtgtagggagcttcgacaacatttaatcttttggaattttgtgttaataaagatgcagagagaggtttggttggtatatatgagatgtactgtatgtataaagacgactagtctaatccttttgggaatatactcgatgggcctttcaaagcaacaaactttaataaacccactcattactttagagtttagaataagtacgtttctgccagaagctcattttctatggatccaaggcctcaacaggctgctgaatctggtagcatcggtgacttttatgctttgattaatgagagaatccgtgcttactgtcaatcttgaggtagagtgtcgagtaactttaatgtatccaaaatgtgagtgttaatggtcagaatgctctgtgatatgaaaaatagatttgaacttgtccaagtccttaccggatgaatccggtaaatgaggcaaagagaggctctctctaccgagtatgcatgccttactggttctctctgtttgctttcccttgtacctgctttttcctctccatatcttgatggaagctttcgtaagcagtggtgacagtttgatacaacaactcagaggactttgagaatgcagaggtgcaaacattaaaaatatgttatgtcccttctgacttcttcttcttgtatcataataatgttgtaattataggtagtttgtttctatatacatgttagtacgttcaatatgcttcatcaagcgtgagcctttgaaatttgtgttgtgaatgtcaaatcaaatgagtgtgataccatgaagaaatatccagctgccatataaaagagtcccacttgtttttaaattgtctcttcttcacatgtacatgtgggttcttcggtctttgaactctgtttctttattctttcttacatttgtttgatggttctaggtaaagacaatttctttgttgtcctcttgctgaatttagatcacaaacatttttcttgaattcagagtttttctgatcaaaagctccctctctctctcaccatggatccgagactacaacatgctgctgaaaccggaagcatcaatgacttttatgctctgattgaggagaatccttacattcttgataacatcaatgccgtgccatttgttaacactccgctccatgtagctgcagcttctgacaacattccatttgccatggagatgctgaatcttaagccatcgtttgccagaaagctgaacacaagtggctacagtccattgcatcttgctgtggaaaaagatcatagagagtttataacatggctgctttggcgtgatcccggacttgttcgcgttaaagggagagaaggaatcacacctttccatctcttagcgattagaggagacgtaaatcttgtagcagagtgtctcaagtattgccctgtatgtattcaagatgtgagtgtgaatggccataacgctcttcaccttgctgtgatgaatgatagatttgaaattcttcaagtcctcaccggttggctccaaagaatgagccaaaaagattctgcttccaccgaatctgatttcttgaatagaaaagatttagcacacaacacgcctttgcatcttgcagcatataaggaagatcatcaggtatagttcttaaagctactaaactttttttagttttgtatgttttctgtcatgttgtgtcaaaattggcctgagtataaaagatatgtatgcaggcggtaaaactgctgctacagtgtcagctggtgaaactgaacgaagtaaatgcggatggtttaacattccttgatatcttaagaaacaatggacagagtagagacttggataaggatttggaacaagttgttgtaaaaaccgggtgcaaggaggcggcttctcttccgcaactcgagaaaccgtctgatcagtttaagtcaccagtcactttcttggctcattgctccattggcatcagacgcctaaggtccgacacttcagaagaaggccgtgcagtcttcttgattatatgtactttgatactcacatccacttatcaaactgcactccagcctccaggaggtgtacaccagtccgagggtggtggtaccgcagtaatgaaacagacattcttcatcgtcctttgggtttctaacactataggcttctgttgcgctctactctacacgttttgtctcctaccaatcggtagcttgtttacaacatggttcttttggattggagcgtctctgggagtttcttatgcgcttgctatggctataatctcacccaaccctctattgtttctttgtgcggcctttaccttgtacctgctctttcctatgtatctctttatggaaattttcatagccctgaggctgagccatctgaaggctgcagtaaatcgaatgtttgttacatttgtgaaacagagagggactttgagaatctaaagatataacctcgacaaattgttattgaatgtcatgttctatgaggtaatcagcttaatgagtttcatcgggagccaaagtttaaaacttttaaagcaagtgagataccgagaagaagaaaccacttgacatagactagagagtgcttaaaagacagaattttctcagaaacttaagacaaattagtcataacattttaacattaacagcaaaaaaaaagaaaagaaaagagaaagagacattactaactgtaagctgtctcaatcccattaaaactacgcaatcagaagccttttgtttcttcttcttcccacagctaaactcttgtactgtcttcttaaactgtgaaaacgttttcctctttcacaggctctaatgttattatcactttcaggctttcattttcttgctggtagtgcaacttgggcatttgtaatgtttgatatgctcagcctttgctggtgtgatcttcacgcatttcccatggaaccatttctcgcaagcatcacaacatatccagaactcatctcctccatagttgtcgccacacgcaccacaaacagcaccttgctcgtcatcttcatcctcatctccgctctcatcttcttttcttggtggaggggacatctttgaagccttagtgtgagattcagaatgacgaggctgcattagaaaacaaaggagtaagtagagataagaacccaacacagatacatggactgagagggcgaaaaaaaagagaaaacagaagcttctaccttgccaccactagatttgcttctgctactgttgtggttagcagattgatccttggattgctttgcattgccagttacaacctcgaaaatggttgggagatcatttatcatctggaagagcctcttcctgaaaggaattaataagatcagaggcaagataactaaaccatttgagtctataatatcagagaaaacaaacaatgttacttggctattcaacaaacatgatctttgacctaaattcttaaatctcaataaattttggttcagcttagatggaattcaatacatttgtaggttcacttctctctactgaaggagaaaaaatgatgatcacttcttcagggttgtttcacagaaacaggataacatgagtttagtgtgccagagatcgtcactagtatctacaacaacaactacacggtgtttggatgctagaattatgcagctactatactagtcattgaagctttaccaaacaagcaaaattaacaaacacagaacactgagcagagaaagaaacttacctctcattcttgccaaatccgaaacgtgcaccaaagtaaaatgcaacagagataagccatgaatcactgtgaactgcaaccaaagaaatccagtctttttcttgcattccgtcccttgcgaaattgatgcctaacgctggttcaggaagctcaggagggacctcctcaacgggaagattaacctcccatgtctcatttggaagtccataaagacacaagttttccttctctgcattagcaaaaaacgtaattcactaagaagtcaagaagagaaaccacaaagagaactaacttcatcttaggtacaaatctcacaaacacttaaaaagtctataatctgttcaaacatcatgaaccaaaaaaactgttcaaacagacaacaactctgacaggaagataatcaaagatataacacctaacagaggagtcaactagaaaaaggatcataacaacaagtctactgcagattagatgtaatcaggaagaagctaactaaaacaatctaacagaatttagaaaaacaaaagctgggaacaaaaagaatccgtgaacaaactcatgaagcaaaaaaaacgcatgtccaattacaatctcttccctaattcagacccgaaaggaactcttgcactgaaaaatcttaactttagcaaaaaaaaaaaaaacacatcttcctataaacaagataagaaccaatgcgttaggaagctatatacaagactttaaatgggtaacgaaataactcaccagggtcacactgatggtaaaacttctgtacatctgcaaaacaaaacacacaacaaaagaacatgaataaacccaaaacaggaagaagaaagccaaaatcttttgggggtttttttctcaggaaattaagaaaacccaattgaagaaacgagcactaaacatataaaaaaaactcgcaaatctacagaaatcatctaagattcgatcaaaagaaacagagtaaatagagaaagagagatcgagctgaccagtagagagagccttgatgagaccagctctacgaccacgaaagtcgctaaaaacctcttcgacagtgcgaggtataggatgctgaattccttccatagtattgcttcaaaagccaaagactttcacagatgagaatgaatcagcctcaccaaagaatgcttccaagtatcgagatgcactcagaaacaaaaaagccaagatcggctttttagtttttccttttgagggaattttgtatagttcgggggagagtgaaatctataaactttcggaggaatttatttcatttggggaaattgagaagagagagctgtgctaagaaaaaaaaaccctaaaaacgaaaaggaaaggagacaaaagacaatttgagggatttggaagcattggaagaatagattaaagcgacaacatctcaactttttttttttttttttaaagtcacaacctgtatttatctatttatttaattcactccagaaatataaagtcgttttacttttcttttgttttgggtcaatatttatgtgcgcttttttttcctgaggcatgttctacaacgaactgaagtaataatacagtaaatttctgccagttttactgtgattaacgtttaagaactgtactataatatccatatctgtcgatcaatataatggaaaggctaaagattaaaaaaaaataatgattttaaacaaaattgatggttttacaatattctgtcattaatctctagttaataatgagttaaattatactactaatagttaaaaagaatgcttcaagcttaataccgtagagagagcgagggtctttatctgatttgtttaatcgttaatgttttttgttattattttggttttgtttatactactgttttacatgtttttgttaattttcatgtgaattatattcaaatcaaactctacaaagctttaatacatagaagttagaactacattaggatggatgactatgtatttcctatctttttgcagattagaatttgcgggtaagtaagtaaaatgaggcgttgatgcttttatcctcaaaagaacaatcagttgtttttatgaagaagaaaaaaagaagaagaagttagtcacagttgggagatacttgacgtgtatcacaagttgtcagatacttagcagaaagattaatggtataacgtcgaaaccaaagaaacattttgatcttcataccaataattaagtttccggatgttgtctaagaatcagtttgctccatttcacgtttcgaccttattgacatgttgaatcatcagatgacacatggaaatgattttaaaacaatatgtatttgtttggtttgctcttcatcatggtctaatgagctatttgcatacagcattttttaacatggttgtctaatttgggatgtaagtgtcgttcttttgtataaagttgtttgatggagtttcgtattgtttgattaattaaaaggtagtttaactaataaaatttaaatatatttacgaataattaggattaggaacacattcacgtacttgccacattaataaaagtagactattaactttgtaaacatgttattaatcaatattaaaaatatgctactgtcacatgactcgccttccaagttagctaactattagttaacttctaatatgtacttattagatataataagtataagttcgaatcaatctattgtaataccaatgtggaatgaattcataacaaactatctttctctcaaggttcattcgtaatagattcataaacattcgatgaataatgtagtatcagctgaccagtcaacaatttttgtaaaatactaaggcaacaaaatcaagctgactattcaacaatgggcctaatctcacgaaaacgcccaatttgaaatcaacgaagcccataacgcagtggtcttctccgtccatccacctgaagcccacaattgattatggagatcatcatccgaaatcttcaaccaaatcatttcaacacaaggccctcaaccccgaaattcgatgagaaaaacttttcaacattttgtcactgaaatacggttcgcataatataatggagttcgggtaaacctggtctgaaatttgattacgaaagggctcacaaatgattttactagtcttagttaattaagctcgaggataatggggcaatagttgtaattacaaaagttatgggtcatatttaaaacataataaaaatataaggaccataaactaaaaagtttcagtgtatcttgcatcaccgaggcaagtatgccagtagcctctccaagcatttcaacaatctttgccttccacccgaaggaaagccaatcctataaagagggacgaaatcagatgtaacttagcttgcacatccccgaaaacaccaatattcttaaagattccacattatttcctgaataaagaagaaccaaaaggaacatggggttcccttacctcgccaacaaaagtcaagtaagtaccaatattaagagcacgcccatgacaatttttgctatctttttatttttttgtacgaatactcttcagatctttttcagttgatgtcaatccaaactttaatcatgagtctatcacaatgttgttgaagtacataaaacaaggatttataaacgagttaggagaattttaaaccacaaaagtaacatagtttcacagaattgtatcaaaatatcattattgttgttatatgtattcatgaagtgaaaaaatattaaaatcttataaataatcagttttatacacaaaaatatataaattgatatttcgagttacaaatgaatctaaccataaaaattgtaactacatattatggatctaattttcttaacaatacaagaataaacaaatagtaaatataaattagcataaagaacaatcaatataaatttttcttaacaattttcacaacaaacccacgcatagcgtgggtactcatctagtactattaaatcctagatcatcttgaatttttactacattcacctgacccctacagtcttcctaaatgtgagagagaggaataaccaattaaggagggagggataagttacgggaaaaagtagcaaatgaacgctagaatgtatcttacaacaagataccaaggagtctccttttgatgtaacagaatcgttagagacttctctatcaaactaccaccgtccaactcgatcatacaatccagtttagcctgaagtataagtgtaatgacaacatcagaaaagtaagcgcacatgacatgatgccaagtttacaaaagcaatctttaccttttcctcaacaaaagcaccaaaaagaccattgtgtttgcagtcgaggggagctgcggaaccaactcttccggataccaaaacaaggagattcgtggtgttttttgcaagcaaatcatctgaaaaaaactaaaaaggattatattaatccaaaaccaatgcagatgaaaaataaccagaagtcgaattattaaacaaaaacatatacctaacgatttcaagccgtccacacgggtaatacgtcagcccaaagagttaactctcctgagccatcataggaaataacacattacaaattgattgataaggcgttgctaacattcaaatatcgaaaaggactgggaatgagattgaccttttaattttacggccaaagagataacataatgcaccagcgaatgaaagaaaaacagtagattccatcacctacaaaattaaacaagagtgcatcacacgatcgttccagagttgatcttaaaattaaaataaaaacaaaaacaaaaactgaattttaattttgacatcagcttagtctaagcttatactagtgctttcaattttaatttgcctttggattaaggtcttgtgacctctgcttttattatatctattagtattaactattagtcattgactttatatgtgtatatgggaaaaatactaaaagcctaaaacagttggctggttcgggtgtatcattgagaattttgaattttgataactccttccttggatcattgatgataaaacttatcttcaattctaaatccatttacaaattcaagattttttttttttgtctcatggatgaaataatcatgtgttaagttcaaccggagtgtaacatctctaaagtaacccttgcagtggcacaaacgaaacaacactctgttttattcatcaaggcatatccgttatcgcctttacatttacacatgcatttttttgtcacattttcttttttgttgaaaggttttattttggtcgcattctctaatccattttattagaaagctttctgcttgtagggtttcaccattttagcttggacggaaaatactgcaaataatataataaacaccgattaaactcgccggcatagaccaaagtttgctatataaaatttgaaaacacattttaaagtatatacatactaccttgttggtaagggagagataatatggtttcacttcctcaacgtttacgcggactttgcttttgctgtagagatcatacttgttgaacactttaagccacttcatgttctctctgtcttcattgttcatcaaatgcttgtatgcttctgatttgtgaagagctgccaaccaaaaacaataacaataacccgtagttttataatctagactcatctattaaccaataaattcaagcaaatcagtctttgtgtttcaaataccgtagaacgaatggtatctgatgatgaaaagaccggctgatggtaaagtagtttgattctccttcgcaacctgtgaaattcagttatgtacatcatatagattattcttacatgtcggtaaatcataaacacatgttgagattgtaatgaacttacaaggtacatgtaatcatcatgtccccaagacattaacacattgtcgagcccacagccttcagtgtatatcccatacttagagttgtaactcgggttatcatagtctggattctccttgaagtactacatcaagaaacccgcaatggaatcaatttttcatatgttttgaaactcaaacaaagtttttaaattgtgtttaaggaccttatgtaccttgtggtgaacaatagattcatcaaaagcacatcccactggaaatgtatcaccgacgacagcccactgagggagctcaccaaatgaagagtgaagaagaacttttccaagatctgattcacatacacaccaaacacaaaatcattaaaccggtaaacgatattttaacgtgatcaaaccgaatcagggagtataatttaccgtggataagaccggtcagatggagccagtcttcatcagggtaatcttttctgatggcttcagctgtctgaagcagatgctcgatctgaggttcgtccaaatcaggatcactctcgtcgataaactcattcagaagctcgcaacattcccaaatgctcatctccgtacgatttagcttctcgtattcttctctcatcttcctcacgaaatcaacggtttggccaatgtgattgactctgtaaaattcctcaacacctcttctcctttcactctcagcatcataatccctttcatgacaacaacacaagtaaataaagattaaagatttgatcttgcaatctctgatgtggatatatctacctgaaggtgcgaccaaaagagttggtgtgaggagcctcgaaacctgcatctaacaccaactctgtttcttcctctttaccattcccctgattcttctctacaatctcatctcctgcatctaaagtaactcaaactcaatcatcaaataaatctataataagatcatttcaaaacagagcatagagaaagaaagatccaaagtaaaacgagtacaaaggatcacgaaccgttctgatcagagtggcgatctatgagaatagtcatggagattcttcagatccagagaaaccaaaactagggttttgttgttgggtgatgacggcaaaatggagaaaggaaaatgatggtttaaataggtgaaaagcgagccctgaagtgggaataaaggaagaagtgagtccttggccatattttcatcagaaggactctcaaagtgtccttctatggcaaaatatgcaaaaaaatctcaccttttttattggaatagggttcatgcagagaaaacagaaaggctaagaaacagctgtaaccgtttagatgagttagataacgacttggcgcgtcattaatctttttaaaatatgatatttgcgtacgcgtcagacttttttaatccactaattattaactacaaattttgaatttgttattctatttcacaacagtccgacttcaaaaccacttctatgttgagtaataataaatatctgctgattattttacacgtgtgaagactattagccgtagaaagatcacacaaaagagaagaagaagaagaaatcacgtcacttttatagtgggatctacatgacgtggcttcataaatgacaattttgttttctatgatccgatggtgtctctgagtgttgtagagtatagacgacaaaaaaattaaaagaggaagacgtcttccacatttgtattttcttacaattccgtgaccaaacaaacaatcccacaattttaagtcgagattcacggtttctgttgtctctaatttaaattcatattacaacaaaattcatctaatagacatgtattgtattgtatcagctctcttttagagttttctctctttaacgattaagcagacttcatttagaattgaacaaaattttgtttacataaattctcatggcagacaaaatgaagaaaaatcataaaataccgattgtaattaattaataataaccgaaattagtacgtgcagatatcacctaactttcaattaaccaagtggaaaagaccggtagagaaaagaccaaccagtcaacaaatgactatttgcatttcttaaaaaactacttcgtatgaactgacaacaagccaatgtccataatatatcatcaaaataccaattgttcttccgtctcagaagtcagaaccagaagctggatatctcagtaactatgattctatcattctcacaccaaactactttgaatcagtataaacaagagagacttatactaatcaaccgcattgaattagttagagagaaatcacaatccattgttctgaaaccccttacaatttacacttttgtctatgaaagaaacatgaacccctcggtttaccggtacctacacaatattaacttccggttttaaccaaaaaaaaagaaagacagtttatcttttgacccctttttcagctgtttcttatgtttttctctgttatagtatcatccagtaaaggttacctcagtgtttcgattctctgaacatgttcattggatttgatggtactgtgtgataccgcgttttggcggaagctttcttaggataaagaggaccagagacgatggcaatatctccaccaactgtaagtaaacagaacacactttttgtttagagatttttaaaagaagcttcatatttagattctaagattcacatagtgtgtctatatacacatgcacatatatggtagctgaagaggtgaatggaaagcttaccaagtaatatatgaagtttaggattggatgatctaagacatcaagatctgctgcatcgtcaaacgcatcaaagcacatctagaccattaacagaagatgatatgaaagatctggttagctgtggtttcggagatccaccaacacagagaattcaatcaacaagatatggtctaatggtatcaatagtatgatgtgtatatctttaccatgatacatctgatgaggaaacatgtaaagcatatggttgtcacgtagccaacctgcaattcgtacaacacataaagggggtaaggatccaagaaacggaatttaaagatcggggtaactttggtttaatattcaaggttcacctcttgtagcttcttgcgccgccctttagactctactggaaatcgttgcagcatcaggaaaagcctgcaaagaaataatcatcaaagacgataaatcaaggcgacttcatgagaaacttccttcataacagaaatgatatatgataaatcctgatatggtacaaaaaggatcttgtctagctagcaaccagtggagggcaggaatcctagttttccaaatgatatcatcaactcatttgtggcaggaaaacatgtggcagcaggtaacaagcgtttaaactaagctaccatcatcgtgtagcatatgcaagtgcaacatacttaccttcctccatataataaaaagccaagggccgcaaacaatgagacacctgcaatatacattcacaagagatgagacatagagtgcattaaaaaaatcaatctctgtgtaaaatgatctatacttcaaactatacctgcaaagaacatcttagaaatgattaccataaggtgaacaggcttccaccacaaaaccaaccaaagagcaatctgaaattaatacattcaaatgaaagattaaagctaaggaacccacaacacaaatggatcgtaaggaaattcaataagaagctcaggcccacaggtccaccaagttcaaggttaactctaaactttgaaaatttctcagatattacaaaggccaaataggtagttagtttcacctgaattacgtatacaactgcattaattgtgaagaaacttggcctcagtccatcagtcgatacagcacgtgcctgccaagatagagtaaatatcaacaacaatgcaggaaaaactaaattgaaaatatatacagaatcaaggtttacctggtagtaaatctctgcccaaaagagaaccagaagcgcatatgtagtgaagaaagcaagacttggaatatcaagtaagatatgttgcagaatctacaagaaaaaccgaacgatacttgcaagtttagaaatttcaaatagaccatcaatgaggctaaatcacaatatcaatagaaacaccaaacctctggctgcatgttctgtgcatctcgccggaagagaaaaaccagagctcgaactacaaagaagaagacgagccaatcaacaaaagatacacaaaacaaaatcaaaaactaacaagagacaaacaaacccacctccgttaaccatgaaattgagaaaatgaaagaccttctgcgtcgtccagccatattctggaactctcaattgtattcttaccaattgaatctacaaaaaaacaaatgaaactttaatcaatttagggtttttttctctaatcaacactccatacaacaactatttcctcaatttcatatccttaaatgcctaatcttccgattccaaatcaacacattccctaattccaatcccaattcaaaaccagaaggacaagtaaacggtaccacagcaatgacggaaacgattccatatagaacagcaagaacatggaagatacgatcctgccacaccggagattcattcacatcccaccaccaattcttaccctccttcaaattaaacgctacgattgctgaagatgacatcatttccaagccgccgcttctcatctccacgaaaaaaacacatacaaagattcaaattccttatagatttagcttcgatcaccaaaaagagaatcgatcgaatcacttctcctctctccttctccttcctagatttttattttatttttcttccatttttttttgttttaaggtatttatagtattacccgaaataagatttgagaccggccgtgacagggaatacttagaatgacgtggaagaaactgaagaggagattgaaaaagtaaccggatatagccggtggttctctccgtgtggagatgttctggtgaccgacacgcaacgttgttatcatagttccacgtgtatgtatacgtggataaattaatgctagctggactttttaatgaactttagagagattgtgactaatttaacaatgacgaaactaataaaaaatgctatggatttaattattaacactttccttggtaccttatatattccaaaatatttattattccatatattcaaataacaaacgaattatcgctgcaggaattttagttacacacaattacaaaaatgaatcaaatggggtatacacgtaaatataataacatgaattttcaaggttcgaacttttctcgttgaagacaagtaggtaataactcttttaattaacggcactgcagattcttcggatttgtccatctgaaccagtgagtgtctgaatatctcccattttgatcattgcagctgagaaatcagacgcaaatcgtgatggatttctgctgtactccgtcactatactatctgtagaagctccggttccgaacaaaacttgatcgctttctaaaagtcctttcttctgcatcaagtttctgtaatagttattgtcgaacgagtttggtgtcacttgatctaaaggtgctagagtcgtatctccaccgttgaccggacaacgacgcttacgggtactggagaatcccgcgtcaatgtcactcgagttatcgtaaagcctacctttgaacgtgaggcattgagcttgccctaatgtgtgagctcctgtaaatagggttaacttgtgtcacaagaaaggttttaaatggcaagaaattagtgaccaaaagtgtgttttacggggtgactgacctgagagagcgacgaggtctcttgtgttgagtccttttcgaaggaagagttcagagagatcgttgaggctagccctgaagttggggagatccctgtctgcgatagccctaaacgcgttggtggaatctcttcgaccaaccttcacatcatatcttggacctccgacctattgatgataccaaaatttacatattcaagaattaattagaactatgattaatcaaatttgcaaccgtaaacttataacatttacatgacattttacgtcagagaagtaaatattatattacttgaaaaagtttaaagtagtagttgaatatataaatatgtacatgtttggattaataatcaagatatatgtatataaagatggatatagagactaacatattcagaagcatctctagcagcaacggcaataatatcagcgcaagaaacaacgccgggacaaacactctctacagctgatttggcttgatcgataacttcaaatcctcttgccgattgaaaatttgccaatgaatctctctcactctccatggtgggagttgccacgagcatgaccgatgcatcacaaccctacaaattaaaaaaaaaaaaaaaaaaatatataaagtttagagcagtccataaaacacatatatgtatggacacacacacacatgttgaatcaaatgttttaagtacatacattaacgaagcagtcgtggaaatggagacggatgagagaagcagccattctacgttcacggctgattgcggttcggattgaagatcggatggtggagagagcgttttgacaagtttggtcgtagaaagtaggagaaagttgtgcttgactgaaacaacacaaactcaacaacaatacaagaatcttgaagatcgccatttagcttattacaagagacttttgtttgtaaatttttttagtaatgaaaagaatttcgtaagagctaattgagaagtgatttaatgaattgaagaaacttgatgtgagttttcgaaatgggacgaaatacgtcttatatatataggagcgaaataagtaaccaatcatggtcacttttttctgcgatagcgcgtagacaccacccgacgaccttttccaatagttgccttttctcctttaatatggcacctaatatctttgtctacataataattattattggataagagttaactatttttagaaacgattacattctcatattggatttagcaatctgaaattatataataagtttctgcgatgattattgaactctcataaaaatttattttgataaagaactaaatcttttattggattgaacaatcttaatttgtacattatagatattcgttttcaacaaaagagtgtttgttcggggtatttgattatttcgctttctattttcaactcttgcaattacttgacatttgcattaacgaaaaaactgaaataataaagtatccgaatttggtttagattttgttgaagctggcctacgttgaccaaaccataacttaataattaaaaccgttacgcttacgcggaattttgaaaattgacttttgacttttataaaatagtcagaaagaatctttcgtaaggataatgtgatgtaacattgtccataccgtaaccactagccacaagtgcttcttaacttgttcgttgctttcctatttaggtaagcttcttagtttgtttcagtaaataattaaaaaaattaagttccatttacatttacacctttgaatccttttattttttcaattccattccattttcttaaattctcatcaggatctttcagatgaaaacgatatagaacaaatatctaaaatatcattatgttatgattatatcttgatttctgtttgactattgttttacccatctcccaaaaaaatgcatatattaattcaaatgtttactgaatctcgcggacaactaatcaataggctcaaagacgacaacgtcgacaagcaccatttgatttacaaataaagttcgttttgtaagctttgtatcaatatctatatttgatacgagggagtgaattttattctctgcaaaatatatgtatatttctttttttttgttaaagaaaatatatgtatatgtcttacgtactaagagttatcatgaaggtattttaatttcagcccaacttaagtttgaatgtgtggatatatagcaatacaaataattattgacaagtaaaattaacctcagacgacggtaaaaacaaaaaaacaaaaaagataaaaaggaaccaatttgcctgaagttcatgttgatgatatcgtttttttctcagtgcgtagtagtgagttttcttcattttttctaaagaattatataaacgaatatattaatatttcaatttgaccggtaatcttaatcaatatataaacacacgtcatttggtgtgaatttctaatggaggacagcttttagtctaattagatcatgtaagacagttccatacatgcactgatctagtaacatattcgaacatagttgaattgaccttttcatcaaaggaaaatgaaacttactaaacacatatatatactcacccatatgggcagacgacctagtttgaagaagagctagatgaaaatgacacccctaaaataggaaagtaaatatatataatttttttttgacaaaaatgtttgaaaacatatttggtttagtacgtacgaccccgttaagtattatggtttggacttcgaaatctccattatgttatgctttggtcacgatatcaaaaaaaaatattattattataataaatctaggcctgccatcatatggattaatagatattagccaattcatatgcatacatgtatatattatgtaccatgatactttttcttttttggttgatatgctactattatatttttttcgtagttgagcggtgtctacccataaacataactgtttcaaactatttgtaaattgtaatcataaaacttcgaaattctataggcgagatgttagaagattttgttaaatattatagaagaaattctcttagctaatttttcccttttttcgaactgtggaactatttgaatgctcatctagttgtatatatgctaaaagatgggggttttccaatcgttcgaacataaatacataatgaatcaccacgtactaaaatcaactaaggaaacaaatgaaattacaggtatttttgtgcgtaaatcatttaagagatgaatgattcgaatttcgattcttagggaaaaacacaactactaccgtactacgtatgagatgcaaaacactacaaaaaaggttaaacacgactacgcacaataatgactgtccatagcgatatgccgatacatcgaaattcctaacaaatttatcattattataaatcaaactactgacgaatcaaatttgaggagtggattaataaataacttttaatgttatcggtgttagcccgcaaagactggattatgcgattttttttttaaaggaaagaaaagcgacagtacatagctagcttcatatatgatcgccattgaccatgcattgttttctttcatatatatctctaagaattgtcatcgtaatagggacattgcaagtcctctagttactaaataatcactctttttatttttcacaatatatagctcaattccaattttatttgctaaaaaataccacatcgataaaaatttgtccaccaaccaaattcataacgtgtttcaaacgaatcattcactcgttctgagaccaatatatataattagctactaaattaaattaaaaactattttttgtttggttaatgtgttatattttgactttctaattatatgttcgtcaactattcctttcaaactaatcgcacaaaataattgttcgttatattcttcagatccgaacttcaacctgtattattataagaataaactatttaagcgcttactaatgatgttcttgtttttcttctcaaacttttaggttatctgtttttataagttaacaatttgacaattgaccaaaatacaaagtcagagcccaacaattaatttattttaatccaaatattctctagctaacatatgatagatctaacatattttaaattacagtctccaaccttgaacagcgacaccgcgtgaaaactctcatgcacgtatattatataaacccctagggtttgtaacattcaacatcaatctcaaataattcatcaacgagaaaagattaattcttactaccaaaagaaagaagataaattactattttgttttacgtacgaaatatataccaagtgagatctacaaatatggagagattttcactaaggtttgtgctaatgatggtgagcatcatcctcacgtcatcgatttgtcaagcacaactttctccaacattctacgatcaatcgtgtcggaatgctctttcgaagatcagatcctccgttagaacggccatcgctcgtgagagaagaatggccgcgtctctaatccgcatgcacttccatgactgttttgttcatgtaagtttttattcttctaaatactaattccacatttttaaaaaaccttacccaatcatttaataatagttttgtgtatgtttaggggtgtgacgcgtcgatattgctcgagggaacatcaacgatagagagtgaacgagatgcattgccaaacttcaaatcagtaagaggttttgaagtcatagataaagccaaatccgaagtcgagaaagtttgtcccggcattgtttcttgcgctgatatcatagcggttgcggcaagagacgcttctgaatacgtatgtttgtgattatatatgaatatacccaatatcctttatatatataaaccatgcatatgtataacaactctccaaccaatacttaggtgggaggtccaaaatgggcagtgaaagtcggaagacgagattcgacagctgcgttcaaggctctagcaaatagtggtgaactcccgggatttaaagatacccttgatcaactctcaggtcttttcagcaagaaaggtcttaacacaagagaccttgttgctctttcaggtaggtccaagaatcatatttgtatatacattaagttttttttttgatgactccttaaatgtgtgaatagctatgctaattgcatcactagtaataacaatgtactagacaaatttataatttctaatttatattctttgtcacgataactattcaggagcacacaccataggacaatctcaatgcttcttgttccgggacaggctttacgagaactcaagcgacatcgacgcaggatttgccagcacacgcaaacgtcgatgcccaaccgtgggaggtgatggtaatctggcagcattggatctagtaacacctaattctttcgacaacaattactacaaaaacttaatgcaaaagaaaggactattagtaaccgatcaagttttgttcgggtccggtgcatcaactgacggcattgtgtcggaatatagcaagaaccggtcaaaattcgcggcagatttcgcaacagccatgatcaagatgggtaatatagaacctctcactggctctaatggagaaatcagaaagatatgcagctttgttaattaatacatgcatgcgataatgcattttatattgtttgttaaatttattcgttgatctctttgttgtaatgttttgtgattcttactaccaaattgtgtattatttgtttttaatatttgaataaatgccaattagttttatgattatatagtcatattttttgataattcaatccaagttacaattgctggttcaatgtggtttgggctaaaccaaccaccgaatctgtatggttttatttttagagttccaccatatattgggtgcaccatgccacatggaattc

SEQ ID NO: 986 - DNA, 91001 bp, Arabidopsis thaliana
aagcttgtctttctcatcgattggtttgacctgttcagagctttccgacataggcttaggttgttcgtcgcgttgactttcgtctttctgctcgttgtttcccgatttgttgagttcggcgatgagacgatcgtcaaacactataccggaagatccctgacggcggaaagagattgttgatctttgaagaccctccatggatctatctctctctctgttgatgagctaaaagaagggcaaaactaggaaaagtgagtttaggccttataagtgattaatcaatcattgtgtttcagacttggtttccttttatttctgtcctcattattttttcatggggtcggtccactatttattgtttatttttatgatgatgcttccagtttctatttatttctttgtaacaacaatcatcggaaattaatgtaagcggattaacgatatcattcaaccggattattcaaacattaattgtaataaaaaaaaaaaagtaaaaaccattactgttattgatgattaaggcagagaattacatgttaattttttgtttgttttcacatctttaatcggattctcaacaccacataggcacataagtcctcttatatccatatttgttattttattccaaacttttggtttctttaaactcaaaaggggtaagactttttgtaattactattgttttatcagcaaattgcaaggattagataatagattagaaatgaacaggagaattgacttataggacacactaatttaatatttccttcttccccatttcggtaaaccaaatagactatttccttcttccccatttcggtaaaccaaatctattaggtgaggatgttattaaaatgccaaatctctctttataaaaacttgaaaggaaaaacaatacaaagtggtgaaagtgagtcaaagtaattcggttaccaatttgtattcaaagtcaacatcattgtactataatatggtataacttttgttcaataattcaccttcttatatcgtctgtttcttctcaggatcaccactaactaaaacatacgcatgtggtgggtttagcaaaactgtattctttggattaaagtaatgtgcataacacaaattaataaccccgtctgagttggcacaactcaccaatgttgaagattgagataaagaatttgggcccaatcgccgaatagaagtctatattcattactctcaggcccatccataaatacaattgtcaaaaagaaaataaaaaattggtggtccagctgggaacgagccagcaggccatggtgaatctgagtggcgtcgagctgtgatccgtccactgctgagagcgggaggtgatcgctgctctgtgaaaccagcctcacgcattgccctccactgcaagaaccgcctgagccaagccttcgcttaacacacacggatcactctcagcttggactgggcagcccggaacaatgccacaacagatccgacccgtgggccgagccagtgttccaccaacttattgtccccacacgggtcacaagcccacgttactgagctcgacgtacaagtattgatttaatttcatatataaagtaaaacattttgaggtatgtaaccgatgtgggacaaaatacaagtttgggcttcccagatcccacatttggtggaacacatatataaagagtctcttcgttgattagcttcccagatcccacatttcaggtaaaaacatcgtctgggctctttgccattttagcgaatgtggaaaggtgtggtttttttttgctctgctatggattttttttttcaaatcagggtttctctgttgaagtcatatcaggagcttgacatttgtttgtttgggaattagaagctagatacgtatattatatagcatcgtacatatcaaattttggtgtgtgttctaattgaatctgtacttgtttgtgtgttagtgggaggagctcttctcagaccttaagactattgctttagtggaatgcttctcgtaaatgtataagtgaggaaagaaactccattcgtatctatctactaccctaagccgtttatgcattttctgtccatcagaagatcaacacctgtttctggaggattccattgatttaagggattagatggatgatggaccatgtgggattcagtagatgacaagaacacaaaggaatccacctaacagagacaacccacatgttgcaggaaatacatataataatatcacaagaaacggaaaaagaagcagacagagacacctcttcttgaatttaacgccttacattgtggtatcttccatcttctttactgcctcatggtgaaatccagtgcatatatgattatttatctgaggcgaagattccttacttcatcttgatgcgactactactggtccaactttcattggatcggttgatttgaggccgttgttcttacattttggtgtcccacctgttcttttagtactgttttcctttttgtttctggcaatcagaaaacataaaggcaatcagtcatccttctcaataacatacaaagatttggttttcaagagaatcttctatagaaagctagacgtttacttctgtcttattaaggagaagtactggttctttcatttatatcttggctggtttgggaattgcatccaaatttcttgcagtgggtgtcagcctggagctgcagaaaagtgagttgatgttagagattgtaggatcttactccaaaaagccagaaaaggtccttgcgactctctaacttgaaagttgtttcctttttttgaatctgagctggttttggaattttggtgtcaagatttggaatttgaatctgtagtaagattcaggtttagtgggggagggaacaagttggaagcttttgctagttttgtcaaaggtgtcactaaagtactaactatcagaaaacattttcagccagaagcttggtgatgtatcttcagattttcaacaacccatctcatggcttagctcatttatgctactctagtcgggtttcgtgtagggtaagactgagtcgtgtccttgccatgccaccgtcttcagtcctcttgcatatggacgaaagcaatgatcttcccaagcccaagaagggtttttgtctgagtgaagattcgagaaacagtttaaacagtcttcctgcagattctttgcttaggcaggccaacacagtggggattatcggaggcgtttcaactgattccactctgaaatttgtgaagaaactcgtggattggagctcaaatgatggtaaaagctcgttaccttttgtgctttgctcggatcctgctctcaacaaggagcttctcttatacgaggaaaactcgtatccttctctttaccatagagaagagagtactccggttgatccaaagctaattgtggaaaatctaaggaataagaggagatatcttgagaggtgtggagctaaattaatcttaatgccctgtcatattgcacatatatggtatgaagaggtatgtgaagggagtttagttcctctgcttcacatgggtgaatgcattgctaaagaactgcaagaggcaaaaatgaagccccttgaagctgggaatcctctgcgtgtaggtgtgatggccactagcgccacgttatcagcagggttctaccaggagaaactccaaagcaatgtcagtgttctattgtgtccattggaacaacatatctatcatttgtctaagttcgtataaagctagtattatccatcgtatgaagtgactctgtgattatggaaatgaacagggatttgaggctgtgcttccagacaaggcaacaatggagcacacggtgatcccatccatagaagcaatgaagagaaaagacatggaaggagcacggaaccttctgaggatagcgttgcaggtactgctagtgcaggcggtaaacgtggtgatgctcgggtcagatgagatgcgggacctcttgcctggggatgatcctctgctaaagaagtgtgttgatccaatggatgcactagcaaggtctgccatcaaatgggcagagaatagatgctcttaagggagtttgtgtgtgtgtatatttgtgaatagaaatatagctcggctgggatgaaattatcaagtgtaaaccagtgtttgatagaaaactcaaaaccaaagtctcaacatgtattggtcaaaacaagtgtgaacatctccaaagccaaaaaagtctgaacatgtgttggcttggatgcaatgtgtaatatcccttattattaatacagacaattattagtggaataaaaagatgaatcttgagaaatgtttagatatctgaaggaggatgaccaggcatgcttggactggttgtgttgttagggttcttcttgtccaaagggtttttgttcttatattcttcattgttgtcattgttgatccccaatttgttcttcactgcctctgatgcatcatgtgccatactcttcactttctcccctttctgataaaccatcaaatcttatttcttaaaaaagaatgaaaaacctaaaactacaaacatgtagagttgatgggttaagttaacctgctggagaaaacctgaagcttgagaagagttgttgcaatcattctccttcacctgataccaaacatcatttttcaaacaaaactctgtgtactaatattttaaagttaatacggtcgcaaaaggcacaagtaaaagagaaattgaacagaaagactgacatgagcttggcccacgatttggccggccctcacactgaattcctcatcctgtccgctcgccatttcttacttgcttccttcttctctcaaacaatttcttcctttataatcatatatctatgtgaatgcatcacatttttctcctctattcaatggtgttccatttttcaaggagagcttttctagctgttatgatccatcattttctaaatcatttttgacctttccaacttcattctttccatttttagatacaccttattcttgtctatttttttttaatcttaaaaattaactcttccttagcacaaagtctcgttcatatcgatataaccattacgtattacagacttcttgacgaaagattgaaccttttagccatattcttaacatctaacatcagcctcacacaaatcaaaacttttgccattttcaggagctttatcaatcactcatgtcgtcaaatccttcaaaatcattcacaccatcagcagcttcatctgctgagtcgtctgcctcttcatctgtctccattgcttcctctattccttcttcttcgtcttcatcactgtccttgtcctcatagatcacgggaccttcatcttcttcttcatccaagtcgtccacaatctaccattcacacaatcaatggcgattcagtaacatactatcaagtcaaaaactctgatttcttttgtaattccctaactgattcatgaaatcaaacgtcaaacctaatgccacccctaggttacacattgaaaccaaattcatcctggttttaaggtaagacaatacataccaagtccaagccacttgaaacctctacggcagtatgaatagttgaaacccgtgattcgatgagctgcacacacaaccaaaaaatacatatcaatgattcatctatagtgttttctgatctgtatctctaacagagcctccatggcaagcacagccgtacaataaaaacaagcactgcctaacctgatacatggtgtttaaagcgagtaatgatgactcttgggacataattccactagaatgagtaagtaacagactctttatccatggaattgtacaagccaaaatagcacccctgcaaagcaaaaaagtattaaactcccgatttgataaatcagcttcagcaaacacaacatatatatcatcaactctaaccttgattgtagtattggtagaagggcatttagaagcttgagtacttcggctgaattcaacttagcaaccgaattagcaatcacctgtaacgcatagagaaccagaaaaattaagaaaacaaacaagcaacaatgtaaagaaacagacagaaactatctgaaacctgctcatctcggttgtacaagcagtcgagtagaagagaacgatcatcggcatgcaatgcttgtctcagaagaacgttaacagaagcagcagtaggaggcttatcatcgccaggagcagaatctctattactctcctcactgttaaccttttcgccatttaataagtcaagactctcaagtttatcacctatcgttggctcatttagagtatcatctaccaatactccatctctatcttcatcaagacctatatatcaccaaatacgaaccctactataagaccggtaatgaaatctctatctgaaccaatccagagtattatactcaacagtctataaaccttcaatttcttaatttgataaatcttaccggaatctcgtgtagagggtatatcaggttcaggttcagctcgcttcttgctcttcttcttatgcttcttctctcggagaggagtatcagcgatatcacctgttgaattcataaaaacacaagagaagagctatgagctcacaacaaaactgagtaataggaaaaggaaaagggagatagaatgaaggaaacctgcagcatcagaggagagaagaggcttgagtttgtccttggccatggtcagcgatcgacgagagaagcggggagagagagaaagagaggccggcgttgggtttagttagggttcttcttcttctacttctagccgcaacaacttgacagttcacacaacaactaaaagctacgacgggtcgggtctaaattgggtgaaccgaaacgcttttttttatttgttgggccgacttaacccaatagttgggctcgtgtaatctgttccaatatcttcttcatattttatttcctcaataattatacttgttttactaagaaaaagattgaaatattatagttggaaggctgtcgttgatattgacacggcctctaataccttggacttgactgcataatagtggcaactggcaagatttgggattaggattgtggtatgtgtttttacctcttttatttgctagaaaagtaattgcacgtaaatggaatagataatatgtatatacatgcatcaaaaagaagaaaaatacaatatgtatatacatagatatgacagctaaaaaaaaaatacatattttctttctttcagtccacttattaaggaagataaacttttattttcttagaatacagagattagagaagcatatctttgggcataagaaaattgaaaattttgttaaaaatttagaaagaatataaacctgaaaaagccaaaagttaacattacaatttatttggtttttacagagaaacaaaatatgagtaatcatctctattgaaggaaaaaaaaagaatgatatccagttatttgtatttttctgccaaggacacgtataagtgttggcaaaaaaaactttggaagccgtttaaaaggaaaaacaaataaaggaaagagcaaaagaaagtcaaaaagacaaatgtggtttaaattgggaaaggaaagtagagagaggggtggacttattacaaaaaagatgtaagaaggggtataatggtcatgtttgaaaagacatatcttgtgctctcgacgcctataaaaacccaaccatgaccacccggacaatctcacattcacgcacgcgcatccatcttcaccgtttcatacgaaactctttacgaggagtctctctttacttttctctctctctcaaagaaagaaagaaaagcctcttttaattttctccggccagaggtatttaatagcttccgttttctttttctcttcttatggctgtgatttgatttactccttgggtctctctcgatccctccgatgatgttctgtcgttttgcggtttttgtggtcgtgatcagaaatttctggtcgcgtttgaatttgtttttcttttctttggcgataattatcgaattgcaatcgaattgatctgtttcgtcgtttgaaatctcctgatgaatcgaatgtttatgcgttgatccgatgattgagaacccctagaactgtttccgataagttaatagtttcaatttattttatcaataaattaaaaaaaaattgtctctttcttgtttgattatcatctgctgagaatgtagttttcagtgggattatgttcatgctcgaataccgtacaatatagactgatttgagctcgtccttgttctgtttccttgatctttgtttaacatttgggttgtatctattcggatgtaatggattatggattctttggctttcatattcatctgtgttattttgttgtgtgaattaacactcgtttctattgatttcagtgtgtgggatgcacaaggaaagagggaaaatgccggtttctagcaacagaaatagagtatcgccatacccgcttcgctcttgcaggaacaagaaacaaaaagaagtcgaggcgtcgtcgtcacctgttgagttagagagtgttagtgaatgggaggatgtgaggtgtgtgatttgtatggagcctcctcacaatgctgtcctcttgcaatgctcttctttctccaaaggatgtcgtgcttacatgtgtgatacaagcgctcgtcactccaattgtttcaagcagtaccgcagaagcaacagctcaagccgttgtagtggcaagactctacattgtccctactgcagaggagaggttcaggggactatgaagtcgacttgtgctcggagattcatgaatgctagaccgaggtgttgtactgttgacaagtgcgatttctcagggacctatgcgcagctgaaaaatcacttgaaaactgagcatcctggttttacaccgccaaagttagacccttgggagcaacacatgtgggagcagttggagagagaggcggagtacattgaaatgctcaacgctcgtcagagatgggatgcagaacagagattgttggcgacttctctccatcagcttccatatcgtcatcccatgattgatctcaactttgatgcgttggtgcataatctgtttcttggtgcgtccatggagagccgtgcaagcaccgacaattacccggctcacataccccgtctggagttccatgcccccatgtatcccagatggacgccatgaagattctgagtgccagagtctatgaggaattcttccaaaagttttgatgtctcttgatttttatcataatgtaatgttcttgtagcgacatcagttcttgttctaggcataaatttaatattgtttgtatgttagcttctgttagtgaagtcttcatagctaggatcatcttttgcctattcaaaaatctctgcttaaatcaaattattcacattcttcgtactttttatggttgcctgcaaactgtttaatttctttgctccattttgtattcagatgttagaaactcatatatcaaaatctcaaaatttgtttaaccgaaaaaggaagatgaaaatttccggtgatacataatgcagaaaacataatcaatgattgtttggaacagaacacaagtagcgaagcgtgtactcattggaagaacacatatctgccagatcctgatgggctctggtgatcgccttctgcaacgatctcagtgcaggcaatagagttctgtagttccgctgaatggagcttccgtgagccttgcagatttcctgcacataaaaagacaacacaaagtttgattaagttgagagcatttgagcagagatttatcaaaaaagagaagaaaacgagacattacctgacaccagtgaagtatgaactccagatgaggacagttctcaagcagatccaccaaagcttccataagcctttctaagtatttctggcggacagagatggcaacagcttttatgtctgcaggggctacagcgaagatgcattttttgataaggctatcttcgttcaaacgcatacttagagcaagtgctctgctaacttcatcctcttctatggcagcctcaacagcctacacaaacaacaccttagctttacatttcaaaaccaataatcagaactataaccaccatcagcgatttacaaaaggctcacctctggagtaacatctatatctagatcggtcggatcaaagatgaaggtatcgtcaattgaaaagatgaggactccttctgttgttgcagcagcaaagctccttccagttggggcaatgctgaggctttttgtccggataatgggcctgccacggttaggcctggatccaggcagatcgtaacccagattccctctcgactgtttatcaatgccaccttcttcatcgctgttgtcatcatcgatcagatcaattggtcctgcttctgtcatcttcttagagtgcaagaagtccagaaccccatctaacgaaagattatgggatatctgaaaccggcgcagaagaacctgaaaaggtgatattccagacactttgactaagtttctttatcagaagaacacaagctttaagaaaacctgaactccaagaggagctagttagctaacctgatctgcgatatcatacatgcaaatatatctgctagttcctgcggctagaatataccctccatcagcggaatagcacaatgttgtaaaacactttccagaacttgaattagctgcagaccgacggtcagtcatgacccgacctccagcgatatctctccgcccctctatggtgtacattaacacaccttcaatggtgtcccagaaattgatctgcccatctagcgtactcgaggctaattgcttcccatcaggacggaaagcaactgttagaacatcgtggttgtgtcgaaacgtttccacggtgcctttgctagcaaacacatcccacaaccgaactgtatagtcccatgaggatgaagctaaaagttgctgcagagaaagaaatatatgaactagataaggcatggaagttataacaccataaggcagaagttcacataattgttcagaggcacgaagcaaattgtattttgactaaaagaagtatgagactatgacagtttctttaccgttaagggagaaaacatcaacccatgaacaggagcctcatgcccactcagaatatcctttatttgcccagtcttcttggaccatacaaaaatctgcacataggcaagcataaagtgattcacctcaccaaagtatttgtgagtaggtgactgaaatccttcagggcctaagttgaattacctcgaatgaatctagggtcccagcacagacgacgtcaccactcgggtctgctgttaaggaaacaaattgtcggggtgtaggggttgtgtatgtcttatagttcttgtatcttttaaaatcccaagcacgaacagtgccgtccagagatgcacttaagagggagtggttgtcagccataaaatgaagagcagtcacggcattggtatgctcggtgaatgtaatgaaacatgttcctgacataacgttccacaccttaaaaatgtaacataataaaaaacgggctggttaaattcagaaatagatgagaagcatggtatagaacataacagttaagtctatgaaatttcattaccttgactttgttatcatcagcaccagttgccaagagctgcgaatccggtgagtaagtgacacagttgacgtcaaaatagtgtccttgttgcttcagtatataggtttcggttcgccaatcccagactaacagttgcccaagtttcgcgcaaccaaaggtcagccaattaccacgctcattgaagacagctgttgttagcttctgcctagaaatagagagcagatggatacagatgaaatctggcatctgataaagcccaaaaacaccatttgagaaccccaccacaaccatgtcaagtccctgatgatagtcgcaagcggtcacctttgctgatgcctgattacacccatccttcctcaacaaaacccattttcctctgtgcatatactcttcatcatcatcatctccttcttcatctgattcaagacctttaccgtcatactcttttcgtttcttaagctcagtaccaacaccaccaccattttccaccatcacctcatcagccctatctggagtaacaggtgacggtggctcagagtggccatcttctgattcatccattttgacatccttttcagtatagccccaactaaaaatgtaaccatcccttgcaatcgtgaaagccctgttgaccttgttagtcattttatcaacaccaaagaagcaacccacaacagaatctctatgacccagaaacaaaaatggcttatttaaaacacccttcaactttctaacacaaaacaacctagcagctaaatcccttgagccaacaagcaaataatcagagtccaagctccactccaaggagacaactttatcatcagaattagcaaaagtcctaacccgctcaaagggcaaaacagctcgcctgaaaccaggtgatcgccatatttccaccaacttaccaattccaacagcgataaacttaccattagggctgaacttcaaggcaccgactttatccttgaaggtaattctgtgaagaactacccgccgaggcaagttgatgaaaaggcatcggttttgttcatcgacggcgagtaggaaagtaccgtcgggtgaggaagcgaggcgacatatgttggtagaggtttcgagcggaagagtgaccgaatggttcttacttaggtcggtgacggagacacgattaccaaccggtgaaattagctgagtattcttagtgatgactgcgttcccgcctctgtaaggagcgccaagaagattctcgaaacggaactccatggcgtctggagaagaatgagaaggcggaggattgatatgccggaggcgataattacggcgttaggtttaacgagggtttctgttatgaactggattttagttgttgggcatatatgggcttcctccttatgtagtcgtagtaagcccaagaggaaaaaaaaattaaggatcaagattcgggatatttgaacccgacgtgaatcgaacacgcaaccttctgatctggagtcagacgcgctaccattgcgccacggatcctttgtactataaagttcatctattatatttctaaacgtttaattaattttatacatgcgaattttgcagagaacatcaaacaaactacagattcgcatctttaccatagaagagaagctatcctttgcttttcttctacacaaaaagttaacaaaatgaattttagtctatggtaaagtgattattgactcatagattgaaattatgaggaacacattgacttttttgaaatttagtaccttttcttggaaggttacgttacatatccgtaacattctcgctgtgttaattctttatcgattttcattgctaagaagactatattgacaaacacacacatcatcttaggtttaagaaccaaaaaaaaaaagaaagccacatacaatctgtgttctacaatactatatagttttgcgtatgatcatgatcatgatcatcacttgaaagaataatctctgattctttttgttgattcactcactcccttgtcgtgctcatgtccccgtctcctgcttttactttctccttgggataaatctgcaggtttttaacagcgatcttgagtctataattcttttcacaaagttaagattcatatcaaggatgcataacaaaacaaaacctggttgcctttgtcttcgttaagattcaatgtacggactttaagctcgcctctgcttgtcgttaactcgtctaaaatctcagcatcgccttcttggacgcctctcttcgagtcattcgactgtaaaacaagtttattttggcattaaattcaacaaattcaaatattttaggtcactgtagatgccttagatgacaagaaaacctccatggtttagtccaaagtccgggatcctcaaaaatgtagatattgctaagatatggactaacccggaaagacagttccagcgggtttctcggagtaccggggatttcctcgtactcagcggcatcgagttctcggagatgggccgggttaaagagcttcgggagaatgtactgtctgatagctattaagaggaagaaaggaaccggaaacatgattccagccaccggaatccacgtcaccccatagcacagcccaaagtagaatatctgcaacagtgtgaacgcagccattgacttgtaaggaactttctccacgaacgacgcgtgtgctccctccaagaccctgaaaacaacaatgcatgatcagtctttgaagagaaatctgaataataataacttgaagaaaaaaaaaacagatcattttcagaacatatacttgaatctccggcttgttggaacgaagagaagcgttaagcgttcgaagaattgatttcccgggaggctgtcgatggccatgtaagcaaagtatccccatagaatggaagtcggtatgagcttaatggccggcatagccaacactgcacctgccacaagcagtgactgcaacaagttgctaactctctgctcgttgactcgaacaggcaagtaagcgtcaaggtgcttctctggatcaaaaccactctcctcgtctccctctctttcttcatcattgctcttcattactgcttctttcagatcttgaagctcaattatcactgatggatctgtctgagcctggtttttaaaagcaagagcttatgattattctaaattaaatcttgatttttctttcaccggaacattgaattatgagtctactacttacaagtggacttttatccatttctatgaagacttcttgcatattctcgtacacttgtgaggatgtttctctcttcctgatgctttctttggctgtctttaccatcttcctccggatcaactgaaaatcaaacaggttcattaagaccagcttaacctgaatagtgagtggatcaacaactgagaagtaattaaacctgtcgtttaagaacagcaaggcttttggtatgcataggagactgagggaggactccatttgaaggaggcagacctagcaatccacatatcaacgtctgaaacaaagacaaagttttagagattttaacatatattttcaatgttgtaaaggtagtttgattgattataccatgaaacccaacaagagaatgtcatagtgatacgctgaaggcttcttgaggttgaactccttctgctgagcgagctgcgaggcaacgctgtggtcaaagaagtaaagccctgcgatcatcaatgcgggtataaatgccgcaaatatgtaacccggagagacttttcccatgtcctgtacagaccaaatccatgtattaaaactttaagtttggctcggatgatgaatcaattatctttagtgtactgtgtttttgtaaccttgatgacagtccaatgtgataaagaaggagagtcccatggtaaaggactaaagagtcttctcgggacaccagaggggagttttgatggtgtactaaaagacaatgctgtccaaaccacaaccatcaaaggaactccatagtctgcgatgaagcttctgtaccatccttttcaagaaaccagaaacttttagaccgatcatacacagaaatgaccaccaaagcatgagaaggttcatctatcttacctgttccgtatcgccaagaccttgcttttcgactcttcaaagcggtgtagagaaggccaaaggtgaaaatgaggccgagaagtccgtttgtatagagccactcaaacttatacttttctagttttgagtcctcatcttttggcatcccaaactcactcaccatacccttaatggcttgttgaatgaacagaacggagatcaacataccaaacagctcaccagcaaccctcgtaaaccggttaatgatatcagccgtattgaggattgccattacgaacagtaacagagccgtccacacacaaacccttccaatttaacaaccaaacaaaaccataaagaaaaaccacaactttacataaaaaagaagaagaggagaagagtcttgtggagtaattaccaagcagcccaagctaagtagagttgtttgcctaattctggtcttcctatagcgaagttgtacaagtaaacgtacattaagacagttggttctgcaactccaagtatcaacagtggttgtcctcccaatattgagtgtattactccacataacgctgttgatgctaacgtttctactgtgctcaacgctccctctataatctcctcaaaatttaattcaaaacaaattcaaatttgtttttttctcttcaaatcagagaatgcaaaactaaaacccctcccaaaaaaaaaaccagaccaaacgtggataacttgaatacttttgttccactaaataaacgtgaacacaaaaccgtaaagaaagcaaagaaagatgacaactttgagagagataagctcaaagaaaaagacctgtgtcgcggctgagttgctccccaaaggcgataaccggaagagcggaagcgaaaaaaatatatgttgtgggtgctaaaatcctgcaaaacctctcaaaatatcaaaactttgttctatgtttgtgtcagatagtgattatgtaagagtgaaaccagtatttaagtacccgaaaccagaacggagaccagcgacccagtcttccttgtaacacaaggctcttcctctaagatctgctactatacctctgaatagcctcttcgagctatccactctttcttcctccatatccagaatccctcaaagactccagaactcgtcgcctctggtctactctttatatgacctaaaccacaaaaacaggaagctatatattatgtatgacatctagcaatgactttaaatctagcattttgctgactacatttaatacaaaataatcttcatattatatttttctaaatttgtgacgattccagtctttttccacctctcaatagaaaaagaagcttatagctgttttatcttttgttacttactagtaatgtcaattttctatgcttttatatgaataagaaaacgcaatgtgcccaactcaaatagagaaacatcacaaagcacataaaacaaagcaaaacgtaatgcaaaatttcttcttatgacaaagatctaagtctcctcgtctcctctctcataaagtgaaatttgaaattgcatatgcacccaaaaaaaaaaaaaaaaaaaaagaatccaactttttcaataaaatccattaattaatatccgtcgtatattgaatctacacctttttcatagttttgacaacgaaattagcagtaacaaatcctttcacatctcacaaaaacataatcagacaaaagaaaggattaaacaaaatcagacaaaggagttaacatgcaataactcggaaatttgaggcgtaaggaggagcaaactaccggcgacgaaagagaaaaggagaatagccggagccgagaagtaactgtgtagcgatttatagggtttaggaagatttataggccaaagacgaggcaacgttagcaaatggagagacagggcccatttatacacgtattatgttgggcctacatccacatgtcagtaatcgagtgggtgattctgacatctgtgatcttgacgctttaacactctgtctgttcttttcgtataagaaagtgacatatatatagagaggaacaattcatctaaattaaataatttattattgaaaattttaacttaatatagtttttttgtataatgttgtttcctttagtcttcattttttcttaagttatttccattttaaaaaacataccaatatgttatattctttgcttaaattgctttaacctgtatctagaaaatgtaatcttccatattgttaatttcataaataaaataaatttttttgcaagttattggaaaacgaagttaaaaattaatgctgcaccaagtttgtgaaattttaaaattacttgtagttggagtgggtgtagatgtttatgtgtagaaataggcatgcacacacaatttaatatagtcctagttacttatacaaaaaattcactgctgacgtgatcagtaatgcactcatatatgcatatatcactccacgtcaatggcacttgcccgtgcaaatgcctttattgtgccagaatcttcgaccggtcaaattgcgtgtgtgtgtatatatcgaaatatatgttatcaaaagagtttgaactttgaacccatatctaatacctgagtaaagttttagcattctattcaaagataacatgtagtacatactaaacaaactatatgtatcggttgttatcaggaataataagaattgtataatgcaatatataattaagtggtacttatgattaatacatacacatggatggtagatcgggatttgaaaaaccaattaaaatctagctttgaaaaggactcgagattctaaacgccgtaccaagaaagttcagattattatttcatgatgaatcattgagtcaaacacttaagcatcatatttttaatttcatagtttatacgttatccacatatataatattaattccgtcgacgacagtatttatatcagaattaggacaaactacatgtatatatttagtcaatcttgaaatttaaaaaaatgcctttgctaagaataaaaattatggttaggtgaagttctcacgtaaaactattcaatcctcacgcgattgaggagtgactgaccaaagtttatttctataggggcaatttaataactattgtaaactttcaacgtaaaaattaattactttgaagttatggggcaatatcatcaatagtaataaatataagcccttactcgtaaaatacaaaaggtttatttgttttctgaattgagagcgtgtaactactaccatcgtcgtctccgcgagttcttctctgcgtttaagccatagataacaaaccaaactaaaaaaaaaaagtttctccttttatcattccttctcttcccttgtataggtgtgatcctcttcaaggggatttctctggcgggtcatacattcgcaccgatcaaagtcggattggtctttcttaacgcaatcttgacccgattcaaaaaatttctggtatcctttttaagaaatgaaattaattgattccttgtcttccaaacgagtaaatcgactaattgattagattttgttcattagggtttgttagtgaatagataagaagataaatgggagctccgttagtgtgccacgggcattctcgtcccgtcgtcgatgtggcttatagtccggtgactccagatgggttctttctcattagcgccagcaaaggtatgatcttcgatcgatttgtatttgactatctatgatctttacttggaactgtgcctattttggattatgatttgcatagcgaatgtgctttgacgaatttgattttgctgccttttattatatatcgtctgaagtttgatttgtggctgatctaatggagaaattaggatgataagttgcatacattgttgaactctagctgaggtttctttgacttttgatatttcagattcgaatccgatgttgaggaatggagagactggtgactggattgggacttttgaaggacataagggagcagtttggagttgcagccttgataaaaatgctattcgtgctgcctcagcttctgctgatttcactgcgtatgttcttcttctttcttgttgcgttttcaagtcttttactttaccatttagtcttgcaatttcagtatcctccggtgatgggttgtttgcttaaagttataagttatggggaaactatgttcctagagaaaaatggttaagtgagaatagattaatgggatttaacactatttctttgttttcatgacacatttcaggaaaatatggaatgcattgacaggagatgaattgcactcctttgaacacaagcacattgttcgtgcatgtgccttttctgaggtaaactgtagtttcttcccaagcaaagagtgatttgatcctgttgccaagttttctggtttaaggatataatggtgggattcactaagattacttgtagcatttgagggtctataatcgttggtgtcatttgtgttactattgtggtcttaatgcataactatttatattctaggacactcaccgtttactcactggtggaatggagaaaatacttcggatattcgatttgaatcggccagacgcacctccaaaagaagtcgggaattcccctggttcaattagaactgtcgaatggcttcatagtgataatacaatcttaagctcttgcacagataccggtgacattaggtatgccaccacgtcgttccttgggtttagactcagtcctttagtattcctggtttcattgttcttttgtgtatgtcctctgtaggttatgggacataagaagtgacaagattgttcatacattagaaacaaagtccccagttactagtgctgaagtaagtcaggatgggcgatacatcactactgctgatggatctagtgttaagttttgggacgctaaaaagtaagttaaaaatatagaaatgcatcctcagttacagttttatcgtttttctttgatggttgagctttttctcctgctctcctagttttggattgctgaagagctatgacatgccttgcaatgttgaatcggcatcgttggaaccgaaacacggtaacactttcattgctggaggagaagatatgtgggtgcacaggtttgatttccagactggagaagagattggtaagtttcttttaaaaaagaatgaagttttcattttaggaacctgtgtgtatcctttaaagccaatgtggtgaatgtagggtgtaacaagggtcatcacgggccagtgcactgcgtgaggtatgcgccaggaggggagtcatacacctcaggctcagaagacggaacggtcagaatatgggtggtgggttcggtaaaccatcctgaggagagcaatctaagcggccacgtgaagcttgtggcagaggaggttgtgcgtaaagctgaaagtctccgtatcagtgagaaagccgcagaagctaaatgaaacaccatcgttagcttatgatatcacatagattcatagttgtttttgcatcattataagatgtgacaaaggggttttgccttttaaaagtctctcagaccgaataaaacgaaataatcttcaactatacttgagtgaatagtgaatctaatccaaattttgacaagaaactttacaacggtatcaaaaatatctttaaacaactgtatgtcataaatagttgcaagttttgaaagcccagttgaaactagaggggcccagaaattaagcaaacatcaaatagtcaaatacaaagaaagtgtgaaagttaaaaccctaaacccttaatttgagctctctgctctcctggttttagttttcctctatttcgtgctcaattcgcttgttctccagttccactctgtaaggatctgttacttttctgtaatcctctcaaaattcaatgcttttgcttactgggtctgatctttgcaagtgaaatgcatgacatttcgtccaaaatcagaccttgcaaaaatggtttcttttttacctaatctgtttcgtctgtgtgttttgatctttacaaaagcagatcagtgccggcggcgatattgtccgaggataaaacatgtttgctctttccaaggttttgcggaggttggtttcctcgattatacacttgttataccatttgattctttatttacttttttcatttgtcttctctatcccaaaattggatataattaacagttctctagcatcatgcgagattgaaatgcttcagtctcacagctttctattattaataattttttcagaagtcagagtctccgcctaggagcttgcaatgctgtctactctaagctagatataccattgggagaaagaaacattgctattgaatcaaacgctttgattcatgataaacacgaagctttgcctagattttatgagctctcttggtcttcctctaccggaagacgttcactttcctcggacgctggagctaaaactaccggagatgacgatgacctcgaagacaagaatgtagaccttgcaactccagacgagactagtagtgatagtgaagatggtgaggagttttccggtgatgaaggggatattgaaggagcagagctggaactacatgtcccggaaagcaagagaccatcggagatgtttaaggccattgtttctgtctcaggtctgtctgtagggagtgctcttgataagtgggttgaacaaggaaaggataccaaccgtaaagagtttgaaagtgcgatgctacaactccgtaaacgtcggatgtttgggagagcattgcaggtactgagtactctttgtttcaacttgagctgaatattaatgtccatcaattagttcagtatcaaagaatgttgcttggttctcagtaatgctttctgttttgtctccagactttctgttctctaagtgttttctctcgtttctgcgatgtcttgttgttggtatagatgacagaatggttagacgaaaataagcagtttgaaatggaggagagagattatgcttgtcggcttgatctgatttccaaggtacgtggctggtacaagggagaagcttatatcaaaacaatcccggaatctttcagaggggaattggtctaccgaaccctcctggcgaatcatgtggcaactagcaatgtgagaacagctgaagcagttttcaacaaaatgaaggacttgggattccctctgtcaacattcacctgtaatcagatgcttattctttacaaaagggtcgacaagaagaaaatagccgatgtgttattgctgttggagaaggaaaatctgaagccgaatcttaacacatacaaaatcctgattgataccaaaggatcatcaaatgacataactgggatggaacaaattgtggagacaatgaaaagtgaaggtgttgagcttgaccttcgtgcacgagctctcattgcaagacactatgcatcagctgggcttaaagagaaggctgagaaagtgctgaaagagatggaaggtgaaagcttggaggaaaatcggcatatgtgcaaggatttgctttccgtctatggctatctccagagggaggatgaagtgcgcagagtttggaagatctgtgaagaaaacccccgttataacgaggtccttgctgcaatcttggcttttggaaagatcgataaagtcaaagatgcagaggcggtttttgagaaggtgttgaagatgtcccatagagtttcttctaatgtttactccgttctcttgagggtttacgtggatcacaagatggtctcagagggtaaggatcttgttaagcagatgtcagacagcgggtgcaatattggggccttaacatgggatgcagtgatcaagctctatgtggaagccggggaagtagaaaaggctgagtcttcactgagcaaggcaatacagtcgaaacagattaaaccgttgatgagctccttcatgtacttaatgcacgagtatgtgagaaggggtgatgttcataacacagagaaaatcttccagaggatgaagcaagctggctatcaatctcgcttctgggcgtaccaaacccttatccaagcttatgtcaatgccaaagctccagcttatggaatgaaggaaagaatgaaagctgataacatcttcccaaataaaagattagctgctcaactcgctaaagccgatcccttcaagaagacccctctctcggatctccttgattgagttgcgttacagctacaacatcatccgccttgtgaatctttggtttgattgatcaaccttttatccatgttggtagaaacttcagtagcttagtttaaaaaagacctcctgatatataaattctgtttggttgctgctatctggtttttatttagtcccgttcttccggcttaatataatgacaatggtggtgagcaaacgaaagcaatttacttcgtattccaaaccggataaatttacagagacttgcacgattctgtgccacactcatcttcaagtgtttaataaataaaatcaccctcgaatcatacaaaacacaagagaagggaaaggttacaacactcattagatgaatttacctagcagggcctcaaatttttgggcgacactaatcgattgtaagctaagaagacgacaagaaaaacaagtgatctggctattgactctggagatctggcctaattacaagtctagtgatgaacggggacatggctgcaagaagcgccttgggacactcctcatgtggtaaatgcccacatcctgagattgctactagtctctgttgatgacacgaatgaatgtcagttgctatcttgacatgaaaacaaaccgtagctgggataagagagcttgagtttgaaagagggacttacagagttaaggagtttagaagccattccttgggaggacttcaatggcacaagggcgtcttcggccccagcaatgactagcactggcaggttttcaacagccttcagaagcgaagctgcattttgaggtgcaagcaccatctcagatgaaagtctacctatctcatgaagtgcctcatcccagccttctacgtgtaatggggcctgacaaggaggaaaacacattatttgatacatgtctaccaaattgcaaatctttgtttgatgtagggtaccttgtatagccgtaggacgtctgtagtcatcttggcaggatcataccaagcacggcgattcaccacctgagctatctcagtgcgtaaaagagggcgaacgaggtgcttcttccctagtgatgtgtgcagaagtattcttgcaaaagctggaactacttcccttgataagctagtattaagcaagacaactcctttgaccacgacctagaaatatcagtaccaactaggtttagaaaggaaaatatataagcctggacaatatacatctgattacaagtctactcactttgatgggatcgtttgttgccatcaatctttgtgcagctttgagagcaagtagacctccgtcatcatgaccaacaaatactactgaagagaaccccatctcataacagaaagcaataagcatctctacctggaagatccaggcattatttttgtcaaagaaagcacaaatcccccattgaggtttaatatcaataatgaggagacaactacctgattttcgagtgaataaggattgagcagctgtctttcttccaaatcattcttatgtggcctggccgttaatccccaaccaggcctatcaaatgcagtgacaacacaaccaagctgctgagccagtgaacccatcacatgcctccaagaaaacactcctcctccaaatccatgaaccaggaccacaccaaactgaccactttcacccaagtcttgctcctcagctccaaaattgaatacattcatgtcatccactagtcccgttccttccttaatctctttgaaaagaagaggagaagtaggagaaccatccagaagagggtcgtgcaaggaagaattgttaaacaaactgttgtagctcctgtggtgatgatgatgctggcttttggtgaccatactcaacacttttctgtcaaacttcgaccttcctgccattatctctggcgtattgtaactagaattggcttcgagaacatttgaggagatagactgccgaggtgaaccaggtgaacaaagcttgtaatgcacagtgaggcctcggattgtaacgaataaactgtcaacatcagcaagcaatctcactggaagctctccttcatcgtgggacaaaggctttcgccttgcttctccatcaaacttggaggcctttccaaccacaggagtgggtgaccgcgggactttctggtggccagagaagatgcttttgcatgaaagaacctgccacacacagtccatttaaacaaaaaaaaaacaaagcaaatgacttctattaatgagattcacgtgaaagaaagaacaaaaactcacagcttcagggtcaactcggtgatacaaaattttcctcctcgctctgcaacttgtcctgtatgctacaaccgtatgaccaagggcaaaaaccacagatgagaggaacaaaaccggcatcccccacgacttcttcaggtggagccgtttcctagatggagagaacgaggcttcgttgttgagttgagaattaacagtgaaaaggcaagctttaactgaaagaagaagaaccgaaaccacagaacacagagatacagttccaaggtaaggaccgtgcgagagagcaggaacgtccgagagtaaatagatacctattccacaaaatgtacaactaatgatcattaaaagagcagacttgatcatcaatcatagctatctgcgagagctaactcaaccaacagagctttgaacagtaacagccaaagaccaaaactttactatgacaaattcataaagatcaaacagtttcctaaacaagagcaagaaaaaagcaacgatatgaccttacagatgacaaggaaagatctgacaacagagacgataggaatatcagtcaaagatctcttgaaaccgtatcgcctcagatgctccttggcgccgtaacacgtcacacaagtaaagctcgacaacaagaagctgggaaccaacacatcacctatagctactaacaatggcaacgaggaaactagcagcgaagccaacatagcaaccatgaagaacaccgtcctcaaacatcttctcgccttctcaaccaaaaaccaactttttgccatcctctccgcttcaatcgggtcaaaccccaatcggacggctctaactcctcctcaccaattcaaattttacaatgtgtctacaaaaagggctctgagattaaccaaatcagatcctttctatgccggagttgaaacactagatagaagaaacagagacgtccaacaatccaacgaatccgggttattaattggaggtaaaagtaatggttttgccatctgccgacgacagatcggcggtgacaacgatgataaatactagtctctcttttttcacaaacgggaagaaaaaaagaaagaaggatcaaagctcacaagccaatgctacgattctgacaaagagattgaagaagagtgatattcagaatcgcaggaaagacgaaatagagaaaaacaaaatgaactttttggttttctctccagaaacaaaaacttccgttttcttctgttcttttttttgtttgtttgctttcttcaaccattcttttttaattacattaatattgcacgtcgtgttattttattttaactttatgttttaaaaaaacatataaggaagtaagtactactcctcagtgttttaagaattactatattagttgactaaatataatttactcaattaaacatgcatttaatttgttcagtctcgtaatagacagtgattagtgattactgtattttaatttctcttgtttacgaattcataaagaaaagaaattagtagtacacattacacaacaacaaaacgtaatatagaaaaacttgacaacttggtctgactctgagccgtctctgctcggtctgctgtcaaaatcttttctttggacaattctaccccttgttttaagtgtattaaacattatatattcgaggccgaaagagttttcgcactttattcaaattgactaattgagcatgaaatacagcattaagaaattagttatttgtaattaacgaaactttgacctcactttttattctccacattgtatgatagatagatccattcattgaccattgttcatcgtgatgccaaaaaaaaaaaaaaaaaaaacattcattgtccactttagttaagctggtaataaagcgagtatagaaaataataccgcaaatatccgaatatattacctaatttcctaatataagacatgtatatataagtcgacggaaaagacggtaataattaatatttccatttaggacctaatgccatctcattttcatttccaaccgtaaatatttttaatgtgaaaacggtaaattttggtgcaagataagtaactttactaatactgttgatttgtattttgtagttgtagttaacaaaggaaattcggggaataaagaaacatagtaagggcacaacaaaaattttatctattaataaccacatggtcccaaaaagccataataaagtcgtatgatgacatgtttacacgaccatcgttagaaaattaatacatattacggatatcaaaatcacacccaattttcaaatctctttatctaattatctaaactgttccgtttttagagggacccaacaacaagccaaagcaaaaactttctggtaattgaatgtatattgtatcatttcgccaacaatttgtttgaaaatggatgatttcgccaacatagtttttggaagaatctgaagttttggaaccctatttataaattatataagtccattaaataaaagtatgggccgcgaaggaaaacgttatgggcttcgtattgggtttataatagaaagcccaatatgttaaaatttatgaaggaggctgggcttcacgtgagttattactactagacctctgtattcttctgaatctgacatatcgctgattttaatgcgacgtggagctttataagacgcaattcatcaaaatgaatgagccccactattttgttgttgttttggagtttttctgattgagggaaaagatgaaggggatcttcacagtcccccaacaacactccattggagccatttcccaagttggtaacacgtttatcaaagccctccctcgttttcatcaacaacttatcgattcatttgctttgtagatctctctttgtttcctgagctgagtttacttaggactaatcttcttcttcttttttttaaaagaaataaatgcatggcaagattgaaaatcaaattaaaattcagtaatcactatgctaaactaataccccatcaatttataatagaaaatcaaattttgatacgttaccggtggattttagatatactcatactaattaattactaggatttcgaaaatgactagacatcttcttgccatatttgctaagtatgattgaaatcaaactgatttaaagttagtaatacatatatatgctcatgattttcttgttttttggggtcaacatacatttctgcaaatcaaatatgctggtttaagtctactaaacacaaaagttctcatatattaatatattttcttttgtctcaataattctagtaaataaagtagaggaagagaatgatgcacgccagtagagatttttattcatataaaatcgttgtctttagaggaataatacatgccttaattctcaacaaaaatacatttataatgaggaaagtttactcaagttgcataatatatcaaagtacccaatgcacgaattctaatctttttttaatactaatcattaagtccattttgacgaaatatgtgaacgtcattacaaaaatcttcagaatattcagaccaattcaattttattaattacaaggattatcagcttcgaacataattagacggtaagagccgccctgttagggttttttgtcctcaatgccaaaatcctcccattgcagatattatatcactcccactgtctaataaacaactctcttctcctctctacccagagcgagtcaccttatcgtctctctatctcctccttcctatatccccttgctctctgggtttttgctcagtgtgctacgtgagagatagagagatggaaggtctgattcaaaccagaggaattctctctttacccgcgaagcccatcggagtgagaaggcttctccaaccctcacatggcttaaagcaaagacttttcaccacaaacttacctgccttgtccttatcctctaatggtcacaagaaatttcaagcctttcagcaaatcccacttgggatttcggtttcccacaaggagagaagcagaggattcatctgcaaggcggaagctgcggcggccggaggcggaaatgtgttcgacgaaggagacacagcggcgatggcggtgtcgcctaagattttcggtgtggaggttacgactctgaagaagattgttcctttagggctaatgttcttttgcatccttttcaattacacaatccttagggacacgaaggatgttttggtggtgacggctaaaggaagttctgctgagattataccctttttgaagacatgggtgaatcttccgatggctattgggtttatgttgctatacaccaaactttccaatgttctctccaaaaaggctctcttttacactgttattgttcctttcattgtctactttggagcctttggtttcgtgatgtaccctctcagcaatttgattcatcctgaagctcttgctgataagcttcttgcaacactcggccccagattcatgggtcctctcgcaatcatgaggatttggagtttctgtttgttctatgtcatggctgagctttggggtagtgttgtcgtttcagttctcttctggggatttgccaaccaggtaattgtgattacactcttcgttttctgctactgctagtcatagactcatgttaagtttgatagccttgaagatttggaacccttttgagtcagtatctttgctatttgtgaattaaacttgcatgcaatcttttggtggcagattacaactgttgacgaagccaaaaagttctatcctctgtttggacttggggccaatgttgcacttatcttctcaggaagaactgtgaaatatttctctaatatgagaaagaatcttggtcctggagttgatggctgggctgtttcattaaaagctatgatgagtattgtcgtggggatgggtctcgccatctgtttcctctactggtgggtgaatagatatgtgcccctcccaacccgtagcaagaagaagaaggtaataaactggctgaacatatgaaatactaatggttttatgtaattaaacatgcagcttatgagggttcttctgatttgttacaggtgaaaccacagatgggaacaatggagagcttgaagttcttggtgtcatcaccatacattagggatcttgctactttggtggttgcatatggaattagtatcaaccttgttgaagtcacatggaaatcaaagcttaaagctcaggttaacaaaacccccattgaaaattactacttactactcctactactacacttttcatctaagaacctaaaaatcctttctttgaatgcagttccctagcccgaacgaatactcagcatttatgggcgacttctcaacctgcacaggtattgcaacattcacaatgatgcttctaagccaatacgtgtttaagaagtatggttggggagtagctgcaaagatcacaccaaccgttctgctattgaccggtgttgccttcttctctctgatactgtttggtggcccattcgcaccattggttgccaagcttggtatgacaccgctactcgcagcagtgtacgttggtgccctccagaatatcttcagcaagagtgccaagtacagcttgttcgatccttgcaaagaaatggcttatatcccattggatgaggacaccaaggttcctctctatttctctttaagaaagttgcattctttgcaatcttaggttcttactagctgcggtttgtaccattgttttgcaggttaaaggcaaagctgcaattgatgtggtctgcaacccattggggaaatcaggcggtgctctaatccagcagttcatgatccttacattcggctcactcgccaattccacaccttaccttggagtcatcctgctcggtatagtcactgcatggttagcagcagctaaatcgctggagggacagtttaacactctcatgtctgaggaagagcttgagagggaaatggagagagcttcatcagtcaagattcctgttgtatctcaggaggatgcgccatcaggagaaactacgagccaactatcggagaaatctactcctactggcatttagacgatgatgaataaaagggttttgggatttggttacctgttggttttaatgttttggtcaggagtaatattttgatagtgagaagactaaaattaatcatttagttatatgtttttttggttgttattgttctcttgatgataccaataccaaactagtaataaaatttccaagttcagtaatcttatcaatcctctcctctctgtgttgattaaactcagtaatataacataagaatcatcattgagattttaaccaactttgggagacactgcaattaaggccaaaacgacgtagttttttgaagttgaagatgatccgttagttaagaagaaatttgtcgactttatcttctcgccttaaaaccccaaatgtaaaacctctacgagagtgaccatgttctttgctctgtctctcctacgatggcgtcttctgctcaaagtcctcatttttatctcaatccaggcaagtccaactcttttcagagcaaagcttataaacagagaaacgttaatttctattggaattttggaattcggagacttttcttgagaaaatctcaaggactatctgttcttagctcgagttcgagtagtacccacttttcgaattctcagttacatggactctgcgcgaatgggaagctggaggaagctatgaagcttctcaattctatgcaggagttgcgggttgcggtagacgaagatgtgtttgtggctttggttaggctgtgcgagtggaagagagcacaggaggaaggttctaaggtttattctattgctctcagttccatgagcagtcttggtgttgaactcggtaacgcgtttctcgctatgtttgtgaggtttggtaatttggttgatgcctggtatgtttttggtaaaatgtctgagagaaacttgttttcttggaatgtgttggttggtggctatgcaaagcaaggctatttcgatgaggctatgtgtttgtatcatagaatgttgtgggttggtggtgtgaagcctgatgtctatacgttcccctgtgtgttgagaacctgtggaggtatacctgatctagctcgaggaaaagaggttcatgttcatgtggttcgatacggatatgaattggatattgatgtggttaacgctttgattactatgtatgtgaagtgtggtgatgtgaagagcgcgaggttgctttttgatagaatgcctaggagagatataatctcatggaacgcaatgatctcagggtattttgagaatgggatgtgtcatgaaggattggagttattctttgcaatgcgtgggctttccgttgatcctgatttgatgaccttgactagtgttatctctgcctgtgagcttcttggagatagaaggttaggaagggatattcatgcgtatgtgataaccacgggtttcgctgttgacatatctgtctgcaactctttaacgcagatgtacttaaatgctgggtcatggcgtgaagctgaaaaactgttcagcagaatggagcgcaaagacattgtgtcatggaccactatgatttcaggctatgaatataattttctgcccgataaggccatagacacttacagaatgatggatcaagattctgtgaagccagacgagataacagtagctgctgttctatctgcttgtgctactctaggtgatcttgacactggtgttgagctccataagcttgcgattaaggcaaggctcatatcctatgtgattgtcgcaaacaatctcattaatatgtactcaaagtgcaaatgcattgataaggccttggatatcttccataacatcccccgcaagaatgtaatatcttggacatcgattattgcagggcttcgactcaacaaccggtgttttgaggccttgatattcctccggcaaatgaaaatgacgttgcagccaaatgcaataaccttaacagctgcattagcagcttgtgctagaatcggggctctgatgtgtgggaaagagattcatgcccatgtactgagaacaggagtggggcttgatgattttcttccaaatgcactcttagacatgtatgtacggtgcgggagaatgaacactgcttggagtcagttcaactcacagaaaaaagatgtcacatcatggaacattcttcttactggatattcagagcggggtcaagggtcgatggtggtagagttatttgatagaatggttaagtccagagtaaggccagatgagattacattcatctcattgttatgtggttgtagcaaatcccaaatggtgagacaaggtttgatgtactttagcaaaatggaggattatggtgttaccccaaacttgaagcactatgcgtgcgtggttgatttgctaggccgtgcaggcgagttacaagaagcacacaagtttattcagaaaatgccagtaacaccagatccagccgtatggggagctttgcttaatgcatgcaggattcaccacaaaattgatcttggtgagctatcagcgcaacatatatttgagctggacaagaaaagtgttggctattacattctgttatgtaatctgtatgctgattgtggaaaatggagagaagttgcaaaagtgagaagaatgatgaaagaaaacgggctaacagttgatgcaggatgcagttgggttgaagtaaagggtaaagttcacgcctttcttagcgatgacaagtaccatcctcaaacaaaagagatcaacactgttttagaggggttctatgagaaaatgagtgaagttgggcttactaaaatttcagaatcgagttctatggatgagacagagatttcgagagatgagatattctgtggacatagcgagagaaaggccattgcatttggtctgatcaacacggtcccaggaatgccaatttgggtaacaaagaatctcagtatgtgtgaaaattgccatgatacagtaaagttcatctccaaaacagtaagaagagaaatctcagtaagagatgctgagcatttccaccactttaaagatggagaatgttcatgtggagattagaatggatacaaaaggaatatagacacatcaaggtattgttaagtttattacacaggaaacttggattatatgtggctttgttttgtctgtaacgtttatcatacaataggagttgctctgtatgtaacatcattagctagaggattcattctaatccagtgttgttgatcatccttttattaatatcaatacggcattacaaaaatagaaagaatagcatataaacaaaaagtctctttttatttgtgttacatgaaatagaatgcaaaactataaactgtctatcgtttttggaaattgaaactcttgattccgatagcaaagataacggcaaagagcaaaggaaagatgacgttcatggcggcaaccacacccaagaaaccttctctatatccatagaattctctaatgaattgcttcacactcatattactatctgccataggttctgtaatatcaccgaactgtgatgcgattaatccatacaatgtccatgcaactgggcaaagccagtagtaccattcccaccacacaggcatactctgttttcgtataaacgtttagggtcaatatttaatatttcaataagttttggctcattttgaaattaaacaataataaggttggtacttacgggacgagggatgaggaagccggagaagagattccagatgccgtagaaagcggaggagacgacggaggcgatgtggtggttaggcgtcatagctacagccatcattccgtagaaggtgaaagttaagaatgatccgtacataaagaagaggtaccagaagaacttcaccgccgtccactcgaatcctatcatagcgtacactatgagaccgtacactatcgcttgcacgagaacgtatgggatctcgatgaaaacctggaacaaatcgaagtttgaatttgaggtttccgcaacgaaaaatcgtaaatttcactctctatgatgtttttttgaagtacctgagcgaaagcataaggcatggcggagtacattccggcggcttgttctcggtaaaagacagttctttcgacgttgacgactggttgcactgaagctgcgttttgtaatccgaggaagagaacagctgtgtacattgaacccattgcattcgataaatcctgtctcgttttcctggaggtgacaaaaatattcgaacttggtcaataaggagttttgtttttgtattgtaaagtctagaattttgctgaggtttttttagcttacgttttgcctccaaggtcccagaacattgtgccgaacataagagcaatgccgattgtgaagaggaatctcacggctgtgtaaggaggatttctccagtaggaccagtgttgtttccatagagaagccatacattgtgtcaagaacgattgagagtattgtgttgggaaatataaatcttttgatcctggagctggctggcttagctccttgattagctccttgtttctcctaaataagagaaaagttattggcgagatcagattctgctgtataatatgtgaattaacctcaacatgatgactgatgtacttacttgtaaagttctgaatttttgtagacttgggcgaaatcgactcctaaagccgcttcttgagatgtggttgagacttcaagcatccaggttgctgggttgtatccttctgtgatcttgttgattccttgaatactctgttgccgagtcaacatattcagtccatgtcttccaaacaagttttaagtatggtgtgtttgtcttagtcgtatttattacctcaaaatagttgatcaaatgggttgattcgtggccaagaggtccaacgtatatctcctcacctccacgcttaagtaggaacaactgcatatatacgcatacccaagcatgttaacaaatgattaaagttctttttcacttttttgttttgaatgtagtttgaatacctcatcaaaggcttcaaagatgtcgatgctaggctggtgaatggtgcagacgactgttctaccagtgtcaactgtgttccttacagtcctcataacgatggcagcagctcgtgcatccaatcctgaagtaggttcatccatgaatatgatggaaggatttgcaaccagctccaccgcaatggtcagtctctttctttgctctgttgacaaaccgctctcaccaggtagtccaaccagtgcttgcctcagcggcgttaactccaccagctccatcacttcctctatgaatatctgtaccaaacaaaacaaaaattgttagtatagtttcgatttcctcattttacttctggaaatgataatgtctctgaataacctttctcttgtttttatcaacttctttaggtaatcggagccaggctgagtaaaccaaggactcgtaaacagtgacatgtggggaatggatatcagtttgttcacagtatcctgagatacgggcaaatgtttgttgattcttagggtaaccggaaatggtgatgttgccatcaatataaccaccggttttccttccggcaagaacatccatcagagtggttttgccagctccagagacacccatgagagccgtgagcacgcctggcctgaatgcaccattcacacctttcaacaggacaagtctgtcttcttgtgtgccttgctctatcatttcctgtgagaaagaatccacaacaaaaatcagtatgaagtttcttgcattaatgatacgaaatcctcgagcaaggttattacctggggcatgtcaactgagtatacaacattgtcgaaggtaattgaatgtggctcaaatggaagcaccatccctcttttcttattggcaccagcttcaactacaccttctgacctagcagactgaagttctgtctcatcactcgcaggctcttctgcaataacagcttgaggctttcccaaggctgtaggcaaacaaagttcacaaggattttttattttaagaaaacagcttttgtatcagaagatgagaacaagcaaaacggaatgattacgtacagttcagaaacgtcagagccagcgtgaaaccaaaattgaataacacgacgaacccaagtaaggctccagttccaatccagtaccagtatgcatggggtaagaacccacgagacttaaggaaagtaactccaagtgtttcgctcgagttttcgacagcctgtaatacaatcaaccctatcagtcctgtctaaaagaaataccagaaccatggaaaatgatttccgaatctggagtggacagaggagggtgatacttactcgactccagctgtgtccaaagaactcattggctaggatcgcgttctgtccatacattattggggagatccagtaaccccatatccaccacttcttaatgtcgtctgttttgatcaggttaatggataaaattaatcagcttttgatatgagaaactggacgcaaacagatatgcatcaacacatacctcgtgaaagtaccacaccacccaaggcaaagaagacgagcatcgcaaatgcaccaaatgtatttgcaacgatcatgtttcttcccaatgctgccaccatcttaaacaatgctgaagccatttggttcatgagcacgaggagaatatactgcttaaacagcctgcagcaaaccaacaagaaaccaggagaacccttagcagctccttcataagtatccaaatttgtcatgtttagttgtttagtgtatttatgtaccttccaacgttgggatcaaagccgatgacatagtaagtgatgaatgttgtgagagcggcttccatgaagcttataggtatcttgaggagccaaggaggcagagagtacacccatgcagggtagaagaggagatctctttgtttgtaaaacacaggaagttttgctatggtcattgaaagttcagacattccattgaacatgagcatcataaggatgaagaacaaggctccagtgtagagactcccatcaacctcagtcttcttttgcatctccgtccgaaagaacaacgtcattgtcaaaaatgccattaccagcagctgtaaacacaaggaagcaagcacaacatttccatgagtctctcttaaagataaggagatattattgcaagatgtgaagaattggtactatatgcgtaatcacttacttgtccaaacttgaagtagtaaacaaaggagtttcttttcatgagtaagtattctcttgagaagctggtcttgacaagttctttaatcccaactccgtatttcttggtggttagagcagccggatggctctttgtcttgtcaaagggcaaagcaagctcatctccgattctccggccaacgtggaatgattgaaacgcctctgcaaactctctcactctaatgaacctgtaaggctcatcacgtcgtgcccagtactgcatttggtctttctttgatgtcacctgcaagagtagtgatcgttaaagtgtaagacatggaacaaaatcgctcatatgattgtgttcttatgaatcaagtcttacttcttgaaggaaatcagcaacgccttttcttggaggacatttgaatcccatggtctcaaagaactccacaacgtgatcacgagggccctcgtagatgatctcgccttctgcaatgagaatgatatcatcgaagagattgaatgtctctggcgcaggctgaaggagagagatcagagctgtcccattgaagatatgaacatagtttctgagggagttcactatctggtaagtcgttgaactatctaaaccagtcgatatctcatccatgaacagagccctagacggtccaaccagcatttcaccagtagtgacacgcttcttttgtcctccggagatgcctctcaacatatcatcgccgaccatagtgtctgcacagacctcaagtcctaagatctgtaaaaattacaaagagtttagatcatgtcaagtacaagacttgataattctcttataaaagaaaagttggaaggaaactataccttgaggatataatctgtcatcacatttgttttttcacctgctgttgacatcgcctgtaatggagtaatgaagttatgacttagttgtgtactccaaattattacaaagttaactgtttcgggagtgatataactaaccttcatgaatatatcaatatcagggtcaggtttgatgtttgcttctttctctcttcttgccaactctgtcaacatgtctaatgcaccaccaaaacatctatggttagcaaaatcaacataccgaaatcgaatgttttgagaagatagaaaagtcgaggaaatgttcaaactcaccataacgcgaaccaacaccttggaagcgagctgcgtaagcaaaagtctcacgaacagtcatctcaccgatatgaacatcgttttggccgatatatgcagctgttctttgtggcacaaactcgttcattccatgaccattgtatgtcactcttccagtttgctacaaaatcaaagaacaaagtttacaattgattcacacagatcatataaacatatccatgaagttgaaacagagatagagagagggaaagatggttacctttagttcttgatcaagctttcccgccaaggcaagcaagagggtcgttttcccagaacttggaggacccaaaagcagagccatcctgtagaattcaaagatgggtcaacaagtgcaagtataactaaaaatactttccaatattttaaaatggtgaaacagaatctgaaaattcacctgccaggcttgacgattccgctgacgtcgttgagtatagtgaacttcttctttcggttcggaacaagatgcagagtattcaggaacttctgttaatattaacgaaaattccactgttagagatctagtttttgtttggacacaagaaacagataagtaaaaaaaacgcattcttacatcagcaaaattggagatgaaattgacgaacgtaggtaaagctctgcctccaacatgaacctctgcttcaacttttagatgatcaaaccgaacttctattgtcggaagatcgattccaactctgtcattttcataattacatacaattaacacttaagtctccaacatgaacatcaaacaaaaacagagctcctctgttcccattaaaagctaaactaaaaaaaaaaaagagagaagtttgtatacctatcgatacgtttcttgagtttccagaggagtttctcatgctcatcgtcaccgactttgatgagcctctctagcagtttcttagtatcttgaaacccaagcttctgaatatcgatctcgttgatgggtcctccggcatgtgaggcagttaggattcctttcctgagacgatcaaaagtgggaagcttctcaagagcagcccatctcaaagcttcttcatcgtcttcttctctagatgacctcgagaaaatctcccttcctgaatctttcttccacaccgatgagtttcttctcatactattactcgcttggtgaaaactagttccctccattttgtatccaagaaatcaaagtcttcttcttttttttcttctctctttttttgtttgtgtcagatgaaagatttaaagaatttagcaagacaataagactttaacacatgaaaagaaactcaagagagaaattgtagatgaaagatgatatgaatgttgggtttgtgtgctccgtatatatatgcattgaggagatttcactattcataataattaggcacatgcatgtatgtttcttcttcaccaaagtggaaaaatcagagacggaacgtgaccaagaaataaacgttatgtgcttttgaatttacgaataaaggaaaaaaagagaaactattacatcagctaacaaaaaagaactattacgtcagctgtgactcctctgtctgggaaatctagaaggagtcctactgcatcagacgttaattaaaagtaattaattgatcccacactaaagtctaaactatttctctagacagtgtgaactcattcatgattaaaggttttgaatatacagtaatcatgttttttcatgcaacaatcatattggacagtttttcgttgttgtctttgccattttaaatgcaaccacaaaactttaatttggccacaaaaagatctttacaaaacaaaaacactgggtccaaccaccattttacgtttccggattaattatatatatgttccaatgatcaaaatagtgagaaactgattaacttattgtaaaatcaagtgttcaaccaaaacaaaagttggaatgtacaaatagtaacgtgaggagaagaaaacaaacgaatgtaagtattacttctagacgttgacgactctcgttacgtggtctcagcagccccttcttgttcgtagtccgccattatttaattgaattgtatcagccttggactttttatcttcaaaataatattcatattcttctgatttcttaaaactaaacctgcattttaagagagaatatatgtgtgtggtttgaattggttatgtgtaaattaacgtctagagaaatttacactgaatttataaattgacttctcaatgtataaattaagtatactaggtcatgaataaagagagattaaaaaatttaaatggtaaacgtgtgtaaaaaaaacatatacagtacagttgaccgatttatatattcttttatggttatttcttttattagtctgagtcgaagattctaattggaccatgaattgaaagttggtcttcgttaacttcctccaaaaaaaactaacgaaacaaccactttcttggaagttgccatttttaaatattccaattctatcgagaacgtcccaaaccggaatgtagcttaggatgatgaaaccagttattggtaggccaattcattaaataaaacaggtgatttggtacttgttgcgaatcatatttattggtcgtccaacgttctgttccaatctaatttataggtaggtgtgtcaaatggctaccgtttctcttccggtttgattcaatagtgaaaatactactattttattcttatttgactcattaatgggccttgttaatattatcatggtccatagttaaagcatccactgtgagtctaccttctgaaaaagagtaaatgaaactgaaaaacaatgtagtacaaaaatgtctcctacgttatgtacatctgaataggctttcgaataatattaacaggcctatgggcccatagaccaacatgtaaatcaaatttcaactttactattcctcacaagacaaaaaaaaaaaaaaaaaaaaaaaaaaagcaaaaacaactcatgcgtgagcagccgtggagtctgccgcggcggcggccggcgtgagcccagtcaacaaatcctcttgtggtgagccaagcagtagtgaaacgatctctctcatattcggccgcttagctggatcagggtgacaacaagccagacctaacttgagtaacaattcaacttcctccatcgtctcacactcgctccttactctctcgtccgctgcatcaaccactcttcctccaccgtacaaatccctaacccaatccacaagcaccatatcttcctcctccgcgtactctatcggtctcctcccactaacaacctccaacaccaccacaccaaaactatacacatcactcgcctccgtaggcgccgaagcagacgcaagctccggagccaaataccctaacgtgcccaccacgcgagtcgtgtttggagccccaccgtgctcatataacttagctaaaccgaagtccccaagcctcccacgcatctcagaatccaaaagaatgttacttgatttgatatctctatgaatcaccacttgatcccatccatggtggagataattaagcccttccgcaacatcgttaatcacctgacgccttctcctccacggcattggctctttaggattatcaaagatccactgattaagacttccgtttggcatgtaatcgtagacaagcatcagctcgtttttccggcgacaccatcctctcatttgaactagattcttatgctgtaacctacccatactcgagatctccgccataaattctctcaaaccttgcttcgaatcgtgattcacgcatttaacagcaatctcactgttgtttgacaaaattcctctgtaaactttaccaaatcctccagatccaagcagacgatcgttagagaaaacctccgtagctgcagcgagttcttcgtagctgaaacggtgaggccaaaactctaactcccactcctcgatctcttcttcttcttcctctctcattagtttcttccaaatcaaataacccccaaatccgattagagctacgaagacaacacaaccgataacgatcccagcgattgctccagtggaaagagaagaagaagagttttccaggaagaaaacaggtaaattcgtagtgttgatctctcgaagagctcctgtatcactcaagctccaagctagaatccttcgagcttcattccaattggttttggaagcagagaagccagcatacatatctgccgagacataattagcaataacaggatcacggaaagtaagagttggccggcgaggtcgaagcacaccgacgggagcgacggaaacgttgatctgaaagttagggccatcgaaatcgatccaagctcgaacgttgtttccgttacgcatattaaagcgaacgaagcttccattaacagaatcgtagtagccagcggttacggatgtggtggattcaatgttgttaagatcaattccgacgtggttatcgtcgatatcgtttacttcagagtttctaccggtgtcgaattcgacggcgaggagaggagcgttgaatctgactgtggcgttagtgaagagaccgaagtattggctggagatagcatttggaggagaggtggaattggagaggacgaagcagaggccgaagccaggacttgtggatatgtcagggagaatggagaagacgaaggaagttgagaaagatgagagtcgggtcgggtttcgggttggatcgggtataattgtgagtttttgtgggtaaaaaacacggccgaaagagagtggatcggagtcgttgatgaggctgattacggtggattctacgcgggaatcttcgatgaggattacgtcggttctgttagttacggagctgaaggaattgtagagaaaatcaatggcggaagaggaagagacgagatgaagaacgatgaggataaggaggagaggggatggccactgccgtcgccgccattgccacgacatttgtgtagatttttccggtgagaggagaaatgtgaatatctggggaaagggaaaagcataataagaccgtcgaggtttcttcttatctgtaccaaaaattctaccaaatcaataagtgagatagagagagagacggtggtcaacgtcgacggctgaaagtcaaaggtattttttacagttgagaaattacgaaacgtcaaacccagtctcgatcggttcattaattagatttaagacttaaccccgctccgttcaagaataaaataatgggctttgacccaaaattagcccaataatgcactactacggccttatcgatttctttgtttctttttccatgtgtgtattatagggacatgtggattttaaaaattgattcggacaatacgccaaggaaaagcatctataaaaactgagcttttacatgagtttttcgtatgaagcatatttcaatgtgagtataagaacacatcatccgttacacaatggtcatatgagtaagtataaaaatttcttaaaagagtgagtaaaattaatgtaattaagctttttgttattatagtttatcttcttcgtccaatacatggttaactatattgtttggtttttctaattcttttctaataaactaactatgatgcttaggatagttaaaatgggtgggaatgaaactagagagcttccgatcatcaacctctctgacaagaacctaaaacagaacacagagctttggagcttcacgagagacagcgtccgtgaagccatggaacaccatggatggtttgtggccgagtacaacaactttccaacaggacttcaccagtcgattttggaggccgctaaggaactactcgatcttcctgtcgaaatcaagctaaagaacgagaaccacaaggccggacacggctacatcaccatgatgtcagatggccagcctgttcatgaaggtcttggtattgatcaagtcaacgatgttcaacagtgccgcggattctctcgtctcatgtggcctgatgatcatgatgataacgaccgtttctggtaatatatatatatatttttatcaaataacataaaacaatcacaagtatttgttactatgtactaacaatatgatatgttatagtgaaactgttcatgcatatgcgaaaatgcaagcggaactagagcaacttgtgataaggatgctattcgagagctataacgtggagaagtatacagagaaatacataggaggaacaaggtaccttcttcgactgctgaaatacaggagacttcctaatggagaacccaacaggaaattcatttctcatacggacaagagcttcatctccattctccatcagaaccacatcaccggactcatgttgaaatccgagaaagaggatgtttggtatcattttactccttcaccaactcggtttgttgttatagcaggcgatgccatcatggtaagctaaaatctatcaaacggttcaagtttcatataatgtcaaatcatgtgtgtatatcaaatcatcaggcgtggagcaacgacagaatcaaggcgtgttaccacaaggtggagatggagagcgtggaaatgaggtactcgttagggttcttttcgttccaagaagggatgatatcgacaccggaagagatggtggacaaggaccatcctttagcgtacaacccatttcaccatgacggacttcttgagtactatgaaacattggaggttcatctcaaggctcaccgtaccatgaccaaggcttattgtggcatcccataaacctgatcattttcttgatcttattataggaaaaaatgtctgcttgtatcatgtattttgaaactaatagtgtgttttagacttatttggttccttgaaacaaaactaaaaatttctactgttttctctatctgcttggtactatagtaaaagctattttgtccttgtttgtctctataatgggccttgtttatattactatgggccttggctaatagttagttaccctcgatcctttttcgaggtttcttttgcagtttggttgtggaaaataaaacagaactccacatgaagtctattatacgaaaaagttaatttctatagtctaatcaataacaatcaacaccaaaagttccataaacatgggccaatattcttctgcaaacatcgagacagaagatatttcttgtaaaattaatgaagataagatagtataatgaatttgttctcgtcattttccttttctttttagagtagacataggcttgtcttagatgtgcgttgtcattttattttcagacaatctgacaaatagcaaccaaacaagatgaattgtgatgggattctgaaaataacaccgtgtagtttgtccttaatgttagtataaaatagattttttagtggttcaatcatagaatttcttgggaccctcaacgcataattttcatattttaatcagattctcattagtggcaacatgtcatggggcgattccagaaagtgctagatttttttgggaaattgcaattttgatatgtaatgcagttcagatatgattgaggacaaacaaatcatattgctgaaatcatttacaacaatttattaatcaaactaactagtagatcacaactattattatctaatcattcttctctgtgatttctaatcattgaaagagctttgttgaagtgagttgcttttgttcgaagatactctttccatgtcaccgattggtatagaggcgattcaacgggactaaccagcttcggtacaggtgatatcttgatatcagattgcggaccccaaaggaatgctacagataaccgggctctggtttggttaacccgagcgcggtgcaacacgcttttaaacaatccattggataggatgtggaagaggtcaccaacgttaaccacgagcgagccaggaaacggtggcacggtgacccaaccaagatcatcgcgaaatacttgtagaccggcggtattgttctggtacagaatggttaggagggtggagtcggtatgagctgctagacccatggctcggtccggttcaggacaaaccgggtagtgatttagctggagagcagcttgggcccagtttaaatctgaactgagactggcccattcaatgtcttcttcgctgaccccaagtgaatttagtgctaaccacatcaatttcgatgccaactttttcatatgttcctcgtactcttcaacgatatcgctgttaattaaaaacgaattgtattcatctaattagtacagatgagatttagacacaatttgcatatacatacattaaatatttgtacgacctttaaataaaatagaaaagcaagttgttgtttttttgttttgttttctccgataagattaaaagaatacatatcttcaaaatctttgagttgggtccactactacactagatttcattatgcacttaactcttaaatccactaaactccgaggacaaggcaaatttcggttgcttctgttatctatgccccttgttactacctatagggcgtccaacgtttgtggatgttctaccttaaatgtaaacattgtgtccttatgtatatgttttttgttaatgtagaaaaaggtctaataaacacaagtacaagtatataggatcgagtgtataaaagatataccagtagttgaggtgatgttggggccaaagtttacggaaatcgttgagaggcgagccagtgatggtgaaaccttcggaccacatttgcttattgaagaaagatgcgatacgagcgacgccgtagccggacacacctgtctccgaccgagcagacttaagcttgcgttggacaggtagcccgaagagactaccggtgagaaactcaatgtcttggagaagtcccaaaggcacgccgtggtttgagatttggaaggcaccccaagttctacatgcatgaccgatttggttagtcgcgtccgggtggtcgaggtcgatgagagggatgttttcaccggtggccggaggagaaggagcagcggagaagaggagatcgtctttaggggtccacttgtaagaatccgggagctcccggagagatgtgaagtcaggtatgtgagagtgtgggaggtgaatgggatggcctctaaacacatctgttaacatagcaggcatcttgctcttttttaattagttttaaaactttgtaaatttgatagatgtttgtgttttttttcttatgagaagtgtggtgtttggtgatgggagattggaagagttagagagttttatttatagtggtggagtagagaccaagaggaggcaaaagcatatgttaaagcacttgttttggtccaatattattggttattctacttgtttattggattaatacaatacgaacaaaccaaacctctagaaaattatagaggtcccgccatttccttcttttgtaagaaaataaatataatttcttatttgattatgcaagataagatacatacacatgatgggttgtcaaactatgtataattcaaattgaagttgaggtagtaatatggtatattgtgttcatatgtagaagttaaaccgtatctatccattacaatataatctataaatttaagaaagtgattaatgcgtatataaagggacaataagtattcaaaagaaagaaagagacaaaaaaaattgtagtctaattatttgttttgtttatgttgatttggttatttcctcagtcattggaattaagtatatccaacatttttcttcaattattgtcatactaaaaaagaagtcttaaaagtcttaatatcttcaaatcaaattttaagaaagttatatacacaacagtagatatatattttttcgccaccacaaattacttttttgtatttccagcgactgtggtcaaattagtgttgattgattgaaatcataattgtgaaagggggagacataaagaggagtgtttttgtttgggacaaaagaaggaacaaaaatagaaagggccaatgttgtcttgtacaaacaatatatagctaactgcagcaaacaacaaaatagcttatcttctttagattttccacaaagaaaaatgaaatgattttcgcaagtaataatttggagtaaaaaatatataaaaataaataaatatttatttgaacatacaaaaatactttggaagggaacgaatctagaaacaactatgctgatgacagaagaaaatataattaaaacataagaagatagacaataagaagacacacctatctttgaataccagttatttttaccacgatcgatcgatgacattgagtgtgatgaatgtctgatgtattggttagacgattacggagttaaaagttttatctaccgtacgaccatatcaataacgttatagcgtatcaaatagatactagcgcaagaggcgtatagaataaagtattagcaatgcgttaaaactacactcttgggaagtaatgtggtcgctagtctataaaatttgtgggataaacctatatttgccaaatctagaatggccacgtctcattaagatatgcaagcaagattcttacctagttacctacaatctaatatggtgtttggaatccaattcgaatgagataaactatatgaatacgtcttcatgatccaaattcataatgtaattttgtccactaaagatttaattaattcaagatccatacattatactagtttataacttaaccattagatatatttttcgttttttttaccaatttacctaaaattattgaaaattaatggtagtagtatctttgaaataacattacaccaacgttccctaagattttcagtatctggattatttctaaatctatgagaaaaaagcattcaaacatttatgtatatataacacacgtgcatttgttttgtatacactacctacaaattaacaaaaaaggtatttgcaaattaatattttgtgatttttgttagtagtaatgtatatatgctgcaaagtagacgattgatcgtttggtataaaatcgaaaactatttattaagacgcaaaatagacaataaaattagcagataagttcaaatggacatataaagtgattttagtttttagatgaataaaatggtaatgaccgtgatatgttaaaatattccagttttgtttagtggaagaaaacgttatcgtctttctttttgcattgaataatgtccttttccggaacagtaatacaatttacaagtgtaatgaccaaatttccacaacatgacttgccttttcgcgacctatttaagcccctctactgtttttggcttctaactaaattacaacaaactcatttctatccctgatcaaattaaagacaaatttgacattcaatcctatgtatataaagaagattcacgaaacaaatatataacaaaatgtttaatagtgtgatgataatcactcccgaatctaattttattgttttcttttggacaaaattgcacgtacgtcacgaatcaaggaccccattcataaaaagtttcgacggaccagttgattatgtgtacgaatttttctaaaggaaatagttacagtttttgttactttatagaagaaaaaagtaataattatattacttgaaacggatcaaacgttgaatcaatattgggaaccaataaaaagtgttgagagactggatgaatctctttttcctctggcatcttaacaaagggtaagactaccccattcattttctttttaatttatttaaatttggtcatttcagtcttattttcttttgtttttttcctactcttttaatttatttttctactcttttttttttttgtcttcttctatccgacttggctctcactatgctatattccaaaaataaaaaaatatctacaaaacgacaaaaaattaacatctcgtgggtcctttattttatctcaaaacactagtccttaagattaacgcattgtatgttttaaaaaggaagaacatatctataaagttataaacgcattaatatacccactatttttcacgacaatcttagctaattagttagcaatgaataatcagaagagtcatatagcatgtagcacacactctggtgataaaaaattatgtgtgtgcatgttgtcagtgtgtgtgagtgtgactgtgtgtcattatatcaataacaaaggagaaaatttaattaataataattgtctgttcgatcgatttaagtgaacaaaatggtatcgtttggtattaatcttgtattttgatgaatggtgatgatgaatcataaccaaaattttgtggttataaggtagtggtaaatgatctcacacgacaatgtccaacaagcctgaatgatctcatgactcgggtttgttggtgtttcaatttgtttacggtgaagcttgatattttattttagtttatttttacttttaggtgttgtttttaaattatgttaatttttttgtgtgctaagaatgtatatatcttagaaataataaaaagagttaggatcgaattacaatgaagtaaaaacctatatatattggttccatagcaaaaacaaatgataaaaaaaacatgaaaaaaacaaaaaagaaatcagttttttaacagttacgtacatacattattaaaataacaaaaaataataattaaaagaacatagccaaactaatatatggaaaacaaccaaacaaggaatatatgtaaataatacacataacacatggacatgtacacagcacatgcatcatcatccatgcacgtgctcctcacataatgatctctacatcgctttccaaaatgtcacaaaacagaataattatgattttcatcatagagcatctcctctataccttgtcttctaaccccacacccataacacatcacatacaactacgtacattatttctatttattgagtgtaatgtaggagcatatgtgtaggtatgtatgaaaatactatatggttgcatgaaagagcattaatatttatttcatggatggttatctaaatttcctatcataatttgtttttataaaatagaaacttcaataaaatggtgatatagtgatctgaatttgtattgctttaagatatacaagatatcgatttttcttagaagaaataatttgttcataatttagcgaaatcaatatctgaatatcgtcttaaaaaaacaacgtcatcaaaaatgttgtacgactaaattatattgagtagtactttacatgtcaacataactgtagaacggtagaagcattgtactctagatttcgttttgggagtcttcgattcgcagttcttaattcaagaaaccaaaatcatgagttttcgtagatatgttttgagtgaaagtgattttcttgtacgtttcatatttatgaaaggaatgtagataaaggactttcatataataatttgtatttatacgaaagtgtaacgtataggttaattacaatgtttttttcatatataattacaatatgaatttggagatattacaaggggaaaataatatatatatatatatattcgtgacagccagaatgggatacttatctcttgggtttaagggatgtatacgtctttgacatggttgataatcatccacgtgtaattaaataaaccctatctggacttattagggttttttgtttcttataactaaatgtacaaacgccacctagagttttggaattatatgtcggacctaattttaacagtggcatgtctcttactttaattttaagaacaagatttataatcatctttaattaaaatctaataaaaaagcaaagaaaagttaagatgcgtttgcttccaacgtcattggataccatcgttttctttgccataagcctgccccatatctttatccttaaccttacatggatcccgacattaattaacaccacacagacatttaatcaaatctgttttcgttttctatctataaattacttgcaagtgttttatattcaaacgagtatgtactgtatgttgaaagaaaattacaaaaaaagtttcaaacgagtatagacaaaaccaagaaaacgacaatattgaaatatactccgatatgctaccaagaaaaagtttcaaacgagttagctttttttacccaacatgctacgatatcactacaaaaaaagatcattttaaatcacgtcaaaccaaacgactctacaataatatatcagcgagttactttatatatgcagttaacttttactgatgactcccaagtataattatcaccgcacatactttttttctttccttttcactacccttttcttctctttctttttcgtttgaatttcgagtaacttgtatatgttaagctataatgtaaactatatctatatttacatcacaattaaatcggtatatacatatatacccttttagtaaaaaaagaaatatatatatatcattttagtatatctattttactaaagttaaaccactaaatcaataccagttcacgtactttaatttgttactcttgaaatcgaatgtgatctcatatatgtttgttgtcgaaatgacaagcatattctctcaaatttttgaaccaaaaaaaatagtggttaaggatttgacaacacattttattttcttgcaaatgtaagacgaaaagagacacttctaaaaatccaagtacttttgaaattggtagtaaattttatttcccattttggtttgattgaatttttttttataatgacaaagagcatattactttataaagcttctcttcataacaccttaaatattttcagagaaactaagaagaatgaccatataaacaagtaataatcaaaccaatgactttgttatatggttagggtccgatatatatatgtgatgacgaaaatgcatttgatgacacattgttgaaccactacaagaatatacttttattgatacgaaacatttcgtcccaataatttaaaaatcgtcacaatataaatactgagacgattttgtgacaatttctatcagttacaatatactcgtcacaaaaataatttcgtatcaaaatcgtcacaatcttgtgacaaatatatgtagtatctattttgtcacacttcgtaacggaccatacgagtgacaaaacagttaatattactaacaaaacatctagtctcaaaaccgtgacatttggatactatagtaacgtgacatttccgactctatttacaactcaaaaatagtcaccgaacgttataaaaggtgactaacaaatggtaacttatacgttacaattactaactaaaattatcgtcgccaaaacgtattaatttcttactattataatgttacaatattgtcgcaaattatgacggaactatagtaacaaaatcatcataagtattgactacaaaagacgtcatcaatcagttctgttttttgccactatttcagtgtctcaacttcgttatgatttattactaagaatcggtcacaatgcttacaatttagctactgatttcattgtacaaaactagtcactctttagttaatggttttatacgctctaatgtatgtggtcaaaatcctcgattgaaaattaaaataccagacaaatttaaaaaaactgcaaatgaattaccaaacgccaaagaaacaatttgtttttaaaaaaaacatacgtagatcgtcttagattaaaagaaaaacagaagcaaacaaacttaaattttgactaagcaaacaaaccaaagtaaacttatgtggtacgagcaaaggaacgaaaacccatgaaagcttgtggagaagccgatgttcctataggaggaatggaagcgaaagtagctgctgaattgatcccattctggcctacgagagattgcagtgaagccgaagttcctacaggtagagaagaagcatgtgtagctgctgaattgtcctcattcctacctaaaaaggattgaaacatttgctccatagtgtcaagtcgtttatgaacaagcacattttcattacgactcttttgcaattcagtttccagctctttcactcggacagttaacgtttccacttctccagtactttgaagaggaataggcgcaccatctaaagacaaagaagtcccattttgaagtgagccaagtccaaatacacgaccatgttttgatattccagcaacctacaagaaatataagtgcatgaacaatgacattttaaaaattaaaatgtttagtaagaatcagtttgtactccaaaactccatcaagtctctaaacctatagaggattaaagtatgatctttacaaagaaaacaaatgtaagataagaaaaattacctgaacatagattttatttttctcctctatggtaaggggattcattgttgaattctctccatcaaaaagctgcatttgtgccatgcgttcttgtaaaagttcatcatacttttcagcaattactcttgctttttcatcaacatatgttccatcagctttttgatgagtttttttcatcaccgcaatgaaagaagaatcttcattgtttgcttcctacacataaaacattaaccaaaagtaaacatacctttcaaaattataaaaacaaatcacaacaactataaaaagtaaataaatatgagcattaccaaagtatcttgaaccttggcataagaacgtgatcctgatctgtgacagtgtggacccaaaccatcacgattaaacagccgagaagaacgcgctttctcgcttctttctttagctattggagtcctccaataagctaccataactctccaatgtgcagccagaatccagtcaggttgtttacctcttgactttgcaaggctaaccattcctttgagccgagcagcagcaagtgtttcaaagtttgttttcaccagatgctcaattgaagcatcccactcaaaccatgtctaaaataaaaattatgaaaattgtattaatataacaatcgtttctgaaaatattatagagaaatgcaattaaaccgaaccttaaatgttgaaaaccaagcttctttgtaaaaaattggcacttttttccagctataccatggtcctttaaaacacccttcaatgatctttcgaacacgtgttgatacttcggtgttgtttttgaacctgttacatgtgtattttcattatttacaattctatttcatgaaatgaagtagtttaccaaaaaggaatatcattaccatttagctccattccttcgagatgggtggagaactcgaacattaagttgtacaggtgcaatttcttccatctggtcatttggttcatcgtttggttcttgaggatttccaagatcaggagaaggaggtctttcaaaaacaggaggcagagaatttggtaccctcccatacgaacgtccgcctatcacgagtggtggacgcatctggcaaaacaaaagaaattttaaaataatatgaatcacaatattcatggttgatgctatatgttctcagcttattgagataaaattatggtactaattttttgacgcatacaaaatcaaactaataatctaactaattgtgtatcccattgtgtatctcaaattctctgttttcagattacgttgcttctgggtaataaaaatgcagtttgtgtaacaaaaaaaaaaaatctaactaattatattttttttaacacgccacgaagttttatctcaataatagttacaaacttttttgctttcaatagtctgtacatgaagaagaaatcaaacagtttccagcaaaatcaaaactcaaaagattaataatagaattcaaaccttgaaatcagttgatgtggaagtgacaaaggagaaaaactataaattcagaatctggaaaaaagaaaccggtgggagagcagagctttgcttaagagagtcttggagtaaaacgtaagaggaagaggagctttgtgactcatttaatatattaaaaaatattctagggtattggtaacgtttcattaatattatttagtcacaaccaaaaatttcaatagtttttactgggtattacaccgcctaagtgtttttagtttcccactcctaaaactagttcctataatcgtggcttggaatcatattctcacgtcgccgtatctcacgtcgcaaagacgttttgcatatttcttctcttcgtgtgatatttttagataacttaaattaaaagctagaattttagataaatctaaaaatatttttaatatatttcaattcaacaataattaaaaaggtttggtcaatatatatttagtccaggatattagctttttcatcgttagtttgttaacttttcatgatctatatatatatattcattatcttgctacatttcaattatttcatacatcaaaaatcaggaaaaaaaaatgcaacaagaaagcaaatcacaagatgatcaacccattagcaagacaaatcctcacaaatttgatctaaacaaaccctattatggcgaagaagtggttcctcttaacgaagtattggaacaaaaagatattagagcagaaaatttccgatctatcgagaagacaatctctactcgtaattttgatctgaaccatcagtatttcgaagaaggagattctcaaatcaacaaaagatggaatgaaattaaactggaaatgctgaggcttttgctgcctcctcgaaatttgaaggattgatttggctatgacttaagagaaaataattatcttatactctatttattaagataattatcttatactctacgtagcttcaatgtcaaaattgattattgaattgttatttgttaaaatatatgattggatttgttttcaagatttgttttgattattgctttgttaattaaaaaacgtgtgatgatatggaattatgattttgacacaagctggtaatcaaacacatgctctgttacataattataaaaagaagaaagagacaaacattcttcttttacacaccaccgtcttcttcttcttcccaacggagagtaccagttgttcgccgacgacactagcttctttttcttactcactaggaattgtagaatgattaactaaaaataaaagccttattgaatgatatctatataaaaattaaagaagtccacctacgtaggactctgattttacgtaatcattacgtaatcactgatgtttctttttaaaatgacattaaattcatgaactcattatgttctgtgattaaattcaaaggtaatcagaaggtatgggaaattgttaatccaaaatgagatttatacctgagcattctgaccaattcctgacataggaaactgcattttccaaaaaagaaaaaaagattttcaaccagagaatatacgaatcagatgaagttttttttattctgatatgttaccaaaactacgcatcagaggaagtcaatgttgtaactgtgaatcaatcagttcaatgaaaataagtccacagattcagatatgtacctggctattttgaccaactcgcaatgatggatactgcattttagaaaggaaaataggcattcacgttagagatttgttatctgtatttcaaaatgctggcaaaaccatggctacttaagtcgtatcccaccacatatggatcacgttagacttcgccatattctcgctcaatttggagaactcggaaggattataaacagagaatgtgatttttaatggctgccaaaatatagagggtaaaatatcttcatgaagagggtaaacagatagttaactatcttcatgaagagggtaaaataaaaaagaaatctgagaaggtgcagtacaattcttttagtgtaattaaagaaaaggagatgttgaagaacgtttttatttgatttttccttaaaacaaaataaatgttgaagaaggtgtaaagtttttctagtctttcagaccatttccaattgttgcttctattttttcatctaaatatagagaaaaaattagggatctctattttcactctaatagtttttcaaaaataaaaatctctacttgttagaagaaaaaaatagaggaaacaataaaaatctctactttttcctctatatatagaaaaaagtagagatctttattttacagataaaaatagagatgagttggagtgaaataacgtcaaaaataaaatataaaaacaaaaatagagatgagttggagatgcctcatgttctccaaatagtcactcgattaatatattacacaaactcaatcaaaatatgcgtacaaatgcaatttccacaaatatgcctttaattttataaaaagtatgtcgttaattgctaattagagtaattaacatcaaaagtatggtttgggttgatataacaaagcattgatatttagtactatttgtttgccccgaaaacaagatgttttagataaaagtgcaaagatttatataatggttttaaaaactagccataacttaatagttagttgtatacaatattcaactaatcattaaaaaaactgcataattaaagaattaatcaaaagtatcaaaatatatttaaagtttatttagaaaattgtaaaacatcttataagaaagaataaaaaaccttcttaaacatcttataaaatttgaacagagacaatagtatatgtttctattttaattgattgaggatcctatgtcatcgtaggtctctacagatgttcttatgcgatggacgaatcgctattcaaaaattaaatttgtttcttattatcaatttttcattttgtgttgttttatcttcaattacacggtacaaaaaaataatttttaaaataacactcatcctaaaaattgcttcacatactttttattgtggaatctgaaaaaaaaaaaaaaagtttataaatcttttgtagatgtgtgctctcggttgaatggtcgtaaatgattagcgacttgtttcaaagtttttatgaatcttttgtagaggtgtgaggacgatcaacggctcgtttcaaagtatttgttaaatgtttacgatttgagtaccaaaaattgaaatcaatattcacacaagagtaaatttgaatatatatagttatttatttgagaacaatatatacgaattttaacaaattctttacttaaaaaaaaaaaagttttgcaacaaattctatacttcctccatcagttttgctttctctcaattattattaactttttaactcattataagattattagttccgtaaagtgaactgttgttcacttgttcgtattactcttacaccagtcgggagtgacgaaaattgaaggccgcttatttgataagtttttttgtgtcagtccataaagtccaaattcaagtagataaataacgataaagatttgtctagaaacatttcgttttacttattggatataaaacaatatctcataacgacaaaaaaacaaaacaatatctcattaagttattaataattgttaaaacaaagtgcacctttgttattatattggttaatataaagaggtcaaaattgtagttcccaatgttagaaagatgaggaaacatgaaggagagaaatattattgctgctgacataatgtaagtattttccaaacttcatatatataactaaggactgtttacgtaactatgcaaaaaaattagaaaatgaaattgaaaaccacaaaaaaaaaaaacgatatttaacccaaaatgaaacaacagaaaagtgacattcgcgactttttttcccctaccttttttgtagacatttaattacattttttcccagttttgtaattaaccacatggttcttagaatgcaaataaataaaaaacttagaaagttctgatctttttatctttttaaaattttatgtttcaatactatatattacatagtcaatcataccacaacctcttaccaatcaaaaacaaaacctttatctccaagtctattattttctgctaaaacctgcaaccgtcttgaatcacaaaaaatgtctatagttttgtaaatatcttaatagaaaaatagaatagtgataacagaaaacaaaatttcatatatacttctaatccgaagataatcacaagttgatcaaaattatagattttttagtgcaacaaaaactgtcatttttttatattacgtaataatcatttttttttcttttaaatatttggaaattcaaaccaaaaaaccatatatcttttaaaagcggaacccacaccaaattaaaaatatttctttcaatatgccttgaatccaacacttccacctgaaagatttaccattggaccatgagtacgttgcaaatttcatattgtgtttcattgtgataaacaaacaacaaaacaagaaaactaataaaggctctttcattgcactgtagatcatatggactagttttttatgtagcgtctaagttattatacttgaagaaaattggtatcataattagtcatgatctataagaatgagaaaattggtatcataaagttagtcatgatctattagaatttattcccgtttatttatgattttctctaaacttttcttcgttgttcaagtcattgagtaggttttttgctaaactgttaatatcattagaaaaaatgaaaatgtttggcctttacagagaaggagcctttggctcttgaaaccttggcaaaaataagtcattgagtagtttcaaagtgagtattatctacttcttttgtttgtgtgtgtgtgtgaacatgggtgtagttcagttcaaattacacttttagctgacaatgataaaggcctccaatctcaaactttatcttttatgtcagtcgacaacagtccaaacgtatcatttagattatatctcttccatagaagcaacattttaatttattggttgggataaatcagttaacaaatgaattaaaacaagtaacgatcaagtggagatgttttggccaatctgaactctgggaaccacttgtcatgtttctcgacatctgtgacacgtaccttgttcagtgcctcttcgatatcacatttgctattggagttttcgagatagacatcgtcttttagacatgctcttgagcttaattatccctaaggttttccattcatcgacgagtacctagtcatatttttcagatcctctacattatatcaattgcttcccatagccgtcttctcaataacttctgatgtttataatggtcgcattttagttatatataacaattgaaccactgatcatctaacctcaagtgttcttaatttaatatcgataggtgccttatgactttcgatggtgggaagatcaaagatgtgtatatgtgtttcgccagcctcctcctggaacctatgacattcgaacagtctgagtaagatgaaatatcaaaaaaaaagagggaccctgagagctccatctaggtcccatgggtatgcaaatatttaaggctaggaaattaccgtaagagagttgcaaagaaaatcaatctcatcaatgaaattattggtcacggcccgttttttattgggccattactgggcctgttttataagagaatccagcaaagtcagcggtaaaggagttcttttttaataaaattaaaattttcttataaaaaagtgattaaaataacgtcacaccactatataacgcgacgggaccatcggtttcaaaaacataacataaaacaaataacatatttcttttaaaaattctttgtttttctttaaaatttttttaaagccatggttactattatactcacgtgattgtactgtagaatttaaataagtatgaagaaatggaccaccaccaaacatatccattatgtaaaatccaattgtatcctatcaattcatgttctaacaaatgtacatcttatatagttaatgcgataaggaggaatggagggaaaatctgagttcaaaacttgaacttggaccaaccaaacagtaaattttgcatgagtataaataattcttagatctctcttttaacttttttttttttgggtgactttgtttgtgttttgaatattagatctacctttttggtttgttgataaacattattaggtccatgacttcttgttgttatacgtccatctctcgttagtattttagagtcattattaaactttaagactttagagtaagtaagtcaaataaaataataagactttagatatacacaaccaagtttttagtttgaattcaaaactcgaacgaagtctgattatataatcacgtgttgtaactaatttcaaagaaactatgattgactcatcatactatgaaaatatcgttgacttattacagttttttcatcaacaaaatatatatacatctcatatggttgaagtataactactatcatatcatcattcatcaatcacttttgttgttactgttttcagagagattactacatagtagtacataacaagagaaaacaaagccatgacaagaaacatcaacaaaattctaaaaagcaagaagacgaagctggacaagatctctgcagcatttaacatacaccactccactcgcaatgaagttttatcgtgttgggacctccgattttggactttttttaattttacttactttggtaattaagtgatttttttttgctactacatgtgaaccaaaaagaaaatgaaaacagaaagttgtattaatggctagggattttaacttgtagctcggttgcttctcattaattagtaaacggtgtgaattaatggcatatataccattgtacgtaacaaggatcataaatgtggcaaaaattaaatcacagttgtagacaaataataaccccagatctcacgggttgatctcccaaatctatgtttaagcacgctactaaattcaaaaaattaagcactaatttaattaactcaagtctcccccaataaaaacacttcctttttgtctatctcccatatatgtaatggtcaacaagtcaaatttttaaaattcattatattctctgtacatgaaaacatttagtaatgtttctttttaaaaaacactgttttgatttaatgtcgttagtaaagtttattattttgatttctttttaactttccttaattatttctaaatgtgtcttctttatcgtttaaaccacactagtgtgtgcgtgtctccttcactttcaaagacagtctctttccccaaagagcggattcaggattcaccatctcgatctgtgtccaaagctcctatctttcttctttcttccctgaagaattttctggagcttctcaggtcaaatctcaaatctttttttaacttaattttgttatttctatcagaaagtttcgatttttatgctcatgcttgtgcatccgcgtacctgcatttcgttttgtgtttgagccgccaaagttttcaacttttttttttgggatttattgcaaatttgtcgatgttgaaaggttttctcaaggagaatgtgaagaaaaaggaagagaatgtgagttgattttaggcatagggttttgtgggttctttcagatttatgtagaatggtgcagctctgattcatgggtttgcaaatggtttctcacgatctgttcgttttcccaaggaaatgtagctgcttttttttttttttttgtcatcagattgaaatgtagctgcttttgaagagaaaagtctgatgcttctcttccgattttttatggatggtatttataaaagaaagaaatagtagttagattgtcgaatattggttttcctaatcttttttcttctctagattttataaaattggagtctttttctgcattactgtttgcattgttcaataaggaaatcaaataacttttgattctaccattgaatcttacggagttttgaaaaaaagtttgaagctttgaactttaatgtatcttctattgatacttttgttgatcagtggaaaattttcaaggaaaatcctctgtaagactcaattggttcgattattaagtcaaattggccatctttttttcagaacatttttatatgcatggttgcagattgctatctgctctgaatgttgatctctctattgccttaactaatgatctttgcgttcttttgacagatcagaggaagatgatgcaatcctaagactctaagacttcttcaaggctgtgttttatcgtgggatttttaaacatggggaaggaaaatgctgtgtctcggccattcactcgttcccttgcctctgctttgcgcgcttcagaagtgacttctactacacagaatcaacagagagtaaacacaaaaagaccagccttggaggatacaagagccactggacccaacaagaggaagaagcgagcggttctaggggagatcacaaatgttaactccaatacagctatacttgaggttgttaaaactatattatgtttctttatagtgtttggtttcctgtgaatttttgtaaagatcttgtgaagtaaaacatgcatcactgaaacatgggttttgccatttcaggccaaaaacagcaagcagataaagaaaggacgcggtcatggattggcgagtacatcccagttggcaacttctgttacttcagaagtcacagatcttcagtccaggaccgatgcaaaagttgaagttgcatcaaatacagcaggaaacctttctgtttctaaaggcacagataacacagctgataactgtattgagatatggaattctagattgcctccaagacctcttgggagatcagcttctacaggtgatccatttaacacaagttttcatatgattagttcctattgtataaaggagtggtctttaatgacttataaatcttttttgcaaatggttacagctgagaaaagtgctgttattggtagttcaactgtaccggatatcccaaaatttgtagacatcgattcagatgacaaggatcctttactgtgctgcctctatgcccctgaaatccactacaatttgcgtgtttcagaggtaattcctaggctttgatagtctctaaagaaacttggtgagccaaaggactgaaagttttattgcttgtgcttctgtgtcacttctcttctggcagcttaaacgcagaccacttccggactttatggagagaatacagaaggatgtcacccagtccatgcggggaattctggttgattggcttgtggaggttagtgtttagttctacttttgatgctaacttttgaagctactatgaccttttccgggttctcacaaaagtctgatttcaatcacaggtctctgaagaatacacacttgcatctgacactctctacctcacagtgtatctcatagactggttcctccatggaaactacgtgcaaagacagcaacttcaactgctcggcatcacttgcatgctaattgcctcgtatgttcctctccaatctcactagtaaatctcttctcaaaagctaaactaaacttatactgcatttgtttataaacttttcaggaagtatgaggaaatctctgctccacgcattgaggagttttgcttcattacggataacacctacacaagagatcaggtataccgagattgctgtctgaatcctcaaaaaagaaagtgtgcaatgtgctaatggagtcgtgatgtgcaggtcctggaaatggagaaccaagtacttaagcattttagctttcaaatatacactcccactccaaaaacgttccttaggagatttctcagagcagctcaagcctctcgcctggtatgcatttcgcaatttgctcccctatctcttctaattacaaagtttagtagaaagactgagaatgtgtccatatttgattgctgattcggcagagcccaagccttgaagtcgagtttctagccagctatctaacagagttgacattaatagactaccatttcttaaagtttcttccttccgttgttgctgcttcagcggtttttctcgccaagtggacaatggaccaatcaaaccacccatgggtctgtgatgttgcttctcttttgtatatccagacacagtttagctccacaaaatctttgatctttaacatctttttgatttttcccccggcagaatccaacacttgagcattacacaacgtacaaagcatcggatctgaaagcatctgttcatgccttacaagatctgcagcttaacaccaaaggttgccccttgagcgctatacgcatgaagtataggcaagagaaagtaagcttatcagttaaaaccacatactaaaacctgtttggtataactttagtttggtttccttgattctcataagacttattatggatttgcagtacaaatctgtggcggttctcacgtctccaaagctacttgacacgctattctgaaggtttcaactcctaaccgataatagttttgtcacattgatggtccaatttcgttttcattcatctgttactctttgttcataaaacagaatttccacagtcccactcatctaatacctgattagaattcggtttagcctagtttgatccgtggtttggttcttccaaacccgggaacatctaatcggtacctagagttttttttattgtaacgagaatgtacatttttctcccatcttgaggcaatgtaaacagattcggaattttcatatcagttttctgatatgaagtaggtttaagtatttatatttcaaatttcattgattgttgatattgaactgtcatgcagtagcttataagaaccgcctctagactttagtccagtgaccaaaagataaagatgaatgaactatgtcaaagaaaacaacttctacagaaatttcggaaatcttagacttccgaagagaaatattgagtaactgcaaaaatgtatatttagatatctgtaaggctcactcacattcacatgtgactataaatatcattcatcctctgttacatgatctcttcataatccttaacctcttgcacgatccaaggaacattctgcacacaaatagtttcataatttattagatatcaattaaataaaagaaagtaaatttgaatgttatagaggtcgctagaaacttactcccaaggaacatctccagcaagcatccaatctccatctttgtcttcatatattggtacacattcactttccttcaacgtatcatcttcattttcatatataaagattataaagttaatatcgatgttttggatcattagttgccttgataagtaaagactaaaaccaaaaatatatactatatatagaaacataaactaaccaaaattgatatagcatccgaacagaatttgcagagcggaagcaagatcttggtaacatttgtacatttccaaatcaatcttccttaaaaatgcagctccatctacactcactttcacgtacgaacttttggtccgttcgagactgttctttctccggtacgaacaaaccggtggccaacccacaacttgactctttttcgccggttcacatttcaaatcaatctctacttccggagaagccctcttcttcccggagatggactcaccggagacgacgatatctccgggaagacctagccgtagttcggtgatttcgagtccaagattattactctcattcgccatctttgatgtttttgattgaaagtattggtgttaatgtgtttgaactttattctgttgccactttatatgttctcatgggaacataaacgatggcgtttgagacaagcttgtttagcattgatttatcttgtcggccccattcgaagatcttgtcgaaatttttatgtcatgttttttcattcctttgccgcttcgtgtttaaatgtcgataatatggatccgttggttcgacacactggacggccacgattttgttaccgacaaagtagggtttctttctcagccgttggatcagaaacacgttactttctattagacatcccatgttatgtgtgatttgttatgtctgtatcccattcttttaatcaacgacataataataaaacaacatattcatggtcgaatatatattagtgcactttaaaatctacgtatatttatgtttctcgacaaccgaacacgtgttactcaaggctaagacaagttattatattatttcatttttttctacacgtaacacactacacagtgcatacataatttcaaagaaaaaaatgcatctacgttttcgtcatatatcttgtttctgctattcacacatgtgcccgatactttcattacatcatacgtaatctacacatgtacaccatacttttgtcattatttgttacgaaatagaaacagaactgatcaaaatatcaattacgggatatatttccatttttcatagatatttccatatctttgtatctccaatagtacatttttggaatgttcacatgttgatagataagctagattagtcaaatttccttgtacacaatttctagttttcgattgatcatgtagaattgcgtataatatattgtcggctggctttagccaatgaataacacaacaagactttgtgataatggacagcgaatcccacagtgataatgatgatcacataatcgacattacaaacgatgaagattcttcatcaagatcgtctttggacgagagaagctatccttcattaagttcgtctctgtctacggatgacgaatcgtcagatgaaggtgcaagttcatctacgagagactgtggtagtctttggaatataatggaattagtagtcactttggttcagattgttgcatcattaatagttttaactctggcaaaagatgaacatcaacaagcacttttgttaacatgggtcatcggttacacttgtggctgtattaccattacgctccttattctcctctcgtgtgtccgcaaatacaaccgaattggtgtttactcaaaaacgaggtataataaacaacacttgtttcacttaacattaagagtttaattagctaaatcaaaccgaaccgttgttggtggcagaacggatagggtaatggatgctttgaagatggggaatgaatgtttctttgttgtgtggttagttatggggattctatggatttgttatggacactcatcttcttctgatactcctaagctctacaggtttgactcacaatcatgtcacagtagagatttagttaaaccctaactaatcagtactaacttttgtcttcttgattatgttttggcaggttatgtgtagtcttcattgctttcagttgcattagatttgcatatgcattactattatgcgcaggtatttttttcgcttaatgttcactagagtttggaacatttttttctcatatctatgatgtggataagttgaaatcaaatgatgtagattctgtaagggaaggtataggaggtagatttgttttcaagaaaccgagccatgatgatgtgagtaataatttcatatcacattaattactctgttttaaatagcatttttttgttgttgttgttgtttaattttcatggtttgatggtgtgtgcagagttgttgcatatgcttggggaaatatggagaggaaaaaggagtaggactaaggaaacttgaatgctcacacgtatttcattcgcaatgtatagacaaatggctgaaaatcaaatccacatgccctctctgtcaatcacaagttaggtggtgatgagatgaggttgattttttttttatttttttttcgctcaagagtaattgtacacattcaataaacaaaagtggtgggaaactgaaagatacgatcctgtcttcttgtgttgtctgtcttaaaacagaaaataaatatcatacagatcatttgacctattaacaatttaacttgtccaaaacatctgcaatatatataaacattgaaatctcagctttgatcttcatttttcaaaataatgttttatttgtaacacgactaatacgtacttagtattgatctggtctaaaaaaatactaataattttatcaacaaagaaggaaaggtatatgctttgtgctcgtcaacgcaaatttgaatgaacttttcatttgatcggcaagaaataggaaaaaccaaaagtgatcaatggagggccctttgttgagcgagtgtgaacacatcattgacattacaagcgatggtagttcttcatcaattgatggtcagcaaccacacgagggtgttgaattgggtgatccatacacaaatgaaagcatttgtaattcaatcgagtttgttgtgactttggtcttgattgctgcggtcataatcgttctgattgagccaagagatgaagaacatccacaaacaatgttgtctatatggatcatcggttatacatgtggctgtattgccactctccctatcctatgttggcgtttttggctttataaccgaagcgttggctccgaatctacagatgaatacttaagagagacaaggtatatataaattgtgttttcttttatctttttatgcattagattgagatataatggttttattggtttgcagaatcaacaaggatatggacttttttatgacgggtttcttcgtgggttggtatgtggtgtttttatggattctttcttccaaagcattcgactcatcagctctagatgatactacaactcaatacttctggtgcgtatcaaacgaaatttccaatcatatgtataccttaaaacgtatatattgacctttcttatactcatgcctttggccttcttcattgtctcttttgcaggttatgtttggctctccttactttcagttgcattagatatgttctttttaatctaacattggcaatggtctgttatactactcctttgcttttacttacgcctgtggtcatatgtgttctccttgctgtggaagtcttaaaaggcattgtagcatgcattgtatcatgcatctgctgaaatcgaactaataaaaatattttgtttgtaagcctaggagaatgggcgtttaaaatcaaagtaaagcagagtaccagaataaaaatgttttgtgttcatgttgatgattttaatcttattaaggtagagaaaaacagtagctaaggttttttgaaatgatcaaatatgatcatctcgtcttatttcctctttttattttatttttctccctcgttaatattattctccattaaatgacagttttgactgaccattcttattcgtgcgttttcgctattcagatatgtattttaagggcccgtactttaatgggctttttaaaatctgacttatttcgagtcgagtcctacctcattgtgacatttacccaaataatcacgtgtttcagaataaccttttataggccttattattttgacagatttgggtaaatcgaaatggatatatagataactttaacaccaaagataagataactaagaaaaataataaaatattatagtttcccaaataataaaatttaacaccaaagatttctccttttacaaaaaagacatattacttcttctagcttcccaaataatacatcaagcaccaaagaattaggaagactataatttagaaccaaatattttgaaattttactctaacgggctacaattgactaataattggtcttggtgtaggtaaaacaaaaacacacaaaacaaatgtagctccgaaagtctactcattgtaaaggactttatgtgattgacttagaattggtattggtgtcgattaggtcttaagataataatatagctggaaatgtctattattcgtatttagagaagaatgactaactttttttttgttcgttagaagtttacaattgacttatagaatagatcttgacgtagattgggtcttagaataataatttagcaccaaagaatcggagagggctttatgtaatttgtatttcaacgcttgtttagatgaactattaattcgattggacaaaatagaagaaagcaaaaaagtgatcaatggagggccctttgttaaccaagagtgagcacaacgtcgaagacgttacaatccatggcgattcttcctcaaatgatgagcacatcatcgacattacaatcaatggcggttcgtcatcagctgatcatgagcaaactccacatgaggcatttcaatggagttgtccatttacaagtggaagtttctggattttggtcgagttagctgtgactttggtccagattgttgcagccatattttttctgattctaacaaaagatgaacgagatccagaactagatgtagctttgtttacatggatcatcttttatacttgtgcctctattgccactttgccttttgtatgttgccgtttatggcagtatatccaaaacgctagctcagagacaaggtataaactgtgtttctttttctttttcaggcattagagactgatatcctcaacaatggtttttattgatttgcagcaacgaggtgatggagtaccgtttggaaaattttcttgaatctttcttcgtgtccttgattgtggtgtctttatggcatattctaaccgagtcatcatcacgtcaagatactagtcgacacttctggtgcgcatctaactaaatttacaattatggctaaacaacataatttacctctctagaactaacaaatgtccttttccaggttatggctgggtctacttgctttcagttgcattcgatatgtgcttcctaatttccaatttaccgtacagttattcatgttgcctggggtgtcccttgttactgcacttgtggccgccatagtaacgatgattaattcgttactctcactctttttggtcatcattggactctttgcgttaaccttttcgtggatcattggaatgtgcggataaaaatgatggatcatgttgttttcttcaacaattgttgtaatactctctttctatttattaaataaagccaagtgtcattagcattaccgaatcctctattcctgaaatggccggcaaaactgaaactaaaggcttctctgtaccaatatctctgcagcaagataaacatttcagtatctgcatttcaacatgtacaactggtttgtctattgtaaaaggcctctttggccatcttgatgaagcgcttcatgttgagacagcatgtggcacgcccgacaattctttttaagagtgcacccataacatatatgttcttatgctatcaaacaacccacaaggaacctgaagatgataactacttgatagagatgatatgacttcaatcaatctcgatcgggttcggttaagggcactaatagataacctgctatatgggagtgtgaagaccattaattggtttttcacatatatatgactgaagaaatcagccgtaaccaaatattagtgtttttgcatcagttggggccttgggggtcaattatggagtggaataatacatgaaaacttgaatggtcgcatgcagagcagaggtagcctttaaattaaagcacacatcaaaatgtagtgcaatgttgcgaacttttattcaactaaacaatttaacactcgatctttgtgcgccaatacctctgcacaacaaacaatttaatctcatcaatatgatccgattttgaagaaccaccttcttcttcagtgacttctctggctaccttccattaactgtcgctgtcataacgacgtggaagttaacttaattgacttttaaaagattaatgatgctgtatattggtcttaaaatggcacaaaaggttccgtctaggctttgtgtttcactttaagtctataacttaaaaaaaaaaaactactaatttagcaccaaataatatcataaccattttattataaatgactataattaacgtagaattggaattggtcagttggtctcgagataataatttagctccaacgaatcggacatatctatgcttttatgtttttttttgggtataagaatttgttattaattcttataccaaaattatagatatgatattgttttattttaaaacaaaataaataatatatatatgaatggtttgatctgatattggttacggttaggatacaaattttaatcctgataccatagaggttttattagttcaattttctttccgtttgtttatgctcaacttcagattcgttgtcttgcaatattaagatatggttcaattattgagatatcatttcagttacgttcgcatccgatttgtttaaggtaattgtaatgttttaatgatcacttttatttgaattctgaaaattgaagttttaaagatattttttaaataatcgatttcaacaaaatagaaagaattgtaatacatattttttttatcataatatgaattttatatttaatagaaagtttcgattatgcatttaatttcatacaattgacttttcgactgttcattttttttaattttattttacaacgacttttagacacttcttagcacgaaagaactaaacgcaacatgtgctttgtaattaaacgtcgaatgaatatgaattatatttgacctaggattacgaatgatgtcgatctggagtaataatttagaaccgaacgacgacttcgaaatattacaattgacttatagaatagatctcgacgtagattggtcttaaaataataattaagcaccaaagaactggagatggctttatgtgctctgtgttttaaagcggattaataaggacttttaattcgattggggaaaatagaagaaagcagaagtgataaatggaggaccctttgttgactcagagtgagcacatcgtcgatgacgttacaatccatggcgattcttcttcaaatgaagagcacatcgtcgacgttacaaccaatggcaatccttcatcagctgatgagaaaagaccgcatgagggtgtccaatggagtgatatatttacatttaccactgtttgtattttggtcgagtttgttgtggctttagtccagattgttgccgccattgttgttctgactctggcaaaagatgaacaacctccacaaaaaatgtttcctacactgatcctcagttataccggttgctgtattgccacactccctattctaggtttgcgtttctggcattcttaccgaagtgttagcacagagacaaggtataaactataatttgtatgttaattatttgttttaaaggcattagaaaccgaaaccgatatagtggttttattgatttgcagaatctacgaggtggtggacattttgaaaaagatgcttgaatatttcttcgtgggttgggttgtggtgcttttatggcatcttatcaacaactcatcatctatagataatactacgcaacagttctggtgcgcatcagaagaaaattataactatatattcgtgtcccgaaaacagactaaattaacgaagtctctctaataataccaccctgcattttccttttgcaggttatgtatgactttccttgctatcagctgcattctacatgttcttcgtaatctcccctgtgcgggagtttgttttctgtatcctatgatactatatctttcccaatcgatagacttcgttggtgacattactgatgagataaatttgactacgtctataatcctattatgctttggaatctttgcctgcattatctgtggttgttgttccagatgcttatgcagataaaaagaagaatgatcatgtcgctttcttctttcttttgtttaaaatgttgtaatactctatttatttatcaaataaagccaagtgtcacgattgaatcctatatatcttcctgaaattgttggtataaaagaacaatttagcgccagcgaattggaaaggtctatgttttgtgtttcaaattcaataaacaaaagcgactttatataattggttttggtgtagttggtcttaaaataataatttcaccaaataatttgaaacagtcaatgctttgtgtttcattgtagaatatactataatttagcaccaagtagttcaatagttatttcattgtaggaataccataattgacttaggaatggtcttggcgtctaatttgaaaggtctatatatgctttgtgttgcaacgcagattttgattgaatccaagagaagtagaagaaaatcataagtgattaatggagagccctttgttgagcaacgatgatgagcacatcgtcgacatcgacatgacagccgatgactatgcttcattaatttatacgctagtatcaattccaattgcaattgctttgaactcgattgagtttgttatgaccttggtccagattgtcgtagccatactagttgtgaaaggaacaaaaggtgaatatccagaagcaacatggatcctcgtctatgcttatggtagtattgccaatctccctattctttgttggcgtttctggcagatccgtcatcctgtctcacacttaaggtatatatatataacttgtgtgttcttgtttttctttgttcacgcattagaacccgcaaaatggataatggtttttgattggtttgcagaatcaaccgagtcatgtttcgtttgaggacgatatttgaatgtttctttgcgggttggttcgtggtgttcttctgggtctttgtttgcagctcatcatctctagaccattctagtcaactcttctggtgcgcatcgaacaaagtttacaataatgtcccaaaaaaatacttatgctactctctctaatatatattcaacatttgtccatttgcaggttatgtgtggttttccttgttttcggttgcattcgatatgtgctccctatggtaatatgtgcagcgacgtgttgctgtgtgtttatgacgttatgttttaacgccgttaacacttgaggatcggagtgattaaactcgttgtgtcacttatccgtggattccttgcgagatacaaatggtggatcatgttgttatcttatttcctttgctcaaaagttgttgcaatgctctttgtttttctcttttttgaatgaaattgtttctttgtttgaaataaagccaagtgtcattactgaatcttctcgtcttgcatgtgtatcaaattacctcggcaagagaacattttaatcatctgcattttccacaagtcaacaactaattgcctttataaactgtcaagagaacgctagaactcattaatggagagactcaaaagggtttcataaaaaaataatatatatatatatattaattaatttaatattgtttaattatatatgtaaaatttatatatttttaaagaatcaaaccattaataatgtgaaacttgtttggagaggttctaaagaaattattaaaggtatatcatttgaaatacatgtatatataggattcagaaactgaaatcgataatggtttgattaatttgcaaaataaacgaggtgatggacaatttgaaaatatggttaccatgaaagtacagaattataaaaagcttttattcatattgttattattatatagattagtctttcgttatatgtttttcttctatctttgattaacggtagtttttttttttggtggataattttaatggtacgtgttgatccacctgcttgagaaaatatggagagaaagaagatggaaaaacgaggaaactactcgcttgtattttcattgtaacggatgacaatataattgactaataattgatcttggtgtaggtcaaaaaaaaaacaaaacaatttagctctgaaagtctactcatcgtgttcaactgttcattgtaaaagactacatgtaactgatcccaaaaacaaaaagactacatgtaattgacgtattgttggtgttgattcggctaaaaaataataatttagttggaaatgtctatttttgtattttattgtaaaagactataatttagttgttattttacagtataatatacaattggttgaggaatcactatttgttaaattgtaatgtacctttttttttagtattatagatgtgttagcattcagaatcaacctcatataatacatattcacatcgactagtgtacaagtgaattttagaatagatcttgacttagattggtcttaaaataataatttagcaccacagtattagctagagagccatgtgatttgtatttcaacgctggtttagatgaactattgattagattggacaaaatagaagaaagcaaaaaagtgatcaatggagagccctttgttgaccaagagtgagcacaacgtcgaagacgttacagtccatggcgatccttcctcaaatgaagagcacatagtcgacattacaaccaatggagattcttcaccagctgatgagcacatcgtggacattacaatcaatggcgattcgtcatcagctgaagagcaaactccacatgaggcttctcaatggagttgttcatttataaacggaattgtctggattttggtcgagttagctgtgactttgtcacagattgttgcagccacattttttctgactctgacaaaagatgaacagcatccagaactaaatcatgtacctttgttaatatggatcatctgctatacttgtgcctctattgccactgtacctattgtatgttgccgtttatggcaatatatccgaaccgctagatcagggacatggtacaaactgtgtttctttttttttctttttctttcaggctttaggactgatatcatcaataatggtttttattgatttgcagttacgagttgatcggtttggaaaattttcttgaaacttgcttcgtctgtttggttgtgatgtttttgttgggttttttaacggagttatcatcacgtgatcctagtactagtcaacacttctggtacgcatcgaactaaatttcaaattatgtctaaacagcgaagttcacctctctgaaactaaccaatgtccttttccaggttatggctggctctaattgctttcagttgcattcgatatctgcttcctaatctcacatgtgtcaaagagtgcttcgtgtggcctgtgcttttccttgttaaacaactttgggaaggcataatagcaatgattgatgcgttaactgcactcattgggctcatcattgcaatcattgggtacatcttatttttgatcctttcaatctttatgtacatctgcggataaaaatgatgcatggatcatgtcgttctcttcaacaattgttgtaatactctctttctatttatcaaataaagtcaagtgtcattagcattactgaatcctctattcctgaaatcttcagcaaaactgaaagatctctggcaaataaacattttaagtgtcagcattaaacaatgcggctttgtcttttgtaaaagggcttcttttgtcatcctgaaaaagcgcttcatgttgagaaaacatgcgccatgcccaacaattcttttgagatcgttgagaaaacatgtgctagggttggacataaaacctgaaatccaaaatccgatctgacatcgatccaaaaaatagttataaaattccaacgaaaaaataaattattctatctaaattatctgatctgaatccgatacgaaccgaaaaccgaaaagatatataaaacctcaaaataaaattatatatcaaaaattattagttatatttagttagagttttatattcaagattactaaataacaaaattatccaaaataacctagatatcctaaatttttttagttttatttattaaaattatacatttttttgtaaagagtaaccaaatttttcgtaaaactaaaacaaattttttacaaaattgaactgccggattatttttttttgcaaatgttctcatttgaaggaagaatttgagagaaaaataaaacactagttaacaattgaaacttaagaccggtcttaaaataataattaaagggaaacactagtttaatattgaaactttaggccggtctcaaaataataatttagcacgaaataattaaggcaacatgtgctttgcacttcaacgcggaatcatatgaattatacattgacttaggattattattgacgtcgattcggcctttaaattataatttagaaccaaccataattataatatcactacaattggttagtatcaaacaatttaacaactgttaaatatcactgcaattgacttttagaatagatcatgataaagatcggtctttaaataataatttagcaccaaataattagagaggctatgatttgtattttaaatcggttatttatggactttaatttcgagtgggaaaatagaagaaagcaaaagtgatcaatggaggggcctttgttgactaagaatgagcacatcctcgacgacgttacaataatccatggcgattcttcctcaaacgaagagcacatcgtcaacattacaaccaatgtcgattcttcatcagatgatgagcaaacacaggatgattgtggtgatcatttgagacgtataatagctctttttgtggatgaagggtgtgatggatttacatctagtcatgtttgggttatggtcgagtttgttttgactttgctccaggttgttgcagccattgctgtcctgactctgacaaaagatgaaacagatccacagaaagtgtttcgtacactgatcatctgttataccggtggctgtattgtcgtgctccttattctaggtttggatttctgggattattgcggaaggtataaactataatttgtttattctttgtttttaaggcattagaaaccgaaatcgatagataacagtttcttattgatttgcagattctacgaggtgatggagaatttgaaaaagatgcttgactatttcttcgtgggttgggttgtggtgttttcatggcatcttataaacaactcatcatctccagataatgctacacaacagtactggtgcgcaacaatactaaattttctaactatttagtatgtctcgaaaacagagtaaatctctctaatgatgataatccaccatgcattttcctgttgcaggttatgtatggctttccttgttgtcagttgcattctacatgtgcttcctaatctcccctgcgcggcggcttgttttctatatcctatgatacttcgtcttacccagtctatagacttctttgatgacattactgaaaagatagaggacattaactggttaatctttgtatacttttttggaatcttctcctgcattatctgttgcatttttacttgttgcagcagattatgtagataaaatgaagaatggatcatgtcgtttctcctttcttttgtttaacaatgttgtaatactcttatctatgtatcaaatataaagtcatgactcatgactgaatcctctcttcctgaaatcgttggcctgaaagacacgatgcttacgtcccaattacctctgcatggacgagcttgtgaaccgcatgtacaagtatccattcctttgttggtcctagagctgatccattcctgcatacgaattaataatccaattcaaagagagagtagtagaccgtgagttcaagtcttctgaagcagcatcacgtttgaaccacgttatcgatcggttcagtcttcaactaaagtgaagtcttaggtgtatgaaatgtaactaattagtcttccaacaacacttaaaactcataagagcaaaacttcttttaggaataagtaaaacagagcagaagaagcagtcaagttaatcgggattaccaagaaccaatggtcaacctccaaattcttcaaatttcctggaaaaacacataagggggaaagcaaaacaccaaatataaacacattcctcgagcgcttaactacgtaacaacaatattatcaatattgcatgattacaactctaaatctctatatattttgatgatctataattttttgctttgataaaataaagttatgatctttgatttaaaagtataaaaagatttggaataggagaaaaaaaaaaagcaaaatatagatataactgaaattcatagttgcaaaaggggaagtggagaactggagttcgtgggtgaacggttaagaaaggttggctggtttgacattattggtccatcatgcaacaataatatattaagagtttagaggataagaatttcaacaagtggacgtgccggagtggttatcgggcatgactagaaatcatgtgggctttgcccgcgcaggttcgaatcctgccgttcacgttttttgtttttattttaccttatcccagttttgtcctttttagtttcctcaatgttttcaatcccgcctatattttaccctagatttttaattaattgataccgaatcccgctttctgaaatcattttcaattttcaaaactcatctcctctctctctttcactctatctccttcgatctctctcggtgtcagtgaatttaactgaaatcccatcgccggggaattttccggtgatttagatggctgatgtgagccggagttcaagtttatataccgaggaggatccccttcaagcttactcagggctttcgttgtttcctcgcacactaaaatccttgtcgaatcctcttcctccttcttatcaatcagaagatctacagcagactcatactctccttcaatctatggtaagctcttgatctgcttaaaccttcgattttgatgcattagctagggtttggtttcctcagtgagtaattaattacggagacgattcgagtttgtgattttgacggttacgaaatcaatttcaaatctggctgatttaatcgtatccgtgctttgtttcttctcatccgcttctgggtgttcccaaatgaccaagatggatgctttattttttgggtttcttcaattaggacgaaaagtctgtggtaaactgcaaatacttagctgttactttgaaattttaagcagcatgattatactggataactgtaaggtttaggcgttgtgtctcaaggaggcacaatatctccatgtttgctcagtatatagcctgctaatgtacattggcttcttcctattcttttgggttaatgcttttcttagggatttagttgtgaagaattgcagtacgagagtttagtaaacaaactgcagatttttacattattctttgtcgcttgtgtatattttttctttactgacatatcaacttcagtatctcaaactaaataattgtcaaattcttggcttctatcttacagccttttgaaattcaaagtgagcatcaggagcaggcaaaagctatcttagaagatgtggatgtcgatgtccagctgaaccctattccaaataaacgagaaagaagaccgggattagaccgtaagcgaaaaagcttttctcttcaccttacgacaaggtaaagatcatagccactgatccattgattcagtataacaaatttctttatttgttactttatctgattcctttaccaagttagttgaagcctctatcaaatattcttgttgcagtcaaccacctccagttgcaccaagctttgatcctagtaaatatccaagatctgaggatttctttgctgcgtatgataaatttgaacgtgagttatagaagtatcttttctgatgttcatagccttccacgtttattatataactgtcattagctggatttgaaacagttgccaatcgagaatggcagaaacagactggctccagtgtaatagatatacaagagaacccgccatcaaggcgccctcgcagaccaggaattccagggtatgtactatgagcaactctgatagagcatgtttaagagttgttccatttgcatattttgctttctgtttcccttgatggttacatacttacattttcaatttccaggaggaaacgtcgtccattcaaggaaagttttacggatagttatttcactgatgttatcaacctggaagcttcagaaaaggaaatccccattgcttctgaacaaagcttagagagtgccacagctgcacatgttacgactgtggacagggaagtagatggtgagtgagcacttgttagatcattgtcgctaccattttgttaaatcatgctaccatctgatagggtcagacactgtgttttgcagattcaaccgtagacacggacaaagacttaaacaatgtgttgaaagatttgcttgcttgcagtcgagaggagcttgagggagatggtgccatcaagcttttggaggagcgcttgcaaatcaagtcctttaatatagaaaaattctctatccctgagtttcaagatgttcgaaaaatgaacttgaaggcatctggaagtaacccaccaaaccgaaagagtctgtcagatatacagaatattctgaaaggaactaacagagttgcggttcgaaaaaatagccactcgccatcccctcagacgataaaacatttttcatcaccaaatccaccagtggatcagttttcatttcctgacatccataatttgcttccaggagatcaacagcctagtgaggttaatgtacaacctatagcaaaagatatacctaatacatccccaactaatgtaggtactgtagacgttgctagccctttcaacgactcagtggtgaagaggtccggtgaagatgattctcatattcattctggcatccatagatctcatttaagtcgagatgggaatccagatatttgtgtgatggatagcatttcaaaccgaagttcagccatgctacagaaaaatgtagatatgcgaacaaaaggaaaagaggtagatgtgcccatgagtgaaagtggggcaaatagaaacactggcgacagggaaaatgatgctgaaatcaatgaagaaactgataatttagaaaggctggttagtttctccttcactgtacgggactttgtactaacatatttggatctcttgttgattacatctcttgtgaatttgtttgttatataggcggaatgtgcatctaaagaggttacaagaccatttactgtagaagaggatagcatcccgtatcagcaaggtattaaaactttttgtacatgcatgttatagcaagatcttaaaaagtatagtatatctcctaacttaacttgtccattagatgcttactagttgctaccattaacattttcagtcaccttaaaattgtggcacgaaggttttctttatgccgttatgttgcctacaggtgcatcctcaaaatctccaaacagagctccagaacaatacaacacaatgggtggatcccttgaacatgcagagcacaatcagggactacatgaagaggaaaatgtcaacacgggctccgcttctggacttcaagtagaaaatgctccggttagttcctcatcattgtctcttcacctctgtagagtcttgataattaagtcaaggccaattcatcttcatgttgtttcaattgttagactcggttcattttttctctatctttatccttcgctaaaggtacttttaattgcagtagtgtgctggatccgtatgtttaaatccatgataaaactaacaatctgtgtttgtgtaagggtgttagttccgcttaggctactctaactatgagcttgcttaacaaaatgaattcgagagttcttgattaacttattttcagcaggaggttcacaaatattcacacaaacaaacaaataaacgaagaaagagaggatcttctgatagcaatgtgaaaaagcgaagtaagactgtgcatggtgagactggaggggacaagcaaatgaaaacattaccacatgagagtagagcgaagaagcaaaccaaaggaaaatccaacgagagagaagagaagaagccgaagaaaactcttacgcatgaggggaaactattctcttgcaggaaaagccttgctggtacagaaacttgccaataaatactaaattccattactcgttcttcagagctgtttcgtagaaatattaaacctgacatgtgttctttttttttttgcctttgtcaaagctgctggtactaaaattgaaggtggtgtcagacgaagtacaaggattaagtcgagaccgctcgaatactggagaggtgaaagattcttgtacggacgcatccatgagagtaagtcacatattcgttttacgacatcgatttcaatacggatgtttttcaattcataatttatctactatttccataggtttgactactgttatcggcataaagtatgcatcccctggagaaggtaaaagagattcgcgcgcatctaaggtgaaatcattcgtctccgatgagtacaaaaagctggttgattttgccgccttgcattgatatgaagaatgataagcctaggaaggaaatgatcaaccatcctcttgtgatcattattgatagtatcttgtgtcaatgaccttcacttaggtccaaacttgtcactgtctttctttaaaactgcaacacttttaagactttgcaaatgtaacggaggttttcaactttcagtttagtctcttccatgagactttgtcaacttgcatttgtcactttagtctttgcctctttgatatttctttagggcacttgttgttatcacctttctcgcttaaatgctgcctttgactattttattataaaattataatctcttaataaaagtcaaatataatttatttagggttgctactttgatttaaactgaattaaccagatcaaactcaaatcgtgggtcattgtcgaattaaagtatctctttagaagaaaaacggtatacaattttcttgattctttttttcgccattttcttgataattaactctatgatacaatgattataacaatagtttttaaatacttttttcttcataagtttccaaaacagaaacgaaatgtccactcttaacttagctgtttagactttttcatcacttgaactcgatattcgtaccccctcctcgatccacttttcttggatcgtgtcgtggaaatgaaagttgaatagcaatatcgctattgatacatatggtcctaatcttttaaaagaagtagcaacttgattttggtacaaacagtttactttttaggtaaaatgccaatattggcaagaacccacaaatttggaagagcacaattaaacctgacgttattacttcttttgatacgcttcaattttctttgcgaataaaagtatatgaatttcgactttgagtaaaatccgcctctgtctttagtgacctttctcgaattttgtcgcccgctttttacgctttacttcaggacaagcttacagaaacaaggagatacatacaagtaaaaacaaacaaagactcgagactcaagagtcaagccttttattattatctagttttgaaaatcaaattactaatttatctccgctatagttttttttgttaaacatgtaaagaaccgctatagttttactggtaaacaaaagacaaataatacacctcagcaaattggataacgatcatacaagttgatgaaaaaccacgggctcgttacaacatttgattagacgtcgaccgtacaaaacaagaatagagtccttcttttgtcacgtagtaaatatataaatgttactatgtcttaatctgaccaaagatatatttgacaagttcaaaataaaaccgattgtatggatttggcaaatggcctattctagatcttaatacgtaattcagtatcattcgtagtacccagtcgagttaaaatactactcgctatcgttcttacatcatcaataaaaatattgatctgattcatttggtgtttcataataactcgacttttttttgttgtacttgtttattttcttatctatgtacgtatgattgagtttttctatgtatgtttattgcgttgacctaaagaatcagccgactatgcttgcctttgagatattgacaccttatcgtttgttattttccaattattgtcaccagacgccgtgtcgtttttccaacgattaccagctagaatgccgtgccatttttgctttcctttgtttgatctgactactccaagagttatatgcctacatgcttacaaatcaaaatatatgaaaagtaatgggaattgtgaaactgttgcgcgacttgtgacttgtgagtctcaatggtttggtttagtggtgaaaaacgttttttaggctataccaaattttcaagattggtttagaaatgggaatttggagagtggacaatccaatttgttttcctatattatttcatttgaatggaaataaagatatcagttgcgtaaatgacacgatctggatttggggatgttgtggaccctagaacgagtccaagttgcatgggacatgcagtttcccaaactttgtaatagtatcatttcatgttttttgtttgtcattttcttatcaaaaaataaaaagtttatggttagaaccatgttttgactcctaccatagagagtaaaggatggcttaataaacccgcgcatggtacgttatgcatgctcaaaaaatgtttggcaaaagagatgatcggtccgaaaaatgagattgtcgacattcggataagggcctaatggtagatgttttctgaaatctacttagggagtgacgtgattcacttgtctttagagctatttatgtcgattgtaatgtagacataccgtttcactcgttggtctcatctagtattgattcttttaacatgtcatttaactgccataggttgattggcaaccagaaaaattatcttcgtatatagtatatttaagtcaactttacagaaactattataatttcggaggggacaaacttaggattggatacgtcattcttgttaatataatacatatacgatcattaatattttgctatgataatattgtatttgtatgaaactaacaagctt

SEQ ID NO: 987 - DNA, 84974 bp, Arabidopsis thaliana
gaattccaatctcactagtcattacaactaaaatacaattttatgaactttcaaaatgctgcacatccgagattctaaagtaatgtaaaatatatagtaaactcgaatttcctaatcgttagaaaatactttaagagcttttgatagatgatctaatttttgcttggacagtcaagtggttggaaataatatcattgcacttaatcattagaatttgcaagaaaaaaagagctaatggaccaaatttctcttaaagtaaatatgataatggtgacaattgttgactttgtttggatgtttgtgatgggaatgttcaaatatccaaaaacacatgcacaaagcaaaaaaatacaccacattgacgtgacaagagcattaagacaaaactacgagacacgaaacaaaaatgatgtgtttggtttttagtattttgccaatcttaaagtccctatatatgtcactctcttctcttttcctttccaacaccaaagtttaaaacgattggaccattcgttgacttaaaatattagagggtgtgcttgcttttgtgtgtgatttcttctttctttcgccgtgtctttttttcttcccatttgatcgactaaaggaagataaggaaaaatcataagatattatgtcttaccttcaataacgctgaaataataatgtcaagatgatgacaacatacgaagaattaataaatctaaatggtcaaacaaacaccgattccgttaggtaaaaaaagtaatgatgtcaagatgatgacaacatacaaagaatcaataaatctgacttgtacaaacaccgattccgttattaaaaactcacattatattttatttcaattgatatatattcttataaaacgaaggaataccaaaaatgtactctttcgacaaaaaaattgaaattgcgcagaatggtcttgtataataaaacaaaacgaccaagacattttacatgttctccgattataggtgcacgatattgactaactctctagttgcctgagtaaaactaattgtagtatgtgttattttttttggtttacattgcaagttgtttctgtaagttgagatcatgactaactttcattttggtacatatacactgggaatagtcgagtctaagattcaagaatcaggacaacaaatgaattaactctctagaccccagcagaaactgatctttcatgattagtataattaaggatagtctattgctcactaatagtatctagatccttcttccaaatggagatgaactgattagcttcaagacaaatgaaaggacttacccttcacctagttatttggttgaatacatacagtttccattatgaatctctaaccttttacattgtccttcttcacttggttgcgcaacggaattcagaattagcttgaagatggtaaaactcaaaattggttagatcacaaattcccttacaaatatccaaaggaatctatactcttcattctggtgctaagtatccattctctcaaagatgatattgttggagtaagctcaaagacttgaggaagaagaagaaagtctaaaccaagactaaaccgagttatggctaaaccgagatatggtttaatgtgaagataagattagtgagatttaggagatatctaaatcatgtaatcctattaggtttaggattagaatcttatataaaggacatgttggttgtaacatagcctttgagagagttgtagaatacattgagagtttaggttttgaggaattttcctagactaataaaaagagagtcattcttttgattttgtgttcttaatctcttcattgaaatctatatttggtatcagagcggtttcttaaatcaagagaagaaaacatttttgaatcaaacatgggagacttggttacgatgaaaccaacagagaatggaccctcatccatcacatgtcctatgctgaactcgaacaactacacggtttgggcaatacgcatgcagatcacccttggaatctataaggtatgggaaacaatagatcctggttctgatgatttcgataagaatctcatggctaggggtttactctttcaatccatacccgaagccttaacacttcagattgggaacctgcaaaccgcaaaagaagtatgggactcaatcaagactagaaacgtaggtgcagaaagggttaaagaggctagattacaaaccctaatggcagaatttgagaaaattaagatgaaagaaacagagaaaatagatgattttgctggaaaattgtctgaaatatctacaaaatctgcagcccttggagttaacattgaagttccaaaacttgttaagaagttccttaatagtctaccaagaaagaaatacatccatattatcgcctctttagaacaagttcttgatcttaataacacatcttttgaggatattattggacgtatgaaagtatacgaggatcgtgtctgtgatgacgatgaacctcaagaagatcaaacaaagatgatgtatgcaaattcagatacaaacaatgactattatcaaggagattcacgtggtagaggacgtggtggcagaggaaattacagaggaagaggtcgtggacgaaacgggggaagagacacctctcaaataatgtgttttcgatgtgacaagcttggtcactatgcctctcaatgcccagacagactacttaaactgcaagaagctcaagagaatgcagtgaatgataacaaagatacacaaaacgcagacacactcatgatgcacgaggttgtgtacttaaatgaaaagaactgtgtgcctagcaagtttgaaacaaacatagaaggagatgaatgttggtaccttgataatggagcaagtaaccacatgactggtgataagagatactttgacaatcttaatgagtcaattacaggaaaagtaagatttggagatgattcaagaattgatataaaaggaaaagtacaatagcttttacagatatggatgggaagtcaaggatcatgaatgatgtttattacatacctgacttgaagagcaacataatcagtcttggacaagctacagaatcaggctgtgatataagaatgaaaggacaacacttgataatgcttgatcaatatggaaaacttcttgtgaaagctaagagatcaaagaatcgattgtacaaaatcaggatgggattgagagatgaagccgtttgtacttatctaccataagcgaatcaaatctgtggcatgcaagaatgggtcatactaactttgctacactaaaatctatgattgacaaagaattagtacaaggagttccagatatcaaagttgagaaagaaatctgcagttcatgcttacttggaaagcagactaggaaaatgttcccattagaagctactttcagagcaagtaagaaacttgaattgatccatggagacctttgtgtaccaataacaccgagtactaaagctggaaacaagtacatctttgcacttattgatgatttttttcgttatatgtggacaattcttctcaaggaaaaagcagatgcatttcagaaattctgcaatttcaaaagtctggttgaaaaagaatcaagtactagagtgcaaacattcagaacagacagaggaggagaatttgtgtcacatgaatttaactcattctgtgagaaatcaggtattacaaggcatcttacagctccttatactccacagcaaaatggagtagttgaaagaagaaataggactatgatggaaatgactaggagtatcttgaagcatatgcatctacctaactatctatggggagaagctatcagacacactacttatcttctcaatagaatcataacaaggtcactcaaggacaagactccttatgaatgctttcgagataggagaccaacagttgaacacattagaatctttgggtgcattgcatatgcaaagatagacaaacagcaactgagaaagctagacgacagatcaaggatacttattcacttaggaacagaacctggatctaaagcatatcgactgtttgatccgcaaacacaaaaggtagtagtcagtagagatgtggtctttgatgaaggaaaaggttgggattggaagtacagtaacacaggaaaggatggggatggaagttttgatataacattccataactttggaaatcatggacttcaagattatgaagaaatcagtcaatcagaacatgctaacatagaacagaataagcagaatcatgatgagacagaagaaatagagcatgaggtagagaatgaaacagaatatgaagcaaaagaagaagaggaacatgaaactgcagaaaatactgcagagaacactaactctccaagtcctgtgttaagaagaacacaaagacagatcaataaacctaaatatcttgaagattatgttctaatggctaagaagaaggagaattcttgttactaactctaaatgatgaaccaagaaactatgatgaagcaaggggacataagaagtgggtgcaggcatgtgaagaagaaataaactccatcgaaaagctaaaacgtgggaactagttgagctaccaattggcgccaaaccaataggccttaaatgggtttttaaactcaaaaggaattcagatggaagtattaacaaacataaagctcgacttgttgccaaagggtatgtacaacaatatggagttgactttgaagaagtctttgccccagtagcacgaattgaaactatcagacttcttattgaccttgctgcatcacacggatgggagattcatcacttagatgtcaaaacagcctttttgcatggtgaactcaaagaaacagtttatgtctgtcagctagagggattcgagaaacagggaagagaagagaaagtgtatagactcaacaaagccttgtatggactgagacaagcaccaagggcatggaataacaaactgaataatattctcatggaacttggatataacaagtgttcaaaggagccatctgtgtatcgaaaacaggttagcaaccatgttatgatagtagctgtatacgttgatgatttattcgtcacaggaacaagcttggaactcattctcaaattcaagaaagaaatgtcatccaaatttgagatgagtgaccttggtctactatcatactatctcggtatagaagtgattcaacacagtaagggcataactttgaatcaaagtcgttatgcaatcaagattctggaagaaactggaatgaaagactgtaacttagtccatacaccaatggatccaagctacaagccatcaaaagttgaaactgaaaaggaagtagatgcaacagtttacagaaggaatataggctgccttagatatctgcttcatacaagaccagatttgtcatatagtgtaggagtcctgagcagatatatgcagagtccaagagaatcacacgctgcagcaatgaaacactgtctccgatatctgaaaggaacaatttcacttggtttactctacaacagatgtgataaagcaaagttaaatggatatagtgacagtagtcataacgttgatccagatgatggaagaagtacaacaggaaatgtattctatctaggtgagagtccaatatcatggtggtcaaagaaacatgatactgtggcaatgtcatcctgtgaagctgagtttatggctggaacagaagcggcaaaacaagccatttggcttcaggacttgttaagtgaaatcacaggaaactcaagtgagaaagtcaccatattcattgacaacaaatcagcaatagccctcacaaagaatccagtgtttcatggcagaagtaaacatatcaatagacgttaccactttataagggaatgcgtctagaatgatcaaatagaggttacacatgttcccggtgaagaacagaaggctgatattctaaccaaagctcttgaaaggattaagttcaaagagatgcgagatctcatcggtgtaagagatatggagaaagaagactttgagcttaaaggagagattgttggagtaagctcaaagacttgaagaagaagaaagtctaaaccaagactaaaccgaattatggctaaaccgagatatggtttaatgtgaagataagattagtgagatttaggagatatctaaatcatgtaatcctattaggtttaggattagaatcttatataaaggacatgttggttgtaacatagcctttgagagagctgtagaatacattgagagtttaggttttgaggaattttcctagactaataaaaagagattcattcttttgattttgtgttcttaatctcttcattgaaatctatagatatggtgttgtcaagaatctaaaagctcgtgtctttattaagcaaagggggtggttacagttcttacaacagaagtatatagtttgtgaccggatcttaggaactagaaacgatactaatcattttacttgtcagaacttttgttaggagtaacagcgtcaacaatggcttccatttcttccatcatacgcccgagaacaccaggtcctttaacatcatcaacccttgtcttctcatcaatgtcttcacttcttccatgagtctctttcccatgaaacatcgattccttctcttcttttctgcttccaatcacatttgtcttcacctctaaaaaaacaacaaaaaccaaaacccagaaacgatcaatgagattaaaacaaaagagttgtcttttcgcccaaattaaccatctcctagataaacctaaataacccaaaaggtccctgattcgattacatatagaaaccctaaattcgataaatcagggggaatctctaggaggaattagacaaattaataagtgatgaaactttattaaaaaaaagggcgcaaaattcgtgaaattgatcaaatcggagaatttgtcttaccagaaagagagctttgttttggttccgccattaatgatcttccttctttgatcttgtttttgagttcttcaaatgtagacgagtttgtttagtttggtctgagcttgaaatagtgtgtacaaatgtgaaccatccaatgtaataataacagattaacgagtagatcgaaccgactcgggtattgtgcaaacccgacactaaaatggattgagttgcccagtctaataacttatgggttaaaaattgagaatacaaaagtagaggggttctcagggaatttctggaacaaataatataaaagagaaaacctaaagtttaaccgttattttaagaaaattgctttcgtaccccaacaatttcaaaattcaaaagttctctctctgcttcttctttttaacacttgcgaacttttgtcaacatcaatctcaatcaacacaaccaaattcccagaaacaatctttttgcttttcccacatttcaagctccaaagcttcgaatttttgaatcaatagcttccgaagttgtgatttttgtagaattcgaaaaccaaggtctcgatttgagaagatgggtgggtcaggaaattggattagatcactgatatctaacagaaaacccgtaaatgatcaggtaagctaaaatgcctcgatctttgttgtttcttcctactttaccaaacattgatctctctgttaattgtgcagcaggagaagttaagtgataagagcagcaagaagaaatggaagctgtggaggatttcatcggagagcttagcatcttcttctttcaagagccgaggaagctatgcagcttcttcgttaggttcagagctaccgtctttctcggctgacgaggcttttactacggccatggcagcactcattcgagctcctcctagggattttttgatggttaagagagaatgggcttcaacaagaatccaggctgcttttcgtgctttcctcgtatgtgaatcttcactaatctctagttacatgagctattctagttgtggtttgatcattagtactcacgggtcttcttgttcattgtgttgtctgcgtcttttcttttttcaggcaagacaggcgtttagagctctgaaggctgtcgtgagaattcaggccatttttcgtggcagacaagttaggaaacaagctgccgttacactcaggtgtatgcaagctcttgttcgtgttcagtctcgtgtaagagctcatcgtagagcgccttctgactcgcttgagctaaaagatcctgttaagcagaccgaggtatatattaatctattgagtaaagtctattgaacattactttaaagtatgtgaatctggttgatgtttttacagaagggttggtgtggtagccccagaagtataaaagaagtgaaaacgaagttacagatgaagcaagaaggggctattaagagggagagagctatggtttatgcgctcacacatcaggttggtcaatgtgttttcagaacagaaattcagagtgttgtcgctaattgtaataatgtctcatgagttgttttggcagtcgaggacgtgtccaagtccaagcggaagagcgattacgcatcatggtttgcgcaagagcagtcctggttggaactggtatgatgatgttgggacattttcaaggaaaagtagtgagagcagtgtgttatctgaatatgagactgtaacagtcaggaagaacaatctttcttcaactagagttcttgccagacctcctcttcttcttcctccggtttcgtctggcatgagttatgattctttacacgatgaaacatcaacatcatcgacatctcaatcaccagttgcattctccagcagtgttcttgatggtggtgggtactatcgaaagccgagctacatgagcctgacacaatctactcaagccaagcagagacaatcaggattatcttgcaacggagatgcaagacgcagtgctggttcagaccagtgtactgatctataccctccggggaatgtctgggccaagagccagcgaagctaaaagagcaagccatgatgattcttgtcaagccatattcaacagcctgttggtttatcttttgtcttgtttcaggaacggttcctgtgaaacgtatacacgaactatagatacagaaacagcttctgtgtaccgtttacatatataagaatattgatgagttatttgagcttgtaatttggctacttaggccacttctcaataacttgtaatcagagtcgatttcgtttctccttgtttgtttaaccttccatatgaatgctagtattgtttataataagatatcaagaattaaaggcagacttgtaaacaaaaatcaaaaacttagcttaccaaaaagggtaaataggaactcgtacttccatttgtatctcaaaaaagtaaaattgttccaaaacttatattgtgagagaaaacaacaaaacggattcagatacaacatagtaaatcttactcaggtgaaaccatccacgactatgatggtggagatggatgtatggagatgacttatcagctaaaagcttattgcttaagaggagcttttttctctctgtctgcaattctagcaggggcgtttgagtgtgacttgaaccggcctcttcctccttcgtctctctcctaaagattccagaatcagcagtacaaagttagatagtctcatcaaggaacagagatcataatcatagatttgaatgagagtatgtcaatggaaagattttcgttttatgtacctttttcttgacgatctgaacaacatcttcgtcttcaagatgttgagaaagaccacaattctgtggattgtgccttgtgcttgtgccccaaacgagtgcatacttcatatccttcaccagagtcctgtggacgtggttacagaagtcttccactgtgcagccacctcgatcctgatgaatcacacgtactcaaagatgaatatcacaggtatggaagagtttcaagggttatcttgcaaagtgaaagaatacttacagatgagaggacaaaaggctcatcgaaatctggttgctggccttgcggcttcgagtaaactctcacaaggcccatttcgtcccacatccttgcaagtagtctgtctaagttaagctgtttcaagcagcagtaaaatatcaataaatttggcaaatatcaaactcggaatgaaaacggaaacctagaacagcaacaaattggttttttagcattttctatccttgcaggtctaaaaagactactcgttacaaaacttaccttaagattgcagctaataacaatggaatttggctgccgggatagtctatccacatcatcaattccaacaacatctattttgttgtagacataaacacacttaatatacttgcggttgccttcaatgacatcaataaagtcatccactgtggcattctcacgaaatagcacctgcaatactcaccaccacagtaaaaactaccataagaaagctttcaatatactcacaaatgtctgatgattataaaattctactcataacacttagacaagacaagaataaagcaggaaccacgtacctcagcattgtgaatcttgtattcatgcaggatttgataacagagcttctcatcaatgtgagtcaagggtgctgtagtgttgaaagagattccaccagtctttttctttttaaagtatatctgttgggcagaacaaaccaaatatacataaacaaattccacacgaacccaagtttctgaatggagcataacaagtaaacctgaaggagtttagacttcagcgtattacatgacacatctataatttgatactgctgataagacaagctttacctgcggaggagttttgtttagtcgcaagcccactgcctcaagttccttagtcaatatttgcctgtggccttcgctctaacaaatttaaacaagcaaatacaaagcttaataaacaagtagagcatgacaaccatataccaattcacgtggacatataaaccgtaactcacttttgaggcatcaagaaccatcaatacaaggtcggaagactttgcaacagcaataacctgagaaataagcagtcataacgaaagttcatatcctcttgattatctttttctgataggcgaacttgggcatccaaaaagaaatcagataaccaacaagaaaagaaagcaattggatttcaacctgccttcctcgcccctttccttccgaagcaccttcaataatcccaggaagatcgagaagctgaatctttgtgtcgttgtagtgaattacaccagggatgcatgtaagtgttgtaaattcatatgaggctgcttcagaatgtgttccagttaacatagtcaaaagcgtggactttccgacactgcaaagtacaaccatttccatcagtttccctaaacttatgccagcaacttcttaaggagcaacataattttataaaacaggaaataatttgtaattggatcttgtgagtataagtatctatgcctttacctaggaaatcctataagtgcaacacgtccatgaccatacttggtaacttcaaaaccttccccgcctccactagcaccctgttaaaggaattcggaagacaattacaaactgaaagcagtaatgaaaaatgtttgaaattctacttcagatcaaagcagcaggaaaatcttaaatagattatagccctaaatagataagctaaggtgacgaaaacagtagttactcatcgtctatcttagtagtaaacatacagcaacacaccagcaaggaaaactataaaccgagtaagaaaggaaacaaacaagcttcaagaatcactcagctatatagaaatataagcgcataggctaatggtttagtattttataaagagcttgcattacttttggaggctccaacagttgtgtcctgagttttgcaatctttgccttgagctgaccaagatgatactctgttcacaaacagaacattatcaattagcaaatgtaagatcagaagaaggggaccagaaacttgtcatagtgattatttggaaaattggcttaagtgtctataatgtgttgtaaaggctcgcaatctgtttaattcgtaatgtttgttatctaatttcgtctactaaggatgagcaacatgaaactgataagtcccatgcctataactgaatgttctctatgtaaaaagagaacctgtagctttattcttctgagtccgagccatctcggcctcgatttctttaatcctttcgatgatccccattgtgcttcacttgtttttgctactatctgtggagagagagtaaaggacaaagattgttacttatcaatagactcagaatcagagagttcatagataataacataaaaattttatcaataactcaaacaaaaaacttcagattgctaataaaagagctaaaatcaaacccgaagaatataaagctttaagattcatatttagcttaaatttatcaaaccatatatatccactcagtaaacaaatttgaatgccaaaaggcgaaagctgagctctttacgtctaatcgaacaaaaaaacgtatgtcgagacatcgattccaaacatgaattccattagacgagctcgaaatgcaggaatcatttaaatataactgatttaacaataaatcaaaatcttagcatgaaaaagtaggaatatttgatgtgcgactcacagtggaattggtgaagggcgatctccggcgaagagagggagatagatggagagaggagagagagcacgcctgtaatagggcgcccaaaaaggattacagtcccatttactgtatcttaaagcccaaaggcctttttccatctcgatgcttattattatcttgttttcgtgaaacgctgcgtttaacaaaagggtatgaaacgctgcgtttcatttatgtgaaagtgaattcttagtagtatgtgtcttgttgtgcgaatttgataatctggtttggtttggttcagtaatatggagagaagtgttcatatcatctagaaatttccaaacaccagtcagtttacctttagactttagtgattctgtttaaatcatgaacctaccttaaaactacaaactcgaaaagtaaaaacagagaagttaacctcacagaaaactacaaatttatacgagagtagaaacgctacaagaaaccgtttcttgatctcgatctcttcaccactctagccttgctcactacacgtgaaatcggtgattgtttttgagcaagctctcttacctgcaacataatgtgagtaggaatggccatcgacccgtgtttcttcagacctccttcctgcaaatacacaaaccattcaccactttaatcttaaacccaagttattggttaattggttaaaacatgtggcaagtgctaaccattctgtttgaagaacttgctttttgtagatttcgccatttgtcctatcacaagagacacttgtgattaaacaaaaggattaagaatattgagatgagacagttaattagttatgttgaaccaaccttgagatccacagtggtacgatgcgtgtatggtgaaaatgaaagctttttgatctcagtccatttccctactccatatttggacacaccttcgactagtttttcaacttcagagatagtccaagctcgatgaagcttccttccacttgcactttgcgtgattggtgcatcaacgaaattatcatctgagctatctccagatgagtctaagagctctggctccatcatctcttgatccacatcagtgaaaattggttttaaatggtctttgtcactctgataaccaaaatagataaagcaatgagcaactgtctcataccagaaataaaaaatatactgctagatgattagaaacagtctttttacataccatctcaactaaaaaccataaagttcagagcaattgagacttcgttggatagatagaatcaaagtaaaatggattttacatttacaaaatgctctccactattatagaaatgaccaagttatacagaaatgccagagtgatcttacttctttctggacacatctagatgcagatttgacacctggaactcggttcacatcattgctcaactgaggtgggcttagattcaggttaccctcctctggagcagctttcacctcccatgacttagaacgaaattcctacaaaatgtacaggtaaacaacattatcctctattaccttgattgcagcaaacacaatttaaaagatgaatacttctatattcctttttccagtgtgtaacaatagacataaatttagcatgtgccagataagtaaaaatattttgatagctcatatgataaggaatggggttaataaagatattgaagagcatgaacaatagagacataccccaagagccattatgttttctcttggacgacttctccttacatgagaaacatagggaacctgaattctggaaccagcaagggataccatcctggtgacaacaactctcccttctgaagaaacggcttgaatagagcttggatcttttgaagggatcattgacccgtcaatttgttgtttttcattggtttcttcaatatatctccttgtaggcttcctcactctttttgcagacccatcttcaccttcaaaatcttcgtttccagaataatggtccacaaaagtttcaacaggactatgcccaaaatcatttgaatgcccctttatgccgtcaggactagctggtgtatctatgctttcagtagctgtttcttcatctactgtacccttgctaaaagcatcaattgcatcttgatctccaccaatcagtttgctatcattaattgtcagggtagttgttggaactacacatgaattaatcagtcccattttgattcttcttttgagccatcgtttgtccttagaagtagtttcacgaccaaacgtggctctgaaagtttcttgtaattctttaattgaaagattagccaagcttatctcgcctggtactctagaaaaatcaggttttgaggcagcagttgacaatgcaggttctttaggactagctgtagcatttaagacatccgtagattgattaatactgcatccatttgatgaaaaaagaattggttcctgcagcaaaactttggatgggactagctccacattcccagacagctcagtagaaatctgaaatttggtatccggaagaacaaaaagcatctgagatccattcatcaattcctctttagactgcaaaagtttcaaaggtggagtaaaattgatggctataacagccaactgacccatgatagttatacaggaataacaatattagaaagttctgtttctagattttgaagcaagaaaacaaacctcatgtcgagagttcaaattttctgtatacggtcctgcagtttccgactgaaagaagcctggattgaatagctgagttagaatagaaaatatatcgctaagattcacaaatgattgtatactaaaaaataactgactgtcctagacatcagataggaaaagctacagacacgaacacatatttacacataaaacactgctcagacctccgacattgcaagtaacccaataaatacccttgtcgtgcagtcctaaggaaattctatccgtctttgcgtgtatacaataagtctttcctctaacaatacatgcagattacacaaattaaaccgacaaaggctcaaacaggagtgattcaacatgtataatatgcttagagtgattaggaccaaaccttcaaaattttctagctgcagaaactgagaaggtgaaccttcatcgggaatgtattcctcagtttgtataggatctggtaaaacaggcatatcttgctcgtttttctcaagcaaattcttgacctccaacatctcttcatcagttgcaggaactagactcccgtcgcctgcaacctaatacattcacataaccaatctcaaataagatactgaaaggctacaacttgtaaccgcactagtcagaattcttaaatctaggaacagcaaaaacattatgttctataaatcagagatacacatttatgaacatacccgcacaagcttgtacgtaacagggtttccaatttgatttgttgaggaaagtgatccgtttcttgtctgaaaaatactgtcttgaaacgtctctccatagtctttcacatttccaaacattgttaccctattttaacctaccaaatgcaacttcaagcatacaaaaaggcataagcaaatatacctatatgcttaataaatttttcagtcatgcaaaaaactcttacacaatacaatcactgatactcaaaaatcctagctttaccctttcatagagagaaaaatattggggatagagtataatcttattaggattattactatatatcttgtgatagagtttaggtcctatatatctctaatccctcaaatataggacctaaactctatcacaagatatatagtaataatcctaataagattatactctatccccaataaaaaacaccactgcatcttcagaataataaaaaagctttcaactttaagctaccatttatcaaatttcaatggaatttgcgtgttgcagttctcacatcaagtttttggtagattccactcagtttaactcgcatcaaacaaacccactacttaattttcaggatagaaatatgaaaagtcacgaggaaagcagttaaccgagcaacaagtacacaagagagttaccagagaaagtagaacgggaacggagaagaaaaaaatcagactttccagtgagctcgtagtttcatcggcgagaaatctcggaggagaggcttcttgactaagctaaaaaccttggatatttgcaaacttttttgttctgctttatttttttttgttttggctcgctttcggctttttttttccctaatacagtgccatacaggtccggattccaaagctttttattcactcgatttcagaatgccaattgggatccgtatagttatgcgggaagctcctagaggttgccacgtcagcgaatagcgaaatatctgccgaaaaagagccaactacgttccgtcccgactctcgtgcaccacaactgcgtgccgtcttacacttcaggattcgaatacgtgtcgtcttagtctagagttcaaaatactgcactcatgtaaaactcgcacaggctatacaacaacaaacaaacatgcaatgataacactggagaccaaaggtaagaaaaacagaagaatccttaaaccgaaatgtgtaaactttacaacaagtttcttgtaaagactcttaatcatttcaatagagatattacatttgtaaaactctcctttctcctttctcctcaatcaattagctctgaatctgaatatgaatctatgataatcaactttgatggtcttggacctcttggttacaatactaaccggatctaaatctcttctggttagctttcccatcagatttcaaagttccactagattcaccttctgatgaagcatccactgatcttgcaaaagaatgagagagatcaccataaaggctagctactcttctgatattgttgttgagctctttgatcaaccccacgtttcgacccaagttatctggttgtttcgattcatggttctgattgatctcgttgatcaataatcggttttggtccaaaatgtcttgaacatccacaaagctcttctggaaactctgcaacaatttcccatccatattgtgtctgtctccaaatcctgacaacacatctccttccattatcggctattctaacaagatcaaactcttgattgatcctttactcctgtttcaatacaatcatgtcaaaaacatggaaacaaagccaagaaagggattcaatttaacagaaaacgttgactagaaaagtagttacaataacacaatttattctctatgcgttgacctgaccctatcttgattttagagctctaatccttaaagctcacataagattccattagtacagacatttccagtaataatccaatcttaaaacactcaaattcagacaagaacccaacacgattcagctgaatagtcatgaatcgtacaaagtagggaagaggattttgttcttatgaacccaagagggaaagagatctataaagggacaagtaaaagctgttccacaaatagctttaaaacatcacaatagtagtagacacagattcagataagattcgcaatccttaacaatgcaataagacccagaaaccctaagcaaatacacagtacagaattcaaaagagttccgatccagtttccttaccttcggaagtagaaagctccgatgacagataggagatggaaatcgaggatattttctcgggaaacaaacaaagaatccttctttttcaccgattatttatatgattacaaattattggatactgtaaaaaaaaggaatctacttgtcttttgagacagagatatttgagcgaagctaatatgttctaaaaaatgccatttataaaaacgatatatttttctgtatttactctgaatcacgctttttgcagagagagatacggaggttagagaagccagacatctggatcgaacaaacccgacccgcaaaagattcgtgttgtttgtgcctaattcgcataaacagcatgtcgtttcgattggaagtaaaaacggcccgtagtttagaagcgtgaggaatcaatgttttaacttgctgacgtatggccattctcgtcacttactttgtctcaccccctaattaaattacctcgtaattatttcgcagttccttgagatcgatcccgtcaccaagaactcgaatatctctttctcttcgatcgtttcctcttctgatcccgccatcttcgcctaactcccaaatctatataaattattccgacacctctccggcgagaatttccggttaatcggctgactaactaatttatcggcggaagattttccgttgacctaaacctaaccgagtaccttttggatgatgagaaatggattcgattgtatgcacagcactggaggaaatctgttgtcaaggaaatacagggatcccactcgtttctctctggtcaaggctctctcctcctcctctttctccttccgtcaaggctcatgtctggagaaatcttctcgccgtccctcagctccagttcaaggcgaaaaacactgtgtacgaaccatctgatgcttcgattcaacagctggaagaggcactaagactcgatttgaggatcttcgcgaatgagaagctccgaggtaacttcgttggcttgtacgatgctcagtccaataacacgactatttccgctattcagcgtcgcgttctcgagcggcttgctgttgctcggtaagtgcaaattctgtattctcttctagctactcttaagagttcgagctcgtataatattatgttgtatgtgtttgatgcagagccaatggagttgcacaaaatctgcttgctaaagagtttggtatcgaaggtagaaacttcttctatattgtgaagcaccttgagtctcgaggtttagttgttaaacaaccagcgatagtgagaacaaaggaagttgatggtgaaggggattccaaaaccacctcatgcattagcaccaatatgatatatttaagtcgttacgccaagcctttgggttcccagcagagatttgagatttgcaaagaggactctttattggagcaagaggctactcccgccggagatagtttacaatcagaaagtacaaaagaggatacgctcattaaagattttctaccagcaatgcaggcaatttgtgataagcttgaagaaactaatgagaaggttagtaagtgcaaatcatttctttctttttttatcaagctggagcattctttctctatactcatttgttgtagtgcaggttctagtcgtctcggacattaagcaagacctcggttatctgggatcacattcaaggcatagagcttggagaagtgtaagtatatatttcttttttctcttatagagcaagaggaaagagactttcaacactttgccaatttctttttggtagatatatctttgaaaaattaatacgtgtgcattttggattacatcaggtttgtcgccggttgacagattctcatgtagtagaggagtttgatgctgtggtgaacaataaggtgaactataatctgcatcacattccatcatgcgaatacatttcaccacatatggtggccaattgcctttatttagcatttctgatctgttttatttggctataaaatatttggattgtcttttctgcaggttgaacgatgcctccgtttgttaaaaagattttcagcaaaagattttaactactctgggaaaaagcaactcctaaaattcggaaggagtattcaaaaaacagaacaaactttggagcttccaatagataatcaaatttatgatatggttgatgctgaaggatctaaaggcttggctgtgatggaggtattcatttgatgggtttgccttacagtttttggtattaccttatgtatttggctgaatttttttgaaaaggcattaaatattatttccaccaggtatgtgaaagacttggaattgacaagaagaagagctactctcggctttatagtatttgtttaaaagtcgggatgcatttacaggcagaaagtcacaagaagactagagtatttcgagtttggacttctggtaatgctgggtccgaatgttctgatcggtttcctgagaaagctgaaaatcgtagctgggaaaacaatgtaccgattaatgattttggcacacctcatgatactggtggattgactcagacctccatcgaacacagtattgcaatttctgatgctgactttgctacacctgcaaggttaactgattctgaaaacaattcaggagttctccactttgctacacctggaaggctaactgattctgaaagcaattcaggagttccggattgttccccatctgatgccaaaagaagacatgtccttacacgccgtaacttacaagaatcattccatgagatctgtgataaggttgttgatactgcaatggggtcccctgatttggctttgtcagaaatgaaccatctcgctccaccgaagccagctaaaccaaaggtgcaccaacctcagccgattactgttgaaaactctcgaagagagcggagaatacttgagcgcttaaatgtacttactgttctcttttctcgacattgaatgccataatttatttctccttttcccttccaactgaataattgtttcttctttctgggctggccataggaggagaagtttgttgtaagagccgagctacataaatggcttctcagtcttgagaaggacaggagctccaaagtggataggaaaaccattgacagaattctaaataggcttcaagaagaaggactctgcaattgcatgaacattagtgtcccaaatgttactaattgtggtcgcaatcgtagctctgtggtagtttttcatccatctgttcaaagtttgactcgagacatagttggtgaaattcatgataggattaggtcttttgaactgggactccgtggccagaacttatcaaagaggaaaagcaacgagctaattccaatattgaatgacattcagagaggtcaaacgaatgtggatttggatgcgcgtgctagcaaatcaggagccatgcgagccaatgggtttgtgcttgcaaagatggttcgtgtgaagctcttacattgtttcctttgggactattttagttctttgtctagctgggacaatgccttttcgtctatacatgatcagaaatctgacaatttgtttgcacttgaagatgcttttaaagccatgccactcgaactgtttttacaagttgttggatctactcagaaagctgatgatatgatgaagaaatgtaaacaggttatgcgtctttctgagcttcctggtgaagagtataagcttctaatggacactcttgcaactgggagattatcgatgcttattgatattttacgtcgcttgaaggtattatcatccatataattaaagatcacctcacgtaccttatttcgatacatattacagagaagtgtgtgcagttcaaaaaatgaaatgtgcctatttttgtagttaattcagatggtaagtagtagactcagacgcgatgaaattgaggagaagtatgctaatctaacacatgcaatggagcttaagccttatatagaggaacctgtgtttgttgctgctacatccaatgttatgtctcttgattttcgtccacgtattcggcatgactttattctatcaaatagagatgctgttgatgaatattggctaactttagaatattgctatgctgctgccgatcacagagctgctaagctagcatttccgggatctgttgttcaagaggtataagcttgatccttttgttttatggcttattataaagataacagttgaactaaaatattataacctagtcaaactatttatatgtgttacgcttatatctctgtcaaaaactgttttgtccctgtgacaataatttcatctgcctattatgttaggtattcagaaaactgtttctaacagtcagttcttctaggtttttcgtttccgctcttgggcctcagatcgtgtcatgacaacggaacagcgtgctaagctcttaaagcgcattgcaatcgatgagaaggaaaagctctcattcaaagagtgtgagaagattgctaaggatctgaacctgaccttagagcaggtaaagatatgttttttatgtgctgtatatattgtctaagtcacctgcctaattaattaggggaaaaaatatttgagaccaggtgttactttgccaaataattttctttttgtccttgatcttagagataatgccaactctttatttctttgatgtttcagcttgatttcggttttaaagctttctcatatctggtccacaaacagagactgacctgaatgttctcttttttcctcttgttttactggggtgacgtagctaatagtttttggttgcgtactccaggttatgcatgtctatcatgcgaagcatggaagacgcgtgaaatccaaatcaaaagataaacatttagctatagataatagctcttcttcatcttctgggaaaagaaaaagaggaactctcgtaaagactacaggagaaggtgtcagatccataatagtagacggagaaaaggttctgaattccgatgccattgatgcctcaaatagtgagaagtttctaaattcattagaagagcatcaggagcataatctacaagaaaattcagagataagggatcttactgaagatgaaggccagtgctcttctattatcaaccagtacgcaagttcaaagaccacatcaactccttcacaaagattttcgtggacagatgaggcagacaggtacttgacacatccaatgaaagttcagttgtatatctatatgtttatatgaatgcttttcatatatcaaataggttctcgctgtaaacgtccaatataatgttggttttaggagtctttcttcaggggattcattcctcagaggaggccaatacctcgggagttcctttactgagtcaatttcaatgaattcatgcttttttactgtcaactaatttccatatgattgagtgttcagtcgttcattctttaaactttctcctgtcttaaataatttatgacatctgattaatttgcaccactgacacaagtattttctggtcaggaaactgttgagtcaatatgttagacatcgtgcagctcttggggcgaaatttcatggagtgatgtgggcttcagttccagaactgcctgcccctcctttggcttgcaagcgacgggttcaaatattgatgaagaatgataaatttcggaaggcgatcatgagtctttgcaatctgctcagtgagcgttatgcaagacatctggagacgaaacagaagtgtttacccgagagcaacaagtcacatgttcttgttagatatttatccccggcaattggcggaacggattctggttctgttgagcaaggtaaagatatatgttttgatgaagaaaaatgggatgacttcaatgaaaagagtataagtcaagcctttaatgatgttcttgagctcaagaagatggctaaactggtggcccctaaacggacaaaaagttctcgggaatggtcaaacagagatataattgatgaggtgctccttattgcttacttttctttcgtttgacatcattcccacaatttcttcacttctctgtgatgtttcacttttattgctacaaccattcatacataattttactggaaacattcaccctgatctggaagatcttaatttcagtggttcttttgcttttggcaatttatgataaactaaaaaatgaactcgcaggggagtgaaatggttccacctgcgatccactcagaggacattcaaaatgtgtctgtggatcaagttaaagatacatctcgacgatctggtcattatcgtcttcatcaaactgtcaggcctttagatgaaaaggacaacgatagtatacaagtacggaaatctctggcagtttctactgctgcagaactgttaaagcttgtctttctgagcatgcctactgcacctggtatgccaaatttgctggaagataccttacgacgttattcagagcgagacctcttcacagcctatagctacctccgagacaaaaaattcctggtaaagtttcttattactttcctgttactgggttaaaacttctggctacttccttttgttatatgcttatttgcttatcagttgtatgaagaggcataagagtgtccatgtgaaaatagcatagcatagcatgtttaactttaaaggatcatcttttcttcctttttttggttcgatgttgctgtcaaaaccacataatgtgcaggcttgatgtttggatgagatggtgaataagaaacagttttctacatttcttcacgtcactttattattttattttcaatcaagtttatttgcttgtatagataaacttaatgattgtatttgtcaaagaaaactgaaaagtcattgaattatgggaacgttccaggttggtggaagtggtggacagccatttgtgctttctcaaaacttcttgcacagtatttcaaagtctccattcccagttaatactgggacaagagcagccaagttctccagttggcttttcgaacatgaaagagaccttatggctgggggtgtcactcttacttcggatttgcaatgtggtgatattttaaatttcttttcattggtttcttctggtgaactctctatatctgtatccttgcctgaagaaggtgttggagagcctggagatcgaagaggtttgaaacgtagagctgatgacatagaagaatctgaagctgagagttctaagaaattgaagctactaggcgaaggtgaaatcaacttccgaaaggaaaagggtttccctggtatagcagtatctgttcgtcgtgcaactataccaacagctaatgcaatagagttgtttaaggatgatgactctcgcactggtgaatttcatttgaagtggggagaagcgaatagtggctgtgattctgatgacatgaaagaacttttcaactctacagattctactgtcataccaagcagtctaggtgattctccctggcaagcgatggccagttttactagtagcattatgtccgaatcaacagatgaggaagttagtttattcagtcccagggtttttgaaaccgtttccaatgcccttcagaaggctggtgaccaaggtctgagcattgaagaagtccacagtcttattgatatcccaagtaagcatcaggcaaacctttttaacaggcttttatttttgcatgtgctggcgacttccttcagtgtttttatttaacctttgtgtattcatcaggccaagaaacttgtgactgcattgtagatgtacttcaaacatttggggtagctttgaaggtttgtctgattatctcttattttacaaaccctgttgcctttattaagatgaaagttgcagtgcttggtttactagttttacttacctggattgtgaactcagttcatgttacatcgttttacaagcaacttgttaaccatacaatatcttattcaggtaaatggctataataatttccgtgttgtccattccttctaccgatcaaagtacttcttgacattggaggaagatggaacttcccaaaaaagtcaacagtctctaccagtgaactacctagagagagctgttggggaacataggtccaaagatatcattgctagcagctacagtacttcacaggacatgcgagagcatgtcgctgggaatagcgttcacaaggttacaattcttaaccttcctgaaacggctcaaacgagcggtttgcatgaagcatctatcaaagctccatctgttacttttggaacgggtattgaaggtgaaacaaaggaatcaacttctgaaaagtcacctgtgcctatatatccatgggtaaacgcagatgggtcaataaataaaattgtctttgatggactagttcgccgtgttcttggtaccgtgatgcaaaatcccggtataccagaggtaaatacttctccattttccacccaataagtttttgccatcatggtttcgaactctatgaaaatactaatcgaaacattcatttgtggcaggacgagataataaacctaatggacatactaaatcctcaggtaataacaatcataaaccctaaaaacctcttctcctatggtttcatttactgaaactgatcaaaacttcttaaagctctttgtctgttgtctctatatacggtggttgctctctgataacattctgtaaaaaaatttcaatatcagagctgtagaaagcttctggagttgatgacactcgacggctatatgaaagtgagggaaatggtgcaaaccaaattcaccggtcctccgtctctgttagccggtctcgtctcaacaggtcctagaaaaccggaacttattcgccgcaaacacttgtttgcaaactccaagggactctttgccttgtaatgtctgtaaaatctctctcagtctctctagttcagtccaaaactcgatgcaataaattattaatgtttatgtgggaaattattatagttttgtgatttaaagtccacaagatcttgtatttgtatagctgtaggtgtgatgattaattctctttatagattcatagtgttggattcatatccctattataggtgagttttggaaggttttattcagttaaaaagagagcttattttttattcaactaaaaggtctcctacaagttacaagttataactaaataaagatttctatttaatttgtagacggaaaaatctccaaataagaatgaattaaatgatcaacaggatgttgtttccatctagttagtgtagtttacttagttaatcaataaaggtttgaatcatacagaatcaagaggcagaaaaaacattgtgctgaataaatttaaaaacataattctgaaacaccaaaaacgtgaaaatagtgcacactagtttcatcacctgagtaacgaaacagtttgactttttgttgacgtatttgatgtaataaatggtgaagagaaaaaaatgtaaaatattgattgcattggtctatgagataatcctacaaaaagtgttagagcagttgtgcgagagtctggaataatgaaacacagttcagtacaagtatcttttcgatcatcttccgctaaatctactgacgtgtacggctcagattcttttttccccagaactgattcaacaaacaaaacaaaaaaaatagaagaccatattttatcggtcaataaacttctgggaaaaaaataaaacacgatttcatgagagaaaatcgacaaaacccctctcaaccaaataatacaccttcttcttcttcttcttcttcttcttcttcacagctgggtttcttctaatggcggaaccgattccctcatcgtctctgtcaccgaaatctctacaatctcctaatcctatggaaccttctcctgcatcttctactcctttaccttcatcatcatctcaacaacaacaactcatgacagctccgatttccaattctgttaattccgctgcgtctccggcgatgactgtaactaccaccgaaggtattgtaattcagaacaattcgcaacctaacatctcctctcccaaccctacttcttctaacccaccaatcggagctcagatcccgtcgccttctcctctctctcacccttcttcatctttagatcagcaaacacagactcagcaactcgttcaacaaactcagcaattgcctcaacaacaacaacagattatgcagcaaatctcttcatctccgattccacaattatcgccgcaacagcaacagattctgcagcaacaacacatgacttcacagcaaatcccaatgtcgagttaccaaattgctcaatctcttcagcgatccccttctctttctcgcctgagccaaattcagcaacaacagcagcagcagcatcaaggtcaatacggcaacgtgttgagacagcaagctggtttgtacggaaccatgaactttggtggctcaggttcagttcaacagagccagcagaatcagcagatggttaaccctaatatgtccagagcaggtttagttggccaaagcggtcacttgcctatgcttaacggtgctgctggagctgctcagatgaatattcaaccccaattattggctgcttcggtaccccattctttacttttactctctttccctttgttgattcatatctttctttttgtggatggagtctcaacttgtagtattgctttagatggagatagtgttgcaattgtttttgttgatatgaatatagtaaactctgcagtttcttctattattgtgtgaacaacaaatcattttctttattctgagacaaatgagcttttccgttgtagccgaggcagaaatctggcatggttcaaggttcgcagtttcatccgggaagttctggacaacagttacaagggatgcaagctatgggaatgatgggatcactgaatttgacctcgcaaatgagaggtaaccctgctctctatgcgcagcagagaatcaacccggggcagatgagacagcaattgtcacagcaaaacgctcttacttcacctcaggtatgagttttaaaaagtcgtatcttacgaacttctttctctcacattgtgaacttttttattgactacttgttatatcttatggctcatagatacaaatgaattctcgtgttggatcctttcacttcttttgacttattgttgcacagtcttaattaaactgatccatgaggttttggtactttaatcaatcacttaatattgacttgcagagtttttccaatatctgtaattggcaactaaaatacctgaatgacgcgggaatgatccttaaatttgacagatttaccgtgtaattgtaaaatctggcctatgtatctatagagtactaatacatttatgttgtgcaatatgcaaattcctgatcattttgtgagcatgtgtttctttcgtttcaagttaaaaaatagagttgcgtcgaatctcatgtatcctgtatcctcttcacttggtaactttttgtaatcccctgtgtaggtccagaacctccagagaacatcttctctcgcatttatgaatcctcagctatcgggtttggcccagaatggacaagctggcatgatgcaaaactctttgtcacagcagcaatggctgaagcaaatgtcgggaataacgagccccaattcattccgactccaaccgagtcaaagacaggctcttctcttacagcagcagcagcagcaacaacaacaactgtcctctcctcagttacatcaatcttctatgtccttgaatcagcagcagatatcacagataatacaacagcagcagcaacaatcacaattaggccagtcgcagatgaaccaatcccattcccaacaacaactacaacagatgcagcagcaactacagcagcaaccacaacagcagatgcagcagcagcagcaacaacaacagcaaatgcagattaatcaacaacagccatctccaaggatgttgagtcatgcaggacaaaaatctgtcagtttaacgggttcacaaccagaggctacacaatcgggtacaacaacaccaggtggtagctcaagccagggaacagaagcaacaaaccaactccttggtaaaaggaagatacaggatctggtttcgcaggtgattttccctcttcaactctatagcttgtttctatcttcttcttcctttagaaatatgtttcattctattgtatcatgatgttcaggtggatgtacatgcgaaactggatcctgatgttgaagacctccttttggaggtggcagatgacttcattgattcggttagaagctaatatcaattatttagtattaacttcagcttttttatttacagatttgtgaaaacctatctctatcttacctaaacttcattgcaggtcacatcttttgcatgtagcttggctaagcatcgtaaatcatctgtattggagcccaaggatatattactccacctaggtctgtacttaatttggtgatgagctctgttcaatgtgaattctaagtagttgctattgttactcattttactgtttgctgagttataattttttgcagagaaaaacttgcacttgacaattcctggattctcaagtgaggataaacgtcaaacaaaaactgtaagtgattttctttttaaaactctttaaaagcacaaaaagtatatgtgaatgtgcatcaccacctgaatgtccaataaaagaaaaagagaaagaacatgagtttgctagatattgatcccaagttaacaacttgcaggtaccaactgatctccacaagaagcgacttgcaatggtaagctgaatgatattccaaacatctctttgtgtacagtcgtgcttatggacctctctctgaagtttcttttttgtgttgtgtcgccaggtgcgtgcattactagaatcctcaaaaccagagacgaatgcaagcaattccaaggaaactatgagacaagcgatggtgaacccaaatggtccgaatcatctcttaagaccctcccaaagttcagaacaattggtttcgcagacatccggtcctcacatattacaacacatgacacgatactaaaggacttgaatatagaagcctgagccagctctcactgctatgttcatcttcttggtaaacacttttatcatacacaaacaccacttacataaataagaaaacctcgggtatttatggctggctatatatagtcctcaacttttcctattataggttgcaggagtttacacatctatggagagttgaaggcacaagtagtgaaactgtatgtattatatataaaattcatgagtcttataggcaatcaaataatacagttatttttttcgtagttgtgggactttctaactatttcgtcttcttttttagtgggtttttgttttttccttttgtaattttagttgtcctctccattttaagcttgaaagttttagctctttgatgactcagcagttgatgatatgttaaatgatgtcaactatatatacacttaaatcaaatgcatatagatatttatatgaagaagaagtatatacaaaaatagaaatcaagcacttaagacaaacgaagtaataaaattattaagagtagttggtgcttcaatgttaacagcgtgtcctgtttcctttattatctctaatcttgaactctgtaaatgcctgcaaaagtatataatttttattagtttcgacatattggattcacgatcaataatcacatgcgttcacgttcgatgtttcatctcttttgacctagtagaaatattaaatattttatacggatgtagttattatgacaacacttgttatgggacttattaccataaaatatcaatgtagtatttacctttgcagccgataagcatgctccaagggaaacaccttgtccttgtctccccaaacgattaacgttttctgcatcatatatatcaaattaatcagagtcatattttattcgtagattcgaataaagcatctcaatccatagcatccctctagaaataatataaaagtgaaagcaaacaaacgagaatagtgtttccactatccaaaagatgaatacttaaaacccataaaaacaatccaaaacatcaattagttctctatcagcgacacattaatcatcacgccaacttattaatatatatcttgatgcttagagttaaaccattagtgatcaggaattaaaaaaaggttaactcaacgaaattttatactacctgggatattacaggcaattctggttcctcctctcgttccaacaaattcttagctagctcaagaagctcctgccgatttttctcatacattacctataagaagaggatgaattttgcaaattccaaacctttaggatcatgactaacgaacaaacaatttacgggaccagattcggaaataaacagataaaacagaaacagaacaaacttacagcgatgaattgggaaaggaaaaagtctggaacccaatcgacgaacgttaaaccagtattcatagatatcttaatcagcaaccgtagatccatcggagttttcggaactaaaatcttcgaacaatctccgccgtgttttttcaattctgccgtcttctgctgctgtgtaaatcccactccactactcacaatcaccaatttctcaaccatcgccggccaaatctccgccattttatacgccacaaatccaccgtaactaatcgaataaatcgatattcctcctcctccttcaacgcatcccagtttcttcaatcctccgacgacgctcctcgcctgaatctcaacgctccgatctctattcttcgaatacgattttccgaagaagaccaaatcggggatgaagagattaaacgatttcgagagatccgagacttgatgaacgaattgccatttggagtttcctccgtatccatggagcatgacgagattctgccgagagattctacggtggccggagatccagaaatggactgtggtttctccgtcgtctagatcgacggttacgggtcggagatcgcagaaaactaagaaatacagagataagaacgaatctgcgattttgatcagtatcggaaaatcgaagaaacatgaaattaagcgttgaaagagagtgaaaacgattgagagataacgacggaaaagatgaacgtgtttcatggacgccatttttaagaaaagtggaaatcttttgtttttgcagagaaggtgtgggtgtggcgatagagagagtgtgcttttaaatttcaaacacagtttctaccggtccggttaattccggttaaatcttgtttaagcgatgttattgatttgagttttgttcaaacgtggcaaagtgcatgttaagtgtttcgacatctaattctataaaaagtttatttaacattttaacaaacaaatctatatatgaaaatctaagtaattgagcttattattacagctgtttaaagaatgtcctcgcacgagagcgactgatccacacatcacacatgtactcatggtataaactatatcgtctctttgtcgtctctctacgtcaactaataagccacactcgattaagtcgctggctcttgttggtgaatctgcatcgttggatcagaatctaccaaacaaagacaaaagttttacccgttggattggatctctcttgccaactttaagttcctagatttctaccaatgaaatgatggcttcaggtccaagttaggttaaaatccaagaagaaacctttgtcttcactctcaagtgaatggctgagggtctctaccttgagttcccaggagaataaaggtactcttctatctctcattttttttttctcatagcaccttataatttcaaggtttatactttatccgtgtgatcagaaggtagtttgagacccaagttaggtcagaacccaagaagccatctcaaatttcaggctagacttaggtcaataccgaagaagatagtttacattaacctttctagtcattttgattttggcataactttacgaaaattatctttatatattatatatcatggtttacaagaaattatttatgtgttttctacatttacttcttataaataatttccttcttaattatatagatacactattaggtacacctctacacgtaacaccaggctcagaactcggaaccaacaactcataaggcaaaacaccagccccacacctatttctacggtcaggatcagcgttccttttctcaatctctttctctatccgtccgatctctgccgcaaatccataaaacgcttcaacaatctccgcatctcctgtccaaatcgacggctgttgtctctctccaatatactcctcatccggcgaatgcgtcgacaaagtatcaaccacggccataaacttcgaagtctgcgccaaacttggcatcgacgagaagtaatacttctccggatgggagatgaaactcgcgtactctggatccgactcgtcggggattaaccgccgcatcaacggtggtcggtttgggacgtagccaccgtaagggtattgtccaaagtttagagcggcgtgttgagcagaggcgagccagattagagtggttagaatcgacacgaggtcgtcgacggttgataactccggccaccaatcagcgtcgcggaggtcagcgtggccgacgttgattgattctgagtaccaagattggagctcagagtctgttttgataaggttcgggtttggatagtagcgttcaacataggttcggacccaggtttggattgctgaccagagtaaaagaccgtcgttggcgtacggatagtcttcgattaggagtttaagaccatgtggttgtgttgcatcaggaattgccattcctctgaaaataaacacaatttaaaataaatttaggtattatatacaataaaaaaaatacatttttagcagctaaaaatcttcaactaaaacaaaaaaaggtttagctaaatacctgcgaattagatcggcagggaggccttccatgtcgaaccgccagctgcttttgtatgcggcggcactcatttccatgccgtatgcaccagcagtgaagcctccttcgatcacaccatctgcactgatcaacgattgtctagccaaagcattgatttccaacgtgtatctcatgtgtggatccagtagcttgaatatgggatgcatagcgctcaattgcctgtgtgcagctaatataaatggctccaagcatgcatgtgtccgtaacctttacaaacaaatataacaaaacatgtcaatatataactctatattcactacttgttacataaatgtgtattaacatgtataagtactaaccagtgattgacaagctgatggacaccagcatcgttagaactaacgtgggctttagcgagctgccacatccaattagaggttgcatcgactggaggtgtaagcacacgcttggaccgatgttttggaccatggggagggaggcttagctcaatggctaccggcttaagtgtgcctagacgagtcaagaagaagatagttcgagtagcataggctttgcgtccgtctagcgcattaatccggtctaggaacggtaagaatatgtcatggtaatccaacatatacaatctattctcttccaacgcctgaaaaaaaatagaaaagactatttaatttaatcattttttgattagtttagttaatccattgtaaggggaattatatagataaacgtacttgttgtacggagaatccgtcgaggtgaccaatgatatggtcgtcagtaagagcggagtgttgtggaccgtagatcttggggtcaagattgctgaccggtggaaaagtcttgactctctcaatgttcactggattgattccagctatggcttgacgtgcgaattcgtcatctcttaaccatgcgtttttatcctctgcattatttatagtcgtcagaaatcaattgactaattaatatttccaaagattaataactaaaaagcaagttacggctatgaatgagttaagtaaaagcaaacgcgcttttgttatccgcaaaacgaattaagagaatcacgtggaacatatgttgttgttttagtactctagtaatgcgtttcgtctgctttttgaaactaatgggtcccaataaccaacgatacacaaatcgccaaaaaagaccaataaaataatgtaaaattcttggaaattactcaattaggggatgcttgctttagttggtgtggggatatgaaatggcattagttcaatttttgtttactaaataattgatgttattaatttagggttcttactcgataatattttgggagtgtcgtatttgaggagtcctttagtagattcttggagggtatcaactacgaccttagggagaggaaacttcttaaagatgtcatcttgaaaccctaacttgagtaacaagccttctttataaagacgatcgatctcgccgaagtctgcaaagtcctcagctacaatactggctttgagcgacggaattaggtggtgtaagactgcttttagcctccctgcagcaaaagtgtcctgcttcgactcttcaaattgctcgtctcgtggcacatacataggtaatggcttctctactcggctctccgcgtctttatctgtcaacagtacagatcaatatgagaaacgtttcataaaaccaaaacagaaagtgttgttttttttgttgaatgcaaatcgtactaaaaatgtttcatagagatattgagctacaaaatataccagaaactgttgattggcgaccagtacgacaacgtctagggtaaggaacctctttgccaccgagtttggggcgagagagctcggatgatttgtcgggatttccaaggtcgttgtaaacatcaaagtcgtaaattctgtctgataattttctcactccacttccatctcctcgtagattcttcaactctttctccctcaatactcttaatccgcttggtgtctcattcggcaaatacggctgcgaataatattcaatttacatgacgttattttcatacttaatagctggggagttgggtattattaatggacccaccatgacataaatgttaaagaagattttgaaactgactaagatatgtaatcaattcgtgagggaacgaaaatgacgtgttttaaagattttggaaaccatgattaactacttagtttaatgagttacctgattagtgaagaaaattcgtttatcagggtgatctttttgagactgaacccaagaattgcatggaaagtgaacaggaccaagtgcgaagccttcaatggttatgctctccaagaaaaactctttttggtgtttattcatgacggtgattgctcccggcgagccaaacgctgcatccaccgtgaactccgccgtatagtgaactctctccgccttagttttcgatttctttgaccaatcctttaaaactgctgcattgcttttcttcggcaacttcgtttctgtttgaatcaaaaagttttgttttttcttagtattttggaaacccattttagattacacgatcttcagaaaatatgtgaatgctctgcttttcaagagaaggacttacttggatcaagttgggtgctgataagctccaagacaatgtttcgaccaattttatcagcaaaagcatccaaatgcttaacaagagtctctttcaaatcctccttgttcttgttcctcacagtaaccacagctctcaccttgaacttcaccgccgctttctcctcctcttcgctctttctgtctccggtcgttgtggaaaaacgcagcgttttgaccaaatcctcgctgatggctgcaacgacgccggatttggtttttcttggtctccggtcaaaagggttgatcgagaactgtgttgactgtgtcctcttcttgaaatgcgacgccgacgagacaagtgatgacctttctgtgatgagaggataacccattaactctttagctaaggccatcacgataatctaataaattacaattttgaggttttgtggtatactattagtgaagaagaaggagttgaggatttgttggtagatgaacgttctggttaattactagtaaaaatcggcgagtgagagatataaatagagagagctagaaggaacccttgccgtccacacgttttgttgattggactatggattgtctacgcaaaagtcatgttttattttttttccttttatataatgtgaattctcaacacatgtttcaagtaaagatatttttctttctgttttagtcaactagctagttttcaaactgattactcttattctgattatgataccttttcatgataaatgactttcttttaaattttagaaaacacgtatgttatggcaataacacactatttttattttatacgtgaagagaagaaggatacgtcgtatatatacgtggcgtattatagtattattacttagcttgtccaatccaaaccatgttaattaagattttaaaagctgattggataaaataaagttagttgtccaaaaaaaaaaaagagaggataaataaagtgttaaaagggtatgactttagaatgatagttgaagattaagtatatgtaaaaagagttttatatttaaatgcatattaaatcaaacttaccaatttatcaaggcaactatacatttcctaaatatatgcatatttactgttaaaactttttagtacatgaaaacgggaatgatttttcaattttcttttttttcttttgctaaatatgtgaattttcaatatatgaaaaggcttgtaggagctacaaagttcttaatacaacagatttcacttttctctgtttgtgtttttttttttttttgtcaacggagaatatacttcgttaaccagagttattagattcatctttgtattaagtttcgtgagttgcataatgaacatagtttggctatgttaactagccaaaaacaatgaaaacaatgaaaaaggaaatgatggaatgaaaaatgtggggtaattgagtcaaacggagttacgagtctgacacgacgcgtagtataggggcgaggaatcaaaggagaaactccggtcggaattctttaaatgactattttaccctctcatttgcccaaaataagattttgcattatgggggttaaccggagaatgttgaccatcgcctttttctaattataaagtaacaaaggccccgagaaagtaaataaataattcgacaacaagaccgttgaagatctgttggtagttcttttgagaaaaaaataagaaaatggggtttggtagttatgaatagttttacagacgaaattaataaaattaaactaaccggaaatagatgtgacataaatgtacttgatgcttaaaatagtattatggtatacaaataaaccctttattatttatgaaaatgctacaacttcttaattaatcttaccaaaagattctgaccattttgaaccacaatctcttctaaccgcataacaaaacaggtcactatagactatcgtcacttcctaacatcaagactcaagctcataccgaggttcattccttattatatcgatttggttatttacaatggaattgcacatgcatatatatatatatatatatatatatagtaacatagggtcaaaatataagtgtggacaccaaatgtgattagtttaacaggttagcgaaaaatatatatgaattcaaatataatgattaaggtctccaatccaaaagctcgatgtatagctgtcaaaatggacgggcggcccgtgggctgcccgtgtccaacgcttaatggaccgggcatggacaagcccattatgaagtggacattaatggatatgggcgttaacggacatggacattagcggactggacgtaatggacatgggcggcccaatggtcaaaaatattaggtttaagtcgatttgggcaaaaatagatttgggcaaaaaacatttcttggttttgtcgggaaacatttctccggcgcttattcggcgatttcttctctccggcgatttctccggcgagttccttcaacaactcatctccatcacatcatggatcctcctgagaatcctaatctattcaagtaagcaaattctcatcctttttactcaattcgatttgggtttctgtttttgattactcaataatgggtttctgtcactgttgtacttaggtgataatatcgagttccttaatgaagacaaagatggcgagggagaagaggaagaagtttaaatttgctgttaatttgtttttggatttgatactttgttgaatacttgaattgtgtttaaatttgcttttggatttgatatttaaatcaactaatactttgttatttaaatttgcttctcgatttgataatttgattggaatataaagcaaatactattgtgttaaaatttggttctgttatgcccattggacaacccatttggacatgggcattaatgggcatggacattaatggacatgggctttaatggacatgaacactatttgtcaaatatcgaaatggacattattggactgggctaatggacatggacaacccgctttgacagctctagctcgatggttttagagtagtatagtttgaaagcccaagacactctcatctgcaaacgattaaatgaataattggtttaagttggtaactcgaaatttagtgctttaactggttcccagcttcttttccaattaacagcacgttaaactggtccatgaaattaaactaaaagtagaatgaacaaagtcaaacagatattcaacataatttaaatgtataattaactagtactaagacttttgattcgtgttttcacaaataattgatcacttggtccactttcaacgtgggcttgtaagattatcgcgtatcaaggttttgtcaaaacaaccgcggggcattgatatctacacacatcatgtgtcattaatcatctaaatttaaaatttatgacgtacatagtacattcgatggaacacggtattcttaaaagtataacaattgtttacacgtaaatttaatttgcacaaacatttgaattctttgtttattatgttttttgtttatggtaagtttaacaatatgtaatagtagacaaaagaacgcttttctctaaattatacaattttttagtttttatttttgattatgtcattaattttcagtttttttagctataacacaattcatttgttggtaattttgtataattaattaacgatttctgatataagtgtaatttcacatattatcactaaatgtgtttacttttttaaaataccaaaatgaaaacgttaatttaggagaaaggacgtgtagcatgcataatcataatgatatagtgggaacgatgagaaaacatatctatggacggttcaggtctattttgatgggcagagaatggaaaacgtagttcttttatatatgtcgagataaaaattatgaccatagcttcctttctaccttgcaccgtccatgaagattgcggctcaagaccttactaaatgagtacatgtaaaaatgcaaaccagaaaaacatctactaaataaccaattagttagtggctgaaaacgattcatataatgcgaggatcaaatttcctattcttctactttgatttcaagcatggattcatggctgttagtcaaatgaatatctattttttttgtctaaaactatccttttatctttcaaatgaatatcttaaattgcaaaaatactcaaaatttctgcatatttagaagttagactaatttcagtccgaaatatatgaatacctaaaaaaacatcaaccacccattcttggtttcgataaatttcataaagacacattttcaggacggtatattattataagtcgaaaaaaaaaaattattattataagtcgatttcattctcaacttatctaattactgacaatgattttgaaggattcgtgaacaaaaaaaatcctcaaaattagttacttgcccaataaaatcccagaatataattcataagctatgcattctaataccaaactgttttactatccatttcaatgattgtacaaaaaacctgattttttttaataccgagtatgttcgcaccgtccagctacaacatccatgtgattttggtatcagaacaagaatttcaagaagtcaagatttttcattgttgtcaacgaagccaagtaaatcagtacatgtcaatatcaatttaatggtataatatatttaaaaaaaaaatcaatgagattttgatagatctttaattcgaatgcaacacgacgaataggacgtctttggaaattccggctcatgaatccttccactctaacgttcatgtcctctctcttccaccgtccatttttccttttctttttggtacttttcataattagttttgttaatacgctgaagttttgaaagtatatagcttcatctaattacacttgttactctacttcataatcaacattcgtctttaattggagtaattttttcaatacgtataggtgaagaagtaaagacagtaaattaaagaaatggaaacaggggtaagtggtgacactataaatcgattgagacctagcaaattaataaacctcaaaaatttgtgaaccatgtgttttcgaacacaaacaaatgctaaagacaaatgtgagacttaatgagttttgccacattttgaaagatcctttcggcctctttgcttcattatcccttcctctttctcaatcatcatttgcttcatatgccatgataataattcttttggattaagcttaagtagatctcttaaagcttcacttgtcaataggcaaaaatcttctgtatttagtcaatggaagacccatgagagttttaaccacacgtatagaaaatagagaatatgataacttctcactataggtatgcatgtaaaaccatgacgtcaatgatataactatgacatacttcacatcccacaatgagaaaactaatctgccacaaatatattatggtttttggttaacaacagcaattatacgagcttgaatgttttctatttgtattgttgtattctttgttacagttggtaattgtatcaatcgatatacatgaagtcactttttgtttttatttaagtgtttttttcttcacattttgcttatgttttgcttatattttgcttattttattttataattaaagagtttatgtatatgaacgccaaatatattactccgcctaattccagcagtgggattgagaatgctaatatcaaaccccctaaaaatatgttaaagatggtctcaattatcgtggacgcatcgtccatgtcactcagcgacaagagaagggacctctctcgtttgtacacaacatataaaaatccatcagagtatctaaatagcttgtggagaactctaacgatgattccaactacaactgcactaacaagtctgtcacctattaccattagtagaaacacctcggacttcaacaaagacattcccaaaactagcttactgcgcaaggaacaaattgaaatggttatgattatcacagcagtgactgcaaccataagaaaccattcaataaacttccaataaacaaagaattttttttcttctccatcgttgaatatgttttcatccaacggttctcttgaaatccaagaaaacaatctcattctttctattcggtacaaatggaagttttcccgataaacgggaacgattcctcaatgttaaaaagctaaattgtccttcagtttgatttccagttgtagcattctcaatatccatcactgttgtccaatactattccaattcaactattcgaagaagaagttttctaacctaagtggagggaggggtttgatgttccaagaagtaaagtgtgtaccttaatttttctcttatcttgcactgagcctgagattgctttgcaccaagcaatctgttttccaattttctttcttctttgctttgttttcttttcttttctttgttgtaaacgtttcgtactgtgcattccaagttctttttttttttgtaggcttccaagttcttttttgtaggcaaccaagttttatttgattgcttagctactatttctttttctggtaactgtgagtaactacttctcttaaatgcaaattttcaaatgttcgcttatgagataccattttcatagcgcttactatttaaagaaattttcaccttagtgatgaattttctcttcaccagttggcaaagtcaagttagactctcaccaattagccattaatatattttaggacaaaatacccttatcagtgaactaagtgtacaacagacgtgtaccgactagtttaataatcaagtttgggaagatgtatgcaagagggattcaagtgtgtttgcttcaaggcaagatcaaaatcaaggatagataaaatatatttatgattcggtttaagaaaagtttacattcatatgtataagtttttttttctttcttaaccaggcatcgtggtctggtggtaaaggaacctcgactgaggcgcccgccacccgggttcgattcctggccaccagggaattaacatgcggacttgctcaggcgccttagaccaccagtttcagggggcccttaagtagaggctcaaaaatccctgatcgcgggtttcggcccaatggactagtcagatcactgtgtggtctggacactgagttataaaaaaaaaaaaaaaaaaatttctttcaatataatttgttagattcaaaaaacgagttttgcagcatttaaacttgagtaatgtcttaatctcaaatagaaaataatatttattatagcgtaactaactaataaatgaaatgtcttgttatgtttatgtcttagataggcactttgaatatgaagttgaatttgttcaaaactagatccattttgatagaatgtgaaaaataaatcaaatcaaaactcgatccatttctttaaatgggtaatttacggccagaccttaagatcatgttttatctttaccatttggcaaaatcatccacatttccatgttttagccataaaagcattttctaactaaaaatatctttgccagcgtaatcgatgtacaatatctgtgtacgaaatcagtgagacgttttagttaagtacaatatctagttggttaattaaaaattaataataataaccaaactgtatctttatatgattttttttttctttttatttgctgaaattatttactacagtatttctttatttatgaatttaaatttttttgaaaactttcttattaacaaatttattttgcccctatattaccaaacatatttattttttagcataatttatatttttaaaaaaaaatatataataaaaataagagtgtttgtctctacagcctaacagttattatcaatcgggccctaatattttttttaaaaatgttgataggcccaaacttaaatatatatatatatatttttttttttgtcaaaaatggctttgattatataagattataagattcgggttttagcccttttaagtcgacgttaaacgcgcgtttcagagttttccggcaggaggagcaaactcgacgacattagcttctccgaacacaattttcctccggctttcataaatttcggggttacatcgtcctaattcgtctgataggttgccgaatttgtgttctccggtcaagtcaatgtcaggaatcacatatcaaatattgttcctcctccttctcgcctctgtctccttgtcgccggtcaggtgagcgagaaattctaggggttctattgttttccttagtatgaataatccgaccttatcggtttgtctgtgaactcaattgcaatggatctgagagttgagtttcaatccaattgataacttctctctcgctctgaatctaaattaatacttcccggatgaatcttgtagttgcttgccttccaatttttttcaccgattagggtttattgataaaactgttaggtgtttaggttatggagcaagtagtgaagagagaacattggctatgataaagccagatggagtctctggtaactatactgaagaaatcaaaacgatcgtcgttgaggctggtttcaatatcgtcaaggagatgcttactcagctggacaaggagacagcttctgcgttttacgaggagcactcatcgaggagcttttttcctcatcttgttacatacatgacgaggttggtaagttctgtttagtgtgcttgccataattcttccgcaatctctgctatgtctgcatttgctaatgtgtgtaaactgtatctttgaaacaagtggtccggtgttggtgatggtattggagaagcgaaatgcagtttctgattggcgtgatttaatcggtccaacagatgcggaaaaggctaagatatctcaccctcacaggttcgatttgttgccaaacacaattcttgactttgcaaactcaaatgtgagggctaagatgaatatagtcgtaagctgtattacttgaaatcgttctctgacttgttatgaatcattaggttgttctttgatcctatttacttataatatggccttctcttgtttctgtagcatcagagcattatgtggtaagaactcacagaagaactgtgtgcacggctcggattcaacatcgtcagctgaaagagagataaagtttttcttcaaggatgtagtttcaggtttattttcttcaccccctatattacttcttaaactcttacctctttcctcgattcaagtattatctgttatgacttatgatcactgaccaaccaaaccccattgtaatggcaggtgacattgctacacaacaacatgacgaactataagaaacaccaatacagcttctttatccatggtgtcttgttgtaatcttgtaactgttggttttatcttatctataatcaattaatcagatacattgtttcatatagcttgatagtattgatttggatcgacctttttgtggtttgctactatgttaagactatcatatcacaaaaatttcaatcattgacacatcagaaaatgtactttagatagagccgaagctttatgcattgatttttgtttttctttacttttagttttgcataactcaggcctagcccaagtaagtggggaatatgtgaaaaggcctattagattagtagtttatgggtcatattcctgaatttttttgcaagaactaaaaaataaataaattattgaaaagaaaagaaaaaacgtagaaggaaaactttcccgaagtagaaagctttccgaatataggaatcttattaagtgactgaaacgattcaaagcacaaaaaggcctcgtctcggtcaccaacaatactcacgtgatttcttcttcttcttcttctaccgtctttcttcgtttctagtgaatttgtgatctcgaggttttcctctctttccctcgctctttaataataaactaaaacttttttctgtgattgacgaccagagtgacgagtaggaattggctgatacgttaccggttcggtattcatcattggaagatttagtgtccaaaccagttaagctgataagcgttgagctgaaacagtgtaatttgaaaatcaacccaaaaaccaaactgaagagtttttaaacttactctcactaattctgagacatgttacatgtagatggtgcggtttgttaagtatatggactcggcttttaataaataggaggtcaggaacccttagccagaaacaacaataatttagaccggtttatatcagtactaatgtacaatgaccaaatgaatcaagacactatacgagacatacatacattcaacaaaaaccaacaaatactaatactgtaggtataaatgtataatctacatccaaaccggattagacttccctactaataaagtagtaaatatatttagcttcgagttacgttaatgttaaagttaacacagttagaaataataagaaaactcctatgtatatatgacctcaaaaatatcataaattaataattcctataaatttatacaaatattactatgataaaaaaaaatcattaaatatagtgatgtttccttttttttttttgtaattttgattgcattatacacattttaagttattatgtaaacaattatagacactacaattattttataagtcttttatcggttccaatcataatctaactttatagtcaatgatcacagtttcttttaaactctaaacataagtatcattttcatttggatagtgtaaaaagaggctattaatatctattgtcctgcgataatggagatcactaattaataattattacttcaaactgaaaatgtcatcttcacaagtgtattcatctaaattctttaacattgcatcacgaaaataatgttgtagtatcgaattcagtttgctattgtcgtttcatttgaaacggagaatgcaaaatgatagcatcaactcatggttgtcaaaatagctcaaaattcatggatcaactcaactcaactcaacccataaccctaatgagttgaaaattttgactccaatgagtttatgggtcaaatgagttattaagtcaattggtttaatgagtaaaatgagttgggttataatggttaatggtttacccaattaacccatcaagttttataaattgaattaaaccaactaaaatctttaaaccaatgtcaatctaagtttaaccaacacatctaaaccaatttaataaaatcatttttttccaaatttcttaaatatacaagcgatgaaattgagaaaaagtatactcgtaatttttccaccaaaaaacataaacccgtaattttcccgccaaaaacgtaaacccatgatttttccgccaaaaacgtaaacccgtgatattcccgccaaaaacgtaaacccgtaatttttccgccaaaaacgtaaacccgtaattttcccgcaaaaaacataaacccatgatttttccgccaaaacgtaaatccgtaattttcccaccaaaaaacgtaaacccgtgattttctcgcagaaacgtaaacacgtaattttccggccaaaaaaacgtaaacccgtgattttctcgccaaaaacgtaaatctgtaattttcccgccaaaaacgtaaacccgtgattttcccgccaaaaacataaacccatgattttcccgccaaaacgtaaacctgtaattttcccgccaaaaaagtaaacccgtgatttttctgcagaaacgtaaacccgtaatttttccgcaaaaaaacgtaaacccgtgattttcccgccaaaacataaacctgtaattttcccgccaaaaacgtaaacccgtgattttcccgccaaaaacgtaagcccggtaattttcccgccaaaaacgtaaacccgtgatttttctgcagaaacgtaaacccgtaatttttccgcaaaaaaacgtaaacccgtgattttcccgccaaaacgtaaacctgtaattttcccgccaaaaacgtaaacccgtgattttcccgccaaaacgtaaacctgtaattttcccgccaaaaacgtaaacccgtgattttcccgccaaaaacgtaagcccggtaattttcccgccaaaaacgtaaacccgtgattttcccgccaaaaacataaacctgtaattttcccgtcaaaaacgtaaacccgtgattttcccgccaaaaacgtaaacccataattttcccgccgaaaacataaacctataaaaattagaatccgtaaatattctaagtttgatgataatgaattaataattattaataattataattatttattattgttttataataattattaattaaattattacgtaaattggttaaaccgtttaacaactcaacccatcaaattaaatgagttatgggttgacgcaactcattttattaaatgggttgggtcaacctataactcatttaatcataaactcatttgattatgagttaagttgagttgggctacctattttgacacccctatattaactaataggtttagatttcaaactcgtattcttttaaaagatttaagtaacgatttaaaaagaacctcgccatcaactaaataggttttacagtaatacgctggttcggtttaacaacatggtttctgtttaattcgaaggatcttaatctattatttattacgtgtgggcacttaactaattaagatataagtcaattctgacgaattgcgtgacgattgagcacctattaacaacataataaattttattttatatatatttccagccacctaaaagaaatacatatgcttctaaaatggagtaaaattaaagaatttagatgcttaacacgtgtactgtttgaaaatcacaaagacaacttaagaactccctagattttgtgttaaatgacaattcacaagagtttaggcaacgtcttaagtctatgaaccacatattaatcactgtttaaagtggtccctaatcctaattcttgtcccaatgtccccacttattcttaattaactacacttttaatcaattctgtgtgcgtgtcagtgttttgtcgctagaaacattcggatttatgtgtaactttacatttagttagtctcgatcttgttaaagatacttgtaagtaattatcaaatggtttaagatagtgatcagaaagaaaaaagaggagaaggtgggagagcaagttggagtaaatgacaaagtttcatggagaccaagaaaatgtttgctatccaatgatgtcacttcattcggtaacatgaaattctattggtaagtgatgatcattttatattttattttacttacacatcttgtacttgtaagcaagttgaccgatccatagaggtgggatgaattttttactatggatattgcgaagatgtattatctattaattgattacaaaaatgaaacactaaaattaatatctggaatcagaatccactagatccgaatatatatatatatatgttcgcagaaaactgaaagtatttcgatgctaaactaaatgagagttttcaaatacataaaattttatgttaacgaaaaatgatctactgtatatcgttcatgagtataatgagacaactacgtttatatataagattatttcacgagacaactccgtttaaacatatcgtcatgtattcaatcaatatatcaatttaaacacacatttttgcttactacaaataataatatcttttcttaaaaatacattttgaatgcgatttcgctactaaacaaccccttttgaaaccataagaaaatgtgcttcttaaccattgactatcaaaatgtaaaatccggaactccttaaaactaagagaatctgaatctcttggatttgttacgttatttgatagtgatacttgtctaataaattttaacaaaaaaaaagatacttgtctactaaatagatactagatatatatcatatacactaattttttttaaaaaatgttttttaaacttttatactcgcatctaaaatatggtaatggcctttaaaagtcaacccgacctatttggaccgacagaagattgccaaaatagcctctgttctcagacacgtgtacatattattcctctgccatttacgtgtgtatgacatggcgatctttggttggatattgtacgtgatttggagtggtgtaggttggcccacaacgttttcttcataaacgaaaaagcgttcagtggtttagtttttttactcttatttataaaatttcactttccatctgtctactgtctacttctcaactcttttttcagtacgtaaaaatgtatactttaatacgtttaaatatacacttagatctcatagtctagataatcgagagtagaaaaagaactcaagaattcgagagttttaaaaaaactcaatagcttttgtttttacgttgggttttcaaacttcatgcaagtttgagtggcgattagctaagcaatggatattagtcaatagtttgtattttttttttgatgtaagttacaagattgaaaaactatttgccctaatatataagggttaaagacttaaggggacatcgacacgagatcttttcgtggattttccttatttttttcgttctttctttctgactcttttcctttggattttctattcattctttgaaaagaacatagcttctatattaattttccaattttaataatttttcccatattctataagactatagtggatacataattggcgagcaataatacattgcatagtcgatcttcctaaacttggatttaaccggcttgtctatactctactatctttgacgtttagtttgtatcattgtatgttatgagttatgacactgaattgacataaatgttatccgtctaggttaaatgcattctccaaaaccaatattacacaatgttacagaataattattctccaactttctcgattacagattaagaagagactaaagccttataaatataagaattttggattagaatcagataacacaatttcatttattcaatcgacaataaattgagttactaattaatatctgaccgaacaaaataaaagtgaaaaaaagaaagagaagagcaaacgaaaaaaggaatgtgaatactagtcccaacaagttcatattatatatgtaattaacaaaattcatgagaaccctctccgtgtccgtgtgtcaccatagtaaccattgaatgtaatgaatttctagggattcaactagtaaaaacagatcaaactttagtctatatatcgttgagttggctccactgtgtatgagccgagatcaaagccgtgacgttctctccgatacatgggttaacaattaattaactaagttttttggggcttaaacttttaatggtaatacaattaatttatgggccatagaagaatgttggtggactcgtttgcttacgtggggatgtgtgcattaatgtgggtttgtgagttgtataaagaagcaactgtgagataacatctgaacacaaacttacaagaacagtttaaaagtttttttcttacttaaaattctctcttttaagtagtcaaagtttggaacttgaacaccataaaattcatcaattttactccaacttgtctaaaaatctaatcttttttgatcactataataaccaatcttgattcatcaataactcgagttgagaaatatatacattgatctctctgttacagtcaattgtcagaaaaaaagaaacatgaaggttagttttctaatccattgtgtttagttcgatcattgacttttttctcagatgatttctcaagtgttttcttctggcttttgttttcagttcttcgggtggatgcagaacaagcttaatggggatcataacagaacaagcacttcctctgcttcttctcgtaagtttttttcttactttcataaaaacttaacttcaagattatattgtctactagggatatgtgtaaacaatgccccgagattcttgtctcgtagaatttgcttgtattatatctcgttgtaccttattttgacaagattcttgtctttgatctgaaattattttgctgtcttgcatcttgtcttttagatcatgtgaagcaagaaccaagagaggagtttagcgactggcctcacgcgctgcttgctattggaacattcggtacaacaagcaatagtgtgagcgaaaacgagagcaagaatgttcatgaagagattgaagcggagaagaagtgtacggcacaatccgagcaagaagaagagccttcttcctctgtcaatcttgaggatttcactcctgaagaggttggaaagttgcagaaagagttgatgaagctcttgtcaagaactaagaaaaggaagtctgatgtgaatagagagctcatgaaaaatcttcctttagatagattcttgaactgtccatcgagtttagaggtggataggcgaatcagcaatgcgcttagcgctgttgtggattcgtcagaggagaataaggaggaagatatggagcgaacgattaacgttattctaggtagatgcaaagagatatcaatagagagtaagaataacaagaagaagagagacataagcaagaactctgtctcatatcttttcaagaagatttttgtctgcgcagatgggatttctacagccccaagccctagcttgagagacacgcttcaagaatcaagaatggagaaggtaaactaggaacgaatttcaaattcgtagtgtaaatatcttttttaatatctacctctgatcaaatcaaattacagttgttgaagatgatgctccataagaagattaatgctcaagcctcctcgaaaccaacatcattgacaacaaagagatacttgcaagacaagaaacagctctcactgaagagtgaggaagaagaaactagcgaaagaagaagtagtagcgatggatataaatgggtcaaaacagattctgattgtgagttttcatcagatcctcattatttttttagtaaaactcaaaaacaaacgactgattctattttcttttgattacagtcatagttctcgagatatgatccaaccttcatcattcaagctcttgcaaaatcttcttccaagtataggtaattaagacacaacgataaaatctcttaagttacaatgtttttctttcatgaactcatgcaagatactctttcatttaatgcagattcaaaatcttctcgagaaaatttaaagaagtaatgaatgagtctcccatttcagaggaatttttttggtgcatctgcaaattaagccctggacgtttcagaatgtttttaacttctttttttgcatgatttgatctgtgggcatttgtgtccatagaaccaaacatgttcttgaaattgcgtacatgtgtagatatgtatatgagatgtcagagtgatatacatacatacctgtgtgcgtgtgatttgtgtaattttaaggtggataacctcagcttataaagattcaatcattcttctttgttacattatttgtgcctttggttcactttttatgtaggagtcaagtcaactcttgagatactcctctctcgtttctccttgatgtattatcatatctataaagacattggaatatagcttttcctagctttgttcaaaatttgaaaaaattgaacgtttaactttagtaaaaagtgtatttaaaatagagtttataaattcggtattacactatcaattaatatataaattttaagaagatagattattctttttcgtcaattggaaaaaaattattcgaaaacatagaatatgatataaatctacgtctataagattgaaatttaaggttagtgcctaacgaatgtcgaacatttcaaaggaatattattgtttcttgattcttcattagctttttgaaatacgaaagttttgctttcaaaataatatggatcttctcattcaaaggacgaaaactgccttgatgatgatctctaagaccgtaacttaaaatatgggttggtgttggcccaaaatcaatgttaagttcccaccaagcccatgccatattctccaatagagtatttaactattaatgatataaatattctaacagtaacaacataagacacaattacaagtttagtgatatatagtgttggaatataattataaattcgaaagaagtggattatgtaatgagaggttgaaacgggtcaaatattagcgtagagcatctgtggcgtttcggttcaatgtaaagaaaatatcatttttgtttttattattaaaaccaagacaagagttatatagtactatatcacttcatgatgatgtgagtctatggtcgaaaattttgagaagcaagtaccgtgtcggtgatattcataacagagcgtggatggtgtctaaaggtacatggtcttctacatggcgagagtggggaggagacaattctacacattttacgggactgtccggcgatggcgggaatttggacccgcttgttaccagtacggagactctcttctttcttttcgaaatcgctgttagaatggatctatgcgaatttaggagaggagatagagattaatggttgtccatgggcggtcactttttcgcaggccatatggtgggggtggaaatggcgttacggtaacatctttggcgagaacaagaagtgtcgggatcgggttcgttttattaaggatcgtgcgttggatgtttggaaggcgcatgtgcacaaaatgggagtgacgacgcggacagctagggaggagagattgattgcgtggtctccgccaagggtgggttggtttaagctcaatactgatggtgcttcgcgtggtaacccgagactagctacagcaggtggagtagttcgagacggggatggaaattggtgttatgggttttcgttgaatattggaatttgttcggctccgcttgcggaactatggggagcatattacggtttaaatatcgcttgggagcgcggtgtcacacagttggagatggagattgattcggagatggtagtgggttttcttcggacagggattgatgattcgcatccgctgtccttcctggtgcggttgtgccatggcttactttcaaaggactggtcagtccggatttcgcatgtgtatagagaagctaatcgtctcgcggatgggttagctaactatgctttttttttaccgttaggttttcatttgtttaattctactccggatattgttatgtcgattgttcacgatgatgtagcggggtctgcgtacccccggaacgttcaagtgtaatttttttagttttttcagttttaataaaaatgggggttcgcccccctcttctacaaaaaaaaatatcactttcaaaaggacccattcgctacccaatttttctaaaccccagaacgttttttttttttccaaaacacaacagccacttggtctttgcaacaatgcaagtagtgtagtggcgtagctaggggtaacgagttaccaaaccggtttgacaatctggttcgatcaattggccgatcactcggtttgctctaatcttgcttcatttagtcccatcaacaacacttattaaactaagtcacatctaaactttttatatctttggtatcattttccccgaacacgtttttttgaacgagtcgtagttttgaagcaaccaacgaacgtattgattattatgggcatccgtgaaaggggcagttcggtcaattgatccatcaattttatttttgaccaaactgattaggtgatcttaagatttttccttttttctttctataggaaagtgggaaaaacgcgattcacacgatactgttgctagtgcgtcgtacagattgcgatacgtgtcacaatcttgacggtctgttctatttaaaccacgtgttttaatcaaaaaacttctgtcggatcgtatcggagactttgaatttttatggcacatgaaacttcgtaggggtttgatggtaggatcccacattggtccacttactattcaattcgcaccgccgttaagtttgttaactaacgtgaggaacgtcgcggtgatgtaaaaaaaggccatgaaagttgtttctattacgatgatgccatcactggagttggtaatgtgctcttgtggaagggcaaattttgtaaatacgatcaaatttcgagtcttttacgaatttgtgacatacgccgtttaataacgtttgccgtcggttctgaaatctttattctttttctcttttatcgttacgcgtaaggaaaacgtgcggtaaattctaaccgaaaatatatataaaaaagtagtccaattttgaaatctggccgttgatggtagacaactaaactgtgccaaacaagaaacaagaggtgaacatatttttatgataagacagggcaataaatttgttgtaccaactcataaaacaatagataaattacttgcacaatgatggattattaacattaattttcttactattaatcatggatgaaaattcctttcttcacactagatatagttctttaactagttaaaaatgcatgcgatggaatattactaaatatgatataatctcatggctttatgtaagatttgttttttggtttttttggttgttgttaataaatttattattgagaagtttaattctattttggtcacaatatattgaaatatttttaagaaactaaaaagttcctatttatttttgttttcattaatttatgagaggctattaaagtcacagaaacttattgggtgaatgagtttataaacacatgagctattgagctagtagcctcttgtactcttccattttacgcgcaatccacgcaccaacaaaaagaaaagaaaagaagagataaagaatatctttaaaaagtaagtgtggagaattctttcttctcaataaacaacaacatgtcgtcgagcaatgaaaatgctaaggcacaagcgccggagaaatctgactttacccggagatgtagtttgctcagccgttacttgaaggagaagggtagtttcggaaacattgatcttggcttataccgaaaacccgattccagtctcgcgttgcccggaaaattcgatccaccaggtacttttattatctctttcttctttcatggccgccacttggtaatagtactttaaaaactcagttctgttactacttgcttttgccagatttactacttttgtattgtttcttcatttgtaagtcagttccttacttcagaaataatttctccttgtaattatgaagacaagtaacaaaaataacgaataagttgatatagaaattgattgagatgtggttaataaaattccaaagatataagatgctatatcatttttctaaagttattatagttcacgaaagtttttattctctttatgcagggaaacaaaatgcgatgcataaggcagggcattccaaaggcgaaccctctacctcatcaggaggcaaagtcaaagatgttgctgacctcaggtctctccttttgttccttgggaatacttgttgtttttggttattggagattagagaaaaggataatcggttaatccggttaaaattggttttgttctgaaatctgtttttggtttgcagtgaatcacagccaggaagttcgcagctgaccatattcttcggagggaaagttttagtatataatgagttccccgtagacaaagctaaagagattatggaagtagcaaaacaagccaagcctgtgactgagattaacattcagacaccaatcaatgacgaaaacaacaacaacaagagcagcatggttcttcctgatctcaatgagcctactgataataatcacctaacaaaggaacaacaacagcaacaagaacaaaatcagatcgtggaacgtatagcacgtagagcttccctccatcgattctttgctaaacggaaagacaggtatttaaccttatcatactttttgaaacttgttttaatgttccaaatttccaatcactctagttagttcaaaactcaaaagtttaaggatcctccctctgatataagttctcctaaattatcctcaacaagcctcgtaatttacgttattaatttttctgttgcagagctgtggctagggctccgtaccaagttaaccaaaacgcaggtcatcatcgttatcctcccaagccagagattgtaaccggtcaaccactagaggcaggacagtcgtcacaaagaccgccggataacgccattggtcaaaccatggcccatatcaaatcagacggtgataaagatgatattatgaagattgaagaaggccaaagttcgaaagatctcgatctaaggctatagtaatatttgctaaatttcttgtaggaactgagtttttagattaacgtttcgatttttctgacttatctaagtgattttattttgctttgtactacagtatgtaatcttattctaacttgaatattcattcataaacacaatagacgatagtaaagttatattataattagttaactacgtacaacacttgggagttaaattacataacgttaagcgagaaatagcaaattagacaagaggaagaatatttaggagttgtgaattgatctgactgcaataacatgaagaggaatctgactgcaatcgtaatgcgggtaaagatggttgaaagtgatcagagctcctttctaatttatttagggtgtaatttatgaaaatgattattattggagtgtatatcaagttttcactaaactcaggggtgtttattgtaattagttgtcaggttcaagttcattgaaggcgtgtctgatttggacagtgattgggcctgagccataagtttaacgtgggacgagttcattggctgttgctttttaaattttcttacagcctgtgactttagctaatcgatgtgtaaaaataataaatccaataaaattcgtaagagccactcgattgcttccttcgctttctatcaagagacttccttttttttttcctgttcttcattttttttttgttattaatattttgtcatttttcttacatttttctcgaacaccgaaaacactttcgaaccctaaaagacagaacactgtgtcaattttcattacctgggaacgaaaagcaaaatcaaagacaataattttttccccgagagagaaaatgcagaggttgaagcagcagcagcagcagcaacaagttatgatgcagcaagctcttatgcagcaacagtctctctaccatcctggtctccttgccccgccacaggtttgctctattcttcttccatttccatgctcgatttgggtttctaggctctttttcccaagctcgatttcactggtttttctctcttttttgttgtataaggtccaagattaggaactcgagatttttggtttcattttctatgattgaagatgcttgtttctcttgttttttgtttcatttttgattggtcaaacgagaaaaagttttgaaatttatggggattaccactaatagacttgcttcttgtgtattcgttacatttcttttaaagtgtttgtcttattatctgatatttggttcaacaactccatgaaaatctttgaggtgagactgattcgttatcgtagcttagttgctgagactttaggaagtaaagttttttcctttatttctttctttttcattttctttggcttcctatttttttcctttttgcagatagaaccaatcccaagtggaaatctcccccctggttttgatccaagtacttgccgcagtgtgtgagtgttaggtttcgttttttcttttggtatttttgttcactttttatgtatgttttggtgttttggctttaaaagtttcagtagtgaactcaagttttcagtttgtcactctcaaagctagtccagggaaacacttctgcattgtagttatgtactatattatatagttcatacttgtacagttgaatttgacaacgtttctctaaagacttgtttctattttctagaaaaggtgattctttgttatgatgccctcataggtgattcttcttgatgttgagggacttgtagccctgctaatttttatgtttttgtttcattgttctgtttcttgtttagatttttagtctgcctgcctttgagaaattgcaggtacgttggaaacatccatattcaggtgacggaacctctgcttcaagaggtttttgctggcactggtcctgtagaaagctgtaaactaattaggaaagaaaaggtgtgttatgttacacttttataacattctagtagtaatcttcaggatgtttaatcttttatgttgaaacttttgcttttggtattggctatgattgacacatttatctgatgcagtcttcttatgggtttgtgcactactttgatcgaagatcggctggtcttgcaatcctttctctcaatggaaggcatttgtaagttaatggacatgattattagcctttgggcattttagcatgaacaagatactctgttttccaagttttggattacattgtttactctaatgtgcaggtttgggcaacctatcaaggttaactgggcttatgcgagtggccagagggaggatacatcaagttggttcacaatcttatgcttgatttcttgctaaaacagtattttgggtgttctattgatacaataacgcacttctgtgatcttcatgtgcaggtcacttcaatatatttgttggggatttgagtccggaggttactgatgcaatgctgtttacttgcttctctgtctacccgacttgctcgtaagttttttataccatcctcagcattcttgtattggaaatggaagtttaagatttgcagaaactcttccgacaattgctattgtatgtagggatgcaagagttatgtgggatcagaaaactgggcgttcaagaggatttggatttgtttccttccgtaaccaacaggtacttgactgtctaactctcagtccttgtgtatagattggcttttactttaaacactgatcgattgctgcaaatcttatttccttatgcaggatgcccagactgcaatagatgagataactggtgagtgttgcaatttgttttcccccttgatagttgatgttaatattttgttattttagctttgtgtttttgagcttattgtaattggtgggagattctcttctgcttttcagggaaatggcttggttccaggcagatacgttgcaactgggcgacaaagggagccacttctggtgaggacaaacagagctctgattccaaaagcgtcgtggaacttaccagtggtgtctcgggtatgtttaactattacctatcatgaaatagaaaatcaaatggaaatagagaaaagcctcaaataaacttaattcttaaccctttgatgtttatacattggcttatttgttcctgcagaggatggtaaagatactactaatggtgaagctcctgagaacaatgctcagtacacaactgtttacgtcggtaatcttgctccagaggtaaaatagaaaaactgttataggtattctgtgacttaactcaaccatcatccataccttttttgaatcaaagatattttcgttatccaggtgtcccaggttgatcttcaccgccacttccattcccttggtgctggggtcatagaggaagtccgtgttcaaagagacaaaggtttcggatttgtgagatactctactcatgtagaggcagccctcgctattcagatgggaaacacacattcctaccttagtggcaggcaaatgaaggtaaaactaactaacttaaactgttcttttgtgggactcaccattctttttggtttgggaatgctaaaattgttgtgttcgttgttcctacagtgttcttggggaagcaagccaactccagcaggaacagcttcaaacccgcttcctccaccagctcctgcaccaatcccgggattctcagcgagtgatctcttggcttacgagaggcaactagcgatgagcaagatggcaggaatgaatccgatgatgcatcacccgcagggacaacatgcttttaaacaagctgcaatgggagccactggttcaaaccaggcaatatatgacggtggttaccagaacgcgcagcagctcatgtactaccagtaagatcttcctcggagccgttacttgagcgaagagttctttcttttcttcttttttgttatgtaacgtctttattgtatctttttcttttcttctaacttatgttcttgttataatgttatcatgtagctgtgggtttgtggtttgtgttccacgttttttcttttgttaactactacggtttacgtttttgcacatcttcaacttctttctctttctctttctctaacttaatcttatttattgggtcgtaagttcgtatatcttatgtagaaccattataatttgaagtttttacctctcaaaattatgtttatctcatttcatattataaactcaacaatactgtgtttaaatggaatcaagtacttctcattcaatactacacactttgtacttgtgttgttgtaaatgtaaacatagagacttgagttctgtttctctgttatcttggcttcgagtcgtttcctttgctgcggaatgtagaaagtgagaagaatgatcgcttaaaatcaccatctttcactttaaagctcgcttgatgatgatgtggttgaatcatattgtttgaagctgcgaaacacaaaagacaaaactatggtcaagaggagttttcatgacatcgttctaagaccctaatgaagctgaaatgtaaaaagatttaataccttgttcatcctcagaaagctgactctgagaagatgccattcttgatttccttaactcatccgatgatcgataggcacaatcatcgtctccttcagatgttgttacagagacccaatccattagactatctgcagcacgagttttcttcccaaacttaagaaaacgtttgatccctttcgttaaatccttcctagagttgggaacaataacaggactctgagctgttgttccccatttctttctcattcttgaactccaagaagctggacttcccatgggagaatcatccactgaagcatcaacatccgagtgctcatgcggataagagaacgcgtgttgcaagtttgagctccatgaaagaggactctcactaggtgaatcaaataacgaggcaacattatgctgcaatgttgaagaaggtagagtattcgcctgtaagtctacatgagaaactgatctcaaagaagtgtagttttcattctctgatgagttctcaactatttcagtaagtgaaggcgtttcatcaccaatatcctcctcaactactagagtttccatttctctagcttcttcttctcctttgacagggttctccaaaacttctttttcttcttcttcagcctcagattcagtgtcatcaaaggcttcatttttcaaattctctgatacatcatcaatgtctgtgttctgcttctgattcctctctttgttcatcatatcatcagaatatagagttgtcaactctgtgaattctatatttgcagagaagcttttccttagtgatcgtggtcttcgaggcataacaggagacggtatatcttcctttgtagtcttcttattaccatttctcgcctgtgttcgcatcatggtagtagtatttctaccagctaaagaagatggttttgtgttttcctttttaagatcagagaatttgggaagagaagattgtgtaaccagttttatctctgatgtttttcgtcctctcccagaagtattagtgtttgtgtttgaaactttacctgacggttttgagactcgtgagctcccgtttggggatggaacctttctaacttgggagctcttagaagcaccttttccaatggattgtccactgactagcttatctttttcgttttcctcttcactctgtaatgagcttataggatgctgtaaaaagattaagaagaatcactaaatcaaattacaaaacagtcagacaaagttttgttgtcatcatcaacaaagacactaaatgatttgattacctgatactttttcgaacttgtccgagagttaaaagatctgaacttctctgcacgttggcgggtacttgatatcgaatcctgcctcttcatggaagcagcagaaaacttagccttcatctcggttctactttggtcaagagcttcttgcattgacttcaacttactttcttttgaactccattcttctcttagttttgcatccctcttcttcatatactcttcatacaactttcctttagaatcatctgaaaatcttaactcagataagttcctccgcattacaacattcccgttgtctttatcgttaccagctgattgatctcctggaagaatccgtagttgatgctcggcgaaaatcttttcaagatcttgtgcttttattttcaactcatcgttaaaccctggagggctttctctaggcattcttgtcctctgtgtttgatccacagatgttgcacgaactctattcttgtcaaattttccagctgcatctgcatttacaaggtcatcctctacaccaaatgatttttgtctctgttcagaccctgcagaatcattaagatgtacagttaaaagctatcagtttaagtattcaaaacactgaatttgatatgatttataagatcttgtaaatttataaactctcttgggtaactttctctatatattctgttaactcttctgctaaaactaacctgcagaaaccggttttggagggcttgtcaaggcttgtttcttgtctgatggaaacagctctttcttcctgccttttgattgacgttcatcacttttgatatcaataccacctgctatatgagctgaccgagagcgcgaatggcgataaggaaacatgactgatgattgtgccacattgtgggatttggaagcatagctctcgtcttctctcggcatggaattgccatcagtcatgaagtttcctggcttatcaatctggttttgagaatcatcagatatagtagaatagacatcatcatcgtcctttttgctgttctcttcagactccttggggaatgtggcatcaggaatggacgaaggtgtacttaagggaccttcttcgttgctaccactatcagatttcttattttccattgtaaaatcaaagctcatgtcactaacaatactccatcttctcaaaacagacttctcagggaatgcagggacagttgatgaggtatcagaggaaggtctcttcaattctgtggatttcgcaacaaccaccggtttgtttcctgcagagttggagttttccttttgtttgctctcaaagaggttaatcctatcttgtacgctaagtctccttgtatgatgaatgggcttaaccgttgaagactcatccaaactctcatctttgttctcctctttatcattcttagtacttagctgttgactgatgtttgtctcatccactgatgttcgtgtattggtattcacgttcttggtgatgaggtctggtcttctttgcgatagtgaaatatatttgctgcatgcttcactgatgaaagaaatatattctgatcagattccaaacatagttgcaagaaaatgaataaccaataaaaaaaattgcttacttcaaatgatgtgcaccgaatctatcagcaaaacgttggagatcggaaacagtttgagggtcaaaaccattagctgacgcgtgagcaatagccgtggttaagtcctttttgattgcctcgagtcttaaatctatagctcttactagctccttcctgtacatatacaaagaaaaacaatcaacaaaacagttttaagaacacaatttgattcaacgtaaaaacagagacatttacttactgtgttgcatctgctacgcctccatcatctagaacataaaaggagaaaaaaaaagttatcaagtttggtcacttgtaacttgtatgcttagaatttgatcaagcaaataagaaactaaacacaccttgagaatataatgtccgagctgcttccaactgtgacatctccaaatcaaatgtattgactctttccaacacttctggactattaacatattgaacaaatctggaaaacaaaaattacacaggttaaaagatagctaaggtaaccaacattttcgtgtaaaagggaaatgcaaaacgttctttgagacctctcgagagttcttcttgtgaaccaagattcgccattctcgctttgttctacttccagtctaacagaggattgatctctctttgaagcttgtgattcaataactctcaaatgattcacaaatggttctatcagtcctgaagccagtttctctctttcttcattactcgatacaaacagctcgcatctgtaacacaaatatacaactgagaccaaacatacaagcatgatcaattgctacagaacatacactaacagaatttactaaccgtgaatatttcggtgaaagctcaaacacagcatagtctagaacagtatcagccttcatatttatgacacaagtcaaagcctctttcttagaccaaaatgtgaatcattcataagaacctgaggaaaccacaaaagagtaaaattgagtggttaatcaacaaacctggtcaatctcataagactagtacgcaaattaaatgtaaaaataaaacctttacccaaaattacgaaacagaaatcaattcaacaactacagatgaaaatgcagctccattaactataagaatcaaaaccgatgcttcccagatctgaccccaaaactaaaaacccaaaaagacaaattccaaaaaatcccaacttgacacatccccagaaaacagaaaccccaaaaattctgatactaaaaattaggcaaaatccatctctagaacacgctgattatgctaaattgcagaatccgatgataaaaaacaatcaaaagcaagaaacttgagctgctaaagaatcaaagtcgacgaacttacgacataaccgatccagcattgaacagaattcgatttcttccgatcactctccaaaatttagtaaacttgagttctgatcagatatatggatgttgaacagaaaaatctaagaaacccaaacagtgtctgaatacttgttgtcgttactacagagtctacaatggtttttgctgaaaaatgaaatattctcccaaatggaagaagaagcttgctttatctcttctctgctctttctctctatcaacacacagtctctttatgtaagatactgtagatttataatgtgtggagaaagaagagaaagcttgcttgggacacctttcacctttttatcttgccttcgcgtaacagtctgtaatgggaaaaatacgaaatgacgcagagtcgtagaagtcaagacgaagataccatccttttttactttaccaaattaccctccgagtaaaccgggtttaccaatacaatgacaaccggtttggaccattttgtctccaattatgataaattaattcgattttatatagttcaaaagtaagcaatacataaaaacaatgctagagattcgattgtatttgtagtctggttaatgattttggtataagatgtggtttattagcaacgggggcaatcttgtaatagccaaacttagttggagagatgtggtcaaggctctacactatgtggaccaaacatggaaacatccaatgatcgaattcttaacggtaatactttttttttgggaaacaaataaatttgagaaagacaacgaatcgaaagtcgcatttatatttatttttgtttaattttgtcaacctcatatcttttttttttgtttcttctgatcaaattgaaaatatattttctctattttgtgtggcaacccttaaatgagtccaaaattttcttagtttttatccacttctttgccatatttctttttcaatgtatggaaaattttccgaaaaaatccattctctcaacaacatgaaaacatgtaaaatcttcaagatttatcaaacgatcgtatctgtaagaatataaagtcttctttttaccataagaaaatgaattctaataacatatatttttctagaaatcgtacagtataatgtgcatatgattttctaatatctgatatgaatcttcatggaataattattaacgacaacacgtgatgtgaacgcgtaatactattcttcactttaacaaaagaaaaaaaaaaagctattgaattcgtcacattatcaaagatatatctaaatatcgttttcatttcccaaattggtgtctatgttttcaaataaatatgctacatcaacattgaatcaaatgtgacaaaagtctaaaagtcataaatggccaaaccctacattaaaccccttattcatgaagtagtttgaagcaactaattaagaaagacaaaaacaactttgaaaaataaaatctatttatttcctacaacaaaagagacctaaaagtgaagaagaagctgcttctagattgtcggtatgacgtaagcttaagcacatgcgacatgttcttctcattctctttcacatcttccttttgtcccatgtgtcttttcctcaattattaatctctctttattaatcttcctccatactaacattaatagtatattgatattttatataactttgacgaatgattgattgatcacaatcaaaatcaattgattaactaaatattatacatgtataaaaatggcaaaccggttagtgtataaaccaaacactactaatccacatgcgagaacaggatggttctcaaatgcatgaaatcttttcccttgaggaaccggaagaggaaattagattggtttagatgtaccaaacaaagcaaaagtatgcagcttttcttttcttcaccatggaacccacaaaccaaagcaggggtggtttagttgggtccagctatccactgaaacaaccgcatcatcaagcgactctgtacagaacaaaaaggcaaaaataaaaccccaatgagtagatccaacggtgcagattggaacagtaagaaaaaaacagttgtcccaccatctgacgagtcggtgaatacacgtgtgtgtctctcgtttggttggactccaaagagatcaaagagaagagaacaccaagagaatattatagggccatttgggttcaagtataggtacctaaccaatgtacgacataaaattctttatactataatgtaaaaacagagcatgatttttacaaattatagtcgaaacctgcaaaatattgacttttctttgattacattttgatattttaagttattatttcaataaataagctgaaagctaataagtaattgatccttattcagtttgcattttattttgcaagttcataatggaaacacgttatacaattttattaatgtattcgttccaccaatttagtactactaccgtactctcccttattcaatcacgaccattacattattaactacttataataaacttgttgaccaataaggataggctaaaaacaaaagattaataataccttttgattttttattttatgacatggtaaaaacgtgcctcaaagtgaaaagacaatgcaacgattttttagccatcaagtatcatcaactcctcaggccttgttttttacaagctaaaaccaagaacaacaaaaacaatcatacattgctatattgttcaacatttacggcaatctcaaggctttgatccagtcaatttctactcggaaatcacctgctcctgatttagctccaactgcaccaccttctgcgtttacggacagtgacatacctagaacacgacctggattcatctccatttccacatctataacatttcctctccatgttggcaagtatcgagctagaggaatctgatatattcaacatcaggttattaataggccttagacgacaagtgaaatattcaagttgattcataatggagatctgtctttttggttatgttttcatctaaagccgaaggttttgtctaaagagagttaaaaaacaaaaaaggatgtgtataatgctctaagctttttgttggtaacatctatagaagtagtaggacttgccttagcagtataccaactgtcctttggagcaaaaacaaaagcttgccacgagttatcttctgactgtcccggtgagttcacccagttttcggtgtagatctgaatcaaaatcaaggtttagtatttgctcctacaacatttgttttttcaactggagttagggaaaagtgcgtatcaacataaaacttacagtagagatataacatcttccatctcctctgatcctcagggctattgcatcatacccatcgagatcaatgaagccatcaaactagaaaagcagaggatgctagaattagttgcaatagtaagctgactcaaaaagtctctcgtttacaaaaccaggactaagatatagtaacccattttccttcttttcttcaaacaaagactgacatgcagaaaatatgttttgaataagaatggttagtaagataaatgaaagctctgtgttgttcaccttttttgagcgcattccacagaaaccacttcgactgatgttccattttgatccttcgctaaggtctacagataggttccccgaaaaaactcctataaaagatatttggatgaaaaaacatcactaagtggagcagtgtagaagcacaacgagtcaacgagaaattaagaaatgatgacatagaagaaatctcatattgttttattgatgaacttcatgacaacaagacatgctggagggccgatgatagatcacagaagaaattacaaagttgctaaccagtgcaatctgatccatctcctttatctgggatctccaaggaagccgaagataatcctgtcaaataagtatcaaacttcaaacaggttgccacaagataaatattaaaatgcatagcatattgtttacatatcaatgtaaatctgtgcaatgccgatcttcagaaatcttattttgtctatagttgttcatatggatcaccgaggcatggaaatgaaagggataatgacaacagaaacaatatcagatactctttacggagcagatgcttaaacctgtcagcataagtacctccatattcagagtcggaatagagatgccatttctttaagtcttctttagagtggaacttaaatatatgcttctctgcaggtggcacccattcttcaacgttccatgtaagagctaacagtttacagggtgaagataagtcagaaactagcaaatctttgctgcattcaaaagcataaaggctagtatagaaatatatatgtgatcccaaaagtttgtaagcattggaacatagaagcaacgttattgtttcctcaaacatcacttgcaatcagtcactgtctaataagtataagcacaagcacaaaataaaacgaaacatcaacacacaaaccaaaaaaaaaatcaaaagatcaaagaatcaagtacgacacatgataattgacggaaaagtggcaggcgaatacccttctttgtcgcatttactgaggcttgcaacaacgatcgaaaccttgacatgtctctgtagctgctttcccagatgaaaacaaagaaagcttgtctaagatatataaaaatgactgttaggaattaaagctccaatttttcaatggtaaacactaaatgacacacacacaaaacctcaatgatcagaaccagactccagaaaacgtataaaaagtaatgtctttgcaaggttagctatatcagaagttgacgcatcctaaacagaaaccatacgctagtgactaaagactattattaccctttgaagcttttcaacaaacaccttgtcagccaaaaatcgatcaaggtaatcacaaatgcagctggtgaaaaaacaaattgtccccaaatccttcagaaaaacccgacatatatcacagacgctaataaaaaggttgccatatgaattcatattctgctccgaaatgcacaggaaagaaaaatctcagaacaagaagatctgataattagaacaagccaaatgctaaagactaactaaaactattctaaagttttagagtttccactaaacgaagcaaagatgataggaactcactcactggatttgccgtcaccgtcgcacaatcagcctctgtttaccgattaacagtcaaacttgaagaccaccaagctgcacgtcactgtttctacgccacgatgccgttttgcgagaccaatcttattaaatgggcctatttggcccaagttctccaatatattccccaatagtaaatccacaaagtgtccatttttttatacagattcaattaatacgaattttttttcaacgttgaaatacataattctttgtttatattcaggcaaagatatcccattatctacatataggctatagcttgacatgagatattaagaactacataaataattatgctggtcgagttaatgagcatcctatattttattattttattaaaaaccaccattatgattacgagccatacatactcacatcgtagtcatgtttaattaattactccaagaagtttatacctaatttcacttcacattacaacttggatacacttatagacgtagttagtaatttatacttaaatatttgtttccgtgacagcttgatgccactagaaaggcaagtaggacaaccgtccgtgcaattgggtagccctgcgcatcatcatgtggcggccacttttattctttcgaaaatctcataactacgtactactgtagagtacatgtatatcaaatggagctaatcataaaaaacaattttagcatatgttacaatttatcatcatttggggcaagatactactaccctctttcgaccgacataattataatattagttaaagattactagttaactctaaaaatttgctcgggagaaaaacaaaagcaaagaaaatggtctgtgcatgaccgcattattggatcatgtcgaatcaaattccaaaattaacgaaataaaagtatatatggatatgtatcgcgccgtcaataagtatagaactcagccaactcctcgacggatcctctttcgcgatcatcctcatcgccgtgatcagaggaactgtttttgagcatccataacaagtgctcgaacaatacgacttcgcaagctactaagacggtctcttggtcgtgacgttcttcgataaatctagacgaccggtcaagtagttcttggaaaagcggatgagcgatgacgtgggaactaagcatgtaaggtcttcgtgactttccgacgtaaaccacatggagatcctcgcactttgagacctcagatacggcggtagaggcggtacacatggttgaatggtggttcttggtcaaggaaggccatttctttatggcagacttgagctttgtcagtttaccgaatatagccattagcgaaagtctctgatttttagcaatagtagtagtttcttgaaattaagattattgttttgtgtatgttttatcaggaattgagaaactaactttcttggtacgtaagaaggaagtattgggttctttgtatttatattgagggacagggagagaaagagaacagctaagaaagataaaggaggctacaaaatctgtaaaactggtgtccccttgctctaaattttatttaataatctatattatatattatgtgtaagtgtgtgtggatgcatgttgatatgtgcatacgtgtgtatgtgggctggacaatctactcttgtgtcttgttgtgcaatgaatcggaccaagcaagggtgatcgatgatttttagataaagattacatcatgattgagataagatctccatgataattatatttagtgtcgcgcttaaagttacggttttggccgaaagaatagggtgtatagtaatttagctttttaattattacacacaaaatcttgtagtttagttattatatatatgtttttttgaacacaagcggtccatatattttaatatgtacgtatttaaatttatactttcttgaataaaaactaattcgacaattgaagtcataaaacaaaagcatctgtctttgatcgaactgcacattgtgggagataagctaattggtaaaagaagtatagaaaacctttataaagtgatccaaacttgtttttatcaatagtttagcctaagagaaatcaaacaacaaaatagtcgtcgatcatcattagttaaataccttagtgatagtgattaatgttgattaattagtagtagtaatctgtgtgatgatttatatatatatatgtataaaaagaatccagatataaacctgtttatcgcacgtaaacaataccctgcttatgtgcatttgactctgtgatcggttcaatgtactacactaaaatatttcttcgaaaatataatacgttttaaaaatactaatatataaatgttgacattgtgatgctacaattttgtaatcaagaactcgtttggtatattctgaactgtagacagaacccctggttctcgtagacaatgtagtgtataacatactaactcagttgattgaacttttattgttaatctaacctcatcgaattgaattctgaaacattgaagaaaagagctgtatatttttttttattaatctcagaaatatccgacagcttttggttttggtgggcgaacaattgccagccaacagccaacaaaatcaaattatttaatgagaagaattaaataaaaatattctgaacaaataagttagttgcaagagcaaattagccagttgggatgttcttgttcttcaagagtgcgttacaccttttccttggtttaaccagccaattaaaaagattttgtttaatgaaaagagtttgaaacatgaagcatctaaaaaaatcctaatcttgttacactttttcttttgtccacatttttaagtactctatataggaaggtgtgttgctgaagtcagcccattacacgacgtgtcaagaaagccttaggtggtatactacagaggctcctgtcgtctaacataaagtgttttcgggtgcaaaaagataaatatttttggggccagatttcttagaaattagccggtctcgaaacgcaggcctctctaacctttaaagaaaccttttggcaataattctatcaggatgctatgttttagtttgttggtaacttttcaacacaatggattcaaaggtctaataacacaatttattgccgcgcatgaattggcggttaataaattacgaaaaaaatggaaaaacaaacaaaccaaaccctctatatataccaaaaacagaaaaacagaatcaaactttgtgggtggtggtgaaaaaacaagaatgaaatctattttgctaagaatagaaagaaagaaagaaaaaaaaaagaaaacaagaaacgtggatctttacaaaggtatgagtcggatatttacaagatgtaactgttattctgtgcttttcctgttattacgactctgttcaaccctgccgtacctgccaagtaaccaccgttaccttcctgtgcaaggctcatttctttctccagaccctctttaccatgctcttgcggagaatacccaccgagcgaaagcatttgagaaaccaggtagtaaatcggaaccacccattataggaaactgtaaataatgggaaacaccaaacaagtcagtgtctttgtttgctttggaagaaaaatcgttaacttcaacaagaatgatatgtggatgaaggagatttacctcaaaactggagttcgtattagttaaagaagtgacggattcatcccggtcggtgaacaagttatctgacgaaacagactttgagctgcaggaaacatttagaacattacaaggcttacttagaaggaagtttcatgtctgaatattgtaaatgtatcagaatgctatacggatgagtgtttttacctgccacgttcaaatatgtcttctgccggcgtgaacttagttacgtatgagtgtgaaaaaccaggtatatcattgggcctgtgggaatcagaattagaggaactgccttgaaacatctgccctgaccctgtttctctcataagctcttcattgcgcataaccgagaggaagctgaagatgtgatcaaagaaagaggatgaaaaatcagacaaagtatgttaatgaatgcttgcaacaagttaatgagactctgattcataccttagagaagctggttcagtttcatagaatggaaattctaaattggttcctgagacacccccgtttaacccttcatatgtaggctgagaattttcgcgtaccagctcctccagattcaaatcacagtccataataatgttatcggaaaatgatcttctaattagtggcctgcaattcatatcagtgtattgaaccatatattaattcagttacatgactaatttctggtttagccaatttttcaacaaaagtagtgtacctcatattttcgatatctaagttagaaccagatcttccgatgttgtgctggtcagaatccaactcccatagcgctggcctccccagtcgaggccggaaatgacccaagaacctgtcaacaatcaactttacactaagcaaacacgtagcaaatgtaaagacgaaaaaacaagacaaaaagtttctaaaatggagcttacacattgatggcgttttgcttatcactgtcctgatacgcgttactgtagtaacgacgtacagctgtgaagatatcacgctgcctcatcaccatattccaattacctctcagatcacagaacatctgtataccataaactttctaaagttgatacacatagttcaaagatccatcaacagcctttcgtacgaaaaaaatgtgttggtaatcaatgactcaccttgctgtgtgcttccgagccaccatactgcatcgcaagtgtattacccatcttttggtaagcgtccatcagttctattgccagaggattattaagatcgacgacaggaggtcctgagatacctaatgtacgcagctgatgcccgagagaaaccaatccgtgggcgtactgcgcaaaattagtgcgatctaaacagtctatgcagtttgtcctcaagaccccattttgaagcagaaatatatccgccttcatatcttctttttctggactacttgcctcttcatcttgacttggaatagggttactggagcatggtagcattaatattagcactcagtaagaaacgtgcaatacaatcaaaattatggattagagctgttacacgaagactgcatttgcattagacatagcatacgaaacttacttgaaaaatgaatcataaattacttcttcagctcctacacctgaaggagctttacagtaaaacaggtcagttagttccaatgatttccttgaaaagatacacaagtggttgaatgcaccatcagctcctctgccaaattgaaggaaaaatggttagaaattctcggagatcagacttattacaaaccagtaaggtgcataaatgcagtactttttgtagtgtttgcttagatcaaaatggattgcctttaaacgatgctccctgtccatgcctttgttaataaatcggattgtctttgcaaactctccccttaagatggtttctcggtgctttttctcacctgtcacagtctgacaacacaaaatagcaacgatacactcaatctttcaataatccaagaacgggcataagaatttgacttttcctagaaaatgagagagcctacctttaggaggttgagaattattatccggttcccatacctctgtctcagattctgaaagtggtgttgggtagcctcataatttgcgtccttcttattcactatgaaccaaaaaaagacaaaaacaagagaatcaagatgaggcaagaaaaacctaaggatcccttttgcaaactcatatggtgcttacatataatctcgggctgtgggttgaaaacagatgcctcctgtgaccaaaataggggtatggagcctcgaacctgcacaactgatgttatcgggattttctgacccgcaggaaccactttggaaacaatctgctctgtctcaacatcattggctaccctgcctatatcatttacaccacgccttaaatatctgcacattaacaaataacaaggaggagttaagctcaaaggcatatcaagactagcccttatctacagagggagtatcgaaatatgatatttccaatattacaattatgttagagaccaagtaggccgtgagacaaaaaaaattcaaaaagaagaataaagatttcaaactgaagaagtaccttgtaccagcataatgccgtgaacgccgagcaatgatagtgaatacaaatttttcaccagatactgaacatttagtctagacaaagcagaggatcaatagactttagattaccaaacattttgaaaaatctgcagtctaaaccagtcacataggcatgcatttgattattacctgttgaaagaatccgtatatcaatgcaactgtccatatggaattctgcaggatctttctgatctcgcgtgttaagaaggagttccacacgaacattgtgttgtcatgagggtttcctctctcagtgttgcctatgttcttctgaagggaatacatgaggtgatatgtgtagctgaagtagaagtttttgctaagatccaccacgcttaagagcttcttgtacctataatagaaaggggaatacatgtcggatatgtgttctactaaagtttacacaagaaagttttcatctcgagccgtttaaaagaattatcgataaaatacctcagctcggcttcagacttagccacttttgattgaattgaaggatgtggaatcgcgatcatttgactctctgctataccataaactgtatggccacagatctcacccactttctttcgttttgttatcagcagcatataataaggctccaagaatctcacaaaccctgcaccagaataatcaacattgctccatgagttcacaacttttaccaaaacaatgagaaaggacaacaagcagttgtagtaaaagagactttaccaatgattccatagcaagttgtgattgctttaaagccaccagactcctcgttccctacaatcatccgtcttttaagttcgcgcatttcgtcttttgtataccttgtaggatcttcaaataaatttaactcattttggtcccttctatcaatcttaagaatcctcctaaagcttttgttctcatctcttccaatcaaataaaaattctgcacaacaaccaataaattcaccaacttcaaaagtcaaaatgtagtgatttcacatcagaaaatcaagaattcatgaagcaacaggctaaaataatagaaaacttagaaccaaagactctacattatgtcaagctaaaggcttaaggctctctcattcatggcttacactacaaccatatgaaaccgccaagcaaagagactcatcgaataataaaccaaaccaaaccatcttaatcttaaggagaattcgaatccaaaaccggagattaatgaattattatgcaatcatgtgaaccaaaatcaaaatccataaaccataacagtgtcaacgcaattatcggtaaatcagttgccgaaaaaaaagatccgcattgatgcaaataaatgttaatttaaaaagagacaaagaacatcaataagattcacataatcacagatcataaaccggagttaaatcaaaagaggaggagattaccgagggagtagcgtagagcttgaatttctgaagaacaggcaagtcaatcagttccggcctcggctcgaaccgaggctctgatcccatcagaccagataaaatctgtaaattccgaacctggagatagctcagacccggtttgaccccggatttcgaatcagccaatacagagaaacagccgagcagacgagtaaattagagcgtgaagaaatagaaatcaaaatcgatattcccagaaatttcggaattctggaggtggaggtaacgacgacaaagacgatttcggagaagaagatagagaagaagagtggagccgtcgaaggatgtgaccaagtcggagacccgtttgttattgttatgttaatatatggtaaatttattttgttttagcttctcgcttttattttgttaaccttttgggcgctaatttgccttttatttatagcctttctgatacgcggtcgtttctggagtacctcgttcgttactcgttaagaaaggctcttaccttttgcgtcttttgattttttctttaagattaatatataacatcaaactatgtaaagttttacttttcaccttttctaattgtcaaatgattttaaattctgtaaaaggcaatttcctctttttcctttctgtcggaaactttgagaattaattttctaaattctacatatgtttctttaaatgaagactatagtattagtttttaaccggataaaaactgtatctatagtaaaattactagtaaatcgactagtgcctcttttttttccttacgatggaatgtcgtagtctcgtagagatgcacgttaaacacatggagggagatattgggtccacattaaacccatataatataattcacgatgatgattttttcttaggagcagtataaataattcacgatatgatcgaatcgaatatatattagttattcttggtccggctccggcttccataaaaaacgactaattctaaaatcaataggaatgtcgacatttattatttattcgtaactcgtaagtatgtagattgctgattaatcttacgtatggaaatgtcaaaattactattaaacctcatgggcaatttctactgtgccaacatatctcactttccgttctaaggtatgttaggccatgcagaaatgaccacataacgcatgcacacgcatctcagtgagaatgagatgatctcacgcttaaaggcactccgactccgaccttacatcaaaagttatcatgatgtcttcttccctccgacaaaaattaaccgtatggtagttctgaaactcccttgtttacgtaggtaattgtatatttaaatttaaacgttttaattttgataactctaattttcttaattaaaacacaaatcgaacacgtaatggccgacctaatcgatgaattgaatgacgaaagtgtctaactcaatggatgttggacatgtgttatgttgaatggtaatagattatgtattctatacgcgattaattagtcttttttaatactacaaaccaaacgacttggctaaacatgaacagtccactcgattattatatatttttattaaattcaacaaaatttccttgtgtacgaagcaaactctttccaaatattaattggttttcaaacaaaagtacaaaaatagaagaagggaataattgtatgtaaaaaaaggagtgtcgtattataattatcgtaaaggatttattttctatttataatctaaacaagtaaacaactatgtcttttaattagtaaaattgtattcgaatactcccaacgtaagttttttttttggtaaaactcccaacgtaagttcttcacatgaaactgtttttttttttatatacccaccaagaacctgattttgtattttgtgtatgttgttgcaaaaccagacttaaattgtaaaagaagaatcttaactgccaacacataagatgaagattacccaacgaacgaaaactattatctaggtatcaaaagacaaacaaatgtcactaatactaaattttcgtcattatacgtttttaaatcacgtcagtttggtataagaatatacatattctgatattcaaaccaggtaaatgttatattatggccgaccgaagatagcctcgcaatgacttgatccactaaaacatccagaagacatcttatcatcttccactaataaaatttaaagaagacttaaaaacgaaaatagcaagtcaatatttaaaccagttgacaaacaaaaagccactggactttataaaaccctttacgaaaaagacaacaactgactttggcgtaaaaaaaaaaattatgaaaagaaaacgattggctctatcgtgtaatccttgcttgatttcttccacaatcattggcattgacaaaataatagagttttctttttttaaaaacaaagcaattttaacatttataaatgtatagttattacgagctatttaaatagagttgccttaaacaaaaaataaaaagagagagagagttgccactctgtttaaaacctaaaccacatattggtttggtaggtactgcttactcaataaaatccggttgaacaaatcctctgcttttctgcttcatttatcatttttaacttttcaagttgacccatcccactcttcatagaactccttaagatactcttccatgaacttgtgccttttctctgccctccttttacccgcctgatatgttttcaatccacattaaatctcaaatcgaaacaaatttttcgcgtcaaaatagagttgcggttaaacttacctcagttttcatcagcttctttagcttgaggagtttctcatgaaagtgattaatagtagtttgctcctctctcttaatgtactgctctttggttagctctgtccggggcttgatctcaggatcatgaagcactctgttcctgcttccaccaaatgtaaagcaacgagcaattcctataacagaaagagatcaacaacaactaatagcacaaattccataacatagagaattttcacatgacatcaaagcagatatttggcaatgacatatcaaaagcaactaaagaaaagagacgtattcttacctatggcgccaattgcatcaaggcgatcagcatcttgaactaccccaaattctggaagagactcacagagtgctactcctgctaattcgtctttaaaacctggaaagaatacacttgttctgttcacaaatttatatacaacagaatgacttaattgtagtgataaatcatgtacattatagttgattggatatgttgagtaaaaagtaggagctggaaactgacccattccattgatgatcgttagtatcttcgtcttcttggtctcttctataccctcatcatctaggaaattctcaacaagtttctcttccgaagggtctctgaattccggttataattatttttgccatgaagcaacatatcagcggaaggaaagcaatcttcagcattcatagttaagtagtttttatgtttatatccacaccaagttccacttagtagagcctagcaatcctaaggtaagcaaatctgacaaggaattc

SEQ ID NO: 988 - DNA, 95327 bp, Arabidopsis thaliana
gaattctggatcttttctatgttttaatgttttgtttgttcttttctttttcgttggtttgttaatggttgctgataaaaatagataagaccacatattttttttttgtttgagttagattggtactgctattgaaatgtgaaaattcataatgattctttttgcctttttggtaaagaaaatcatattgattgtggtgaaacaaaaacatgacattgtcctaagaaacataaagataattagaattgtgactaaatatgtgaagcataagatttaaaataaaattaaatgccaatggttacgactagtgaaatgtgataaattcatgataattgttgagaaacagaacatgacattgtccaaagaaaacaaaagataattaacttaaaaaaccaaacaaactaagaaaacagaaaaacacaagaaactgaaattgagttgttgatcagacagaatcacttttcctagccgtccgattgttacgacgagcacagcaaccgcaggaatagacggttatgaggagaatgaggagacaaatgttgaaaacaagaagattcctccacttctctcttatgttcgctaacacacccgctttgcatgcgttgcagttgaaacataactctgtttgcacgttgctccacgtaccacagtccccgttttccgcaactgccgtttcgtttttgctcggcggtatccagaacgtcgcgtttctgaactcgaagttgcaatccgatggtggcttacaacaacctgactgctcatacacaatcaatacttgagttacacaacccattatgaacaataaatttaacggcttaacatataagtgttatcttagttcggctaaaaattgtcttgcttttgttactatatgcaaaaacttaacaatgaaatttaatcatactaagaacgatgaaatgaacctagactattttttattgatttgtctttacatatatatatactaaagaaagcaaaagctttgattggtcttccctttactatatttatacaaaaatatcaacaaagaaatatgttcatacagaaaatcgatccaaaacaatacctggatgggagacaagttcttgtgataaaacgcatcagcgatctgactaacacgaccatcactcaaatcatcacaaacgttagcctcagccaaacaagaccttatcccaacccatctcttcccaccaacgaacccattaagccacgtcgagaaatccaccgtccggtactctttataccctcgaccggacaccacacgaccggctcctttgttggtcacaaagaagagaaatatggagaaaatcatcaatgcaacaatgcccccaaacaatatgatcaagtaggaaaccattgccaaattctccttgaaacaagatccaatcactccgagcaaagacaccaagaagaggatgagtccggtcgtgagaagtggtatccgaatggcagattcacaatcagtgacgccttggtgaacgaacatgtaaatcgaataaccaatggccgaagcgcccactaacatcaccaatgtgtttgctagaccaaccatgaaattgctaactcgaaacatttttggaaatttgctttctccaaatgataaactcgattaacctgatcggattttaaatagatacggagagggagagagtgtttttttgttgttgtttgaatttgataattatgtttcgtaacgtttttagtgtgtgtgtgtgtttttaagtgtgtggagtcgtggttattggggaaagagggaaacggttgcttttttggtagtgggttgatgatattagtggagattattagccattggttttagagatcgtgtgggggttaagaagatcctttagtttagaggaagtcgtttaattagattttgactaggtcttactgccacgtaactaagactaataattaaactgtcactcgactttttaaacattgaatttaataagaatttattgagtacgagattgttgggaaaattacatataggtttatgttaattttatttttaaataaaaatgcatattaattcatatttttgttacttggaaaaggaaaaaacaaactaaataagtaaatatatgaataataatatgttgtgaaaaaacgtttttcaaggataaaactcaaattcgtggggggtttataatattcgttaagaattgatggaagaaaatccaaaaatttattattgcatgggtaaataacacaaccattttataccctggtgacatctaggagattttcttcttattttgatcttaacttacaagattgatgaaattagtggaattccaaaacgcatctcacgtgacaaaataactacttctggtgatagctctggtttagtcagaatagattatagataccaaacatttggtgtatccgagtatttactttaaaagactcttcctccatcgttaagattagaaaaaagaaagaaaaaggtgttagttaatattgaagaaaactaatgagaaactagaattaaatatatatcatgtacatttgatatggaaaaatgaaatcaagaataatagcccctataatcatcaggttcatcgaaagtatccataatggacctggaaatggcgaggctgagacaaacgagaaagagggcaggataagagaacatggagagatatttccattgatgaacaatggcttttaagatgctcatctggcaacctctgcaactgagacagtattcgtaagaacattcttccggaacatggttctctacgtgttgatgtttccaactccattctcctggttgcccgaacattgtcgtcactccacatcctcttggttgcgcgcagcaatacctctatatatatcatcattgttagagaattgatcttttattacgaatgaatcaggatgaggtgacataattaagtacttacccaaacattgctgttttggctggcattgaagttacagtcatggttatgaatgatgcactccgtgacttttgcaagtttactttcagggactagcctgcctaccaattgcttggcggttcgcttttcctcagccgggttcttggcgattccaaaggttgtgttgtagatgaaacactttaaagagtagccaccaaggacaatgcttacgaatatcattgcatagatgtagattgtgaacatacgttttgagtgacaacagattgcgtaaagagcaaactgaggaatcaccagcaagagcaaaccaatgacgacgaaactgccatccgtttctcggatacatttcgagactgtttttctgtaatataaacctgttcccgtcattgttaagcctatgcatataaggattatggtcgccattgttaagaaccctgttcgtatctctgacattttttgcaaatcaggaaatctaaaatgactcgtagagtatatgatgttttgacttgtgtgatatatgaagaggttgtaacaaagagacaaggaatcaagaacagagaggtatcagttttgtttttgagttttaagaccttagtttagtctaaagacagctttttgaaataggttaaaactgtttaacggttggtttttattccttattctaaaaccattatttctaaaaatagagattcaagttaaatcaagatatatatagtacaccaaactcttttgacatgcaacttcgataaacaacaagcaaactccgaaactccagttattaccaaactatgtacttgaaaataaaagaacctaacttctgtctgactttttggtatttgccggaaagatttttaattcaggcagcgactctgtttttttgggaagggatttttgtggcggagttttctttgaagtccatcattttgttcaaagctccaacataagctttgacgcttgacaccacaatatccattcctgctccagttccactgccaaacacaagacaaccggtttggtgttataatacaagcaagaatcaacaagaaacaataaacttcgcagataaatcgatccggtttgaatgagatatggggcaaaagaggattttacctaaaggttctttgaacctcttcaccagttattgcgtttgtagatgagtatttgttgcttccacggataagaactcttgtggttgcgatggcatcaatgccttctgttactgcattcattgagtactcaagcagagtagccggttcctaaagggggaaaaaggttttcaataagcgatgacccactggtgagttatttgtagatgagagcctcagcggtataaacagtacctttacgataagatctactgccttgtaagctgaatccacaggcccagttccaatagaacaagcgacatgttctttgccatcagcgtcagcaagttttacagttgctgttgaaagcccgagagttccacaagttatctgcattccacttttaagtaccatgagaattggataaagacaatgaacaagaaaaaagagtaagaaagcacattatgatcccaatttcacctgaatgtccaggagtttccacacggcttctggctggaaaacttcatcagatactaaagctattatgtccgcatcagtaactctctggatcagcaagggaacatatacgatcagaagacattacattaacaaatcaagagcactagaaaatagaaagagtaatcctctacacatcctaagtttatgcagccagaactaaggaaacaaagtacattccaaattagccacggagactcaagtcttataggtctaacaaagctttcaaaatggctgcgaagcttttatttggaattgaaaacgcaagttaggtttccgaggaaatacacaataaccaaaagcaactacctttttctgctcagccacggttttgaagcgccagaaaatggtacttagctgttcatcatctaattgataaccaagctggaaatgtacaaaagataagagaacattagtgtctcccacaaagatggcaatacaagtatttgtatgtgtaagattgctgtgcacctcagtcaaacggtctttcagcgcatgacgcccactgcataatatatatccaagcaaaagtagagaccaacagttagacttctggtttcaaacacatatgtagtgtacactagcttataaattggaaaaaaaaaatgacgcctaataacgtctcgaaattatcagcatatccaccaattacagtctagttgcattgtctgaacaagaaaaggacaaattacaggcaaaacagactaaacaagaataactttcatacctaagcttccccaagacaatgccagcatcatttgatcgttcaagtccaatttcttcgggacatataatttcatatgtacccttgtgtttcagcattccatcctaaaaatgtaaaagagtcatttaagttcaacaagaacaataatcatgaagaaaagaggaccgttaggcactagactgaaagagtgaacatgcaaatattaacctggtgaattccactttcatgcgcaaaggcattcgctcctacaatagccttatgaggttgtgtctgcatcccagtgtactcctctacctgagaaaacaagccactagttatgagacagcttatgtggaaatctacaaactttttcctcttaagaaaaagtaatatttgttttcacaatgtaaagaataaagttcaaaagaggtaccatcttgcttgtcataacaatgtgccgagtatcaattccggtaaatagacctcctaatacatgatctccacggcattttatggccatcacaacctacacttacacgaaaatcatcatgtaaggattatatatcccattgcagcgtaagcagaaaataaactgaaagtctaaaacgcctaccctgagacaatctcacccacatgttcttcttcaggtaattatagccaagggccaaggctatactaagactcattacttagacatttggccttttaaaatcttactagagaatattattccagatatctcactgctactgataatgaaaaggtactactcggttctacagaattgtcttgctcagtaagatcaagccccaaaaaagatttcaatgcaggaaaggttcacatgtcttgacaaattaataaaactctgacctcttccagtgaagcgtttccagctctttcaccaattccattgatcgtcacttccatctgcctcgcacctgcatgtgccccctgaattcaaaaaggtaatcacacacacattagcatcacatatattcactggtttgaatcagcttagttgttccgagtataaaaaaaaaaaagacatacagataaagtgttggccgtagagagtccaagatcattctgacaatgtgttgagatgacaacattttcaatccccggagtattggcctttaaatcagtaatcagttgaccaaactcactaggcaaagttataccaacagtatcaggtatgttgagagttgttgctcctgcttttatcacttcaccaagaatctcgtataagtactctctctccgatctacagaacaaaaaaaaaaaacatttttcaatcatcaccataaaaataaaagtacgaatctttaccaaggaatcttaataaaaatcgaaccttcctgcatcttctggactgaactcaacatcttcgcaccccaagctcctcgcgaatctaaccatactcctagcgatttcgatgacctctgctttggttttctttagtttatactccaaatgtatatcactagtagctataaaagtatgaatcctaggccgtttagcgtatttcacagcatcccaagctctctcaatatccttcttattgcatctagagagtccacagataacaggaacataaccattctcatcaacagtgtttccaactgtttcagctatagtcttaaccgcttcaaaatcatccttggaagcagcaggaaacccagcctcgatgatgtcaacaccaagtttagctagctgacgagcgatgtcaagtttttccttggaagtaagtgtagctcctggagattgttcaccgtcacggagagtagtatcgaagacgcggacgtagtttggatcggaaatgcggttggggatgtattcaggacggggacggcgaggagtgtgaggtggtagtggagaaggatctgagattgagcatgagagacggagggtttgacttcggagggagattgaacggtggtgagatggttggaaacggaaagaggaggagataggtgtgggtttagaggagaaggtgggaagaaaagaagtggtggtgattgttgttgatgagtagagattagggtttctcagaagcgaagacgccattgaaggagaggtctcagagagatagagagatgaaggtttcaacgtgacggtggcggcggctaagtttgattcagtagtgctaatcttctcgtcactactctcttctctttatgtaaaaaattgttttttgtttgacccacgtggaaaaataccaaattgggattaaaaatgatttgacgacgaccattgggtaatttggttcctaattttaacggtatatcgtcgttacccacgaggaagaagaagcagagtcaaactgaaaaaactggaatttaattttcaaattcggagaagaagacagtcttattgattcagctgcatcactgttacactcttgcggaagattttatagcgggcacattagaattcgttttttttttcccgctggataatcgtaacgatcttttcctctacttctcttccgattaagttgtgaaacaaagagacactcttaacaaagttgtgaaagctgttatcagtgatgtaagcacagattcgaaatgaaatcttaacatttctcattgccgatctatttgtagttttccgcagtttcatttgcttgaatgcgtgtgagaactgagaagtggacatggactaaacaaagagttcatctttaatctgaaatcgtattgatatcttctccagaaacttatcttggaatgttacaagagttgctctactttgctacaaaacaaaccacaaatatctagactctgatagttggaccagtatatgatccgggacgcatgtgaagatcatcgggcgtgtcaatctgtacaagccatgcgtattcgtcttcctttccttcatccaccttcttcattccgttctccaatgctattattatcaatccaaagagaaaaaacggtaaacgaaaacagagtaacataatgttcttctaaaggcaaaagagagaaagtttgcataccgaaagtggaaaacggatagtccatgtagtaactgcaactcctgccaacactttctttgtaaggaggtgagagaatgtcgagcacagcacatggagtcaacgcagtgaagcaatggagattgcctccagtctttgggtacaacgccggtatctcagactgaggcgttataactttgtcactcaccaatttcgccaaccttgctgttatacaagtagttgcaagaagtcttaattatcaatgacacaaagtgaaacccaagatgagaaactaacaataacctggaagagaaccggggacgcctttatcttgtgtgataatacatggaggttcgacccaatcgtaagctttaacatgaagtgatccatagaggattttactaaacacagccatctctggatgatcatgcaatgggatcactgaagacgttgggaagcagaaaatacacatctgaagaaaggacaaacaaacacttgtgttttgagatttgttgattgatcagcagaaagaattcagtatcaatcaaagacttactgtaaaagtatcacattcatgaatgtctaagaatgttatcggttgtgcccatcgtcctactctattgaaacggctaaccccagaaactccatagcctcgatcatcgtcttgagatacctcttcaagcccaacatctgcaggactaactgagtctgcacacaagaatgaccaaaaaacaaatcacacttctgcttataaaacaaacattccccaaattctaacttcaactctcaccacaatgaaccataaaatcactgatcctagtagtccctctatgaagaatagattgatatattaatatatgatatttcttctctaaaaatcctaaatttgcatcatgtatacatcaaagttacaagatttgcacttctcagagactctgacgatttcaaattgtgaatctgcaattggccagatttggtggatcaaatgagtttccacatttattcaaatccaacaaaacaacgttaaaccctttaactaggtcactgattcgatcaaaactagctgcaattgcaataaccctatcgcagtaggagaaaatcaaacagagacaaaagaagaaagaaaaatacccaacacagagcatagcttttggatagccatggaagcaggagaaggagctttgccagtgaaagtctctttgcagaggtcgtaaagctcttgcactttgggagatttctcctgattcctcgacgccatgtaaatgtctttcttgctaacgagattcgacaaaaccttttcacctgccttgaacaatctcgacaacattttttgtttttctcttcaaactttttgtgtgtcggtaattgttcgaatgttcttatccgagagtgattaacctatgagtttagtggggtgggtctcaataacatgagtaatggattcggtagcaaaaaggagaataaatctctgattttttacacattcttatgatatatttttatggaattgctattcataaatttctgaagttaattttgcataaaaactgttatttgtaagtttttgacttttgagcataatttctttactaattgtgtcgttttaatttgcataatctttttgactttcggatgaaaaccttagctaattgttaatagactaatatcactaaagacaattatactctttcaatgaaaagcacaagataaactagacacgagcttcgaacctcccaaccatttcttcacaacatactctttcactttcttctcgtcatttccaaacacattacacatcgccttcacatagtgagatgggaattttccggttatcctcacagagaacatgacggcacgagccatgtctctgcacaacttgtccacaagaaagtcgaactttgatgtcttgggttcgagtgaagagcttggaggttgtgaccggttgatgtttctttgtatgcaagtttcctcagggttcaaggaagaagcagagatggtgaagatggtcacaaacaagaagacaatgatgctcattgaactcttcattgcgtcttgcttctcttcctgttttttgagaagttagagaatgtggatagacgttatatatagtgaggagcactgaccaatgagagatttaaaacttgtttcgcattgaaaaaagttcagtttcacttggtatatatcagtttggtttataatctatgtaattgcgttacaacaaacacacaacaaatagcttattataacatattaacattgatgtttgtctcgcctgaacataaatacacacaatactgaatttactaagagctactattactaatgcatctgttttcaccaattttattacagtcctacttaccagtaatctccacaagaacaaaccccattcttgaaatgatgaaaccttttgttgtccctcacaactatttccctttccatgaccttggagatcaactttgctgcattgtgacagtccacacagatccttaggttcttgtaaactctaatagttgttccttctgaagttttaatcaacccgtaggtaagggcaagcttctcgctgtgtccccttaactgttcaatcttctcctcttcacttagatcatgttgtactgacattgtgtctggtctgtatcccatcttcgatatcttcatctccaatatactccaaagacttttgatttcctcaaaaccatctaagaatctttcaccgacaacaaagctaaataccttcctgtttagttcgatccaagagcatccagcatcctttcgtaaactcatctcgttcattctctgtctcacttttctcacgtcttcccatttccccaatcctgcatataagttggaaagcagaacataattctcaggcttttctggttctaattcgaataacttagcagcaactttctctcccatttccagattttgatggattctgcatgagctgagcagagacttccaaattccaacgtcagcttcctcagacatctcttctgcaacaacccttagagccttgtctagttgcccagctcggcctaacatgtcaatgacacaagcataatgctttaaatttggctttagcccaaaagaagacttcatttgatccagatatctcagcccttcatggatcagaccactatggttgcaagccgttagaacacctaagaaagttaggtcatcagggttatgacctgttctttgcatctcttcaaagagttttatagcctcttttgctaggccatgtattccatatcccattatcatggcattccaagatgccgtgcttttctccttcaagccattgaaaaccttagatgattgtgttatagaaccattcttggcatacatatcaattaaagaacatgcaataaacgcatcgtcctccaggaggtgcttcaaagcataagcatgcgcttctctccccagtcgaagagaaggtagcagcgaacacgcaccaaacacaggcatcatagaaatcccacaaagctggattccatacaaaaccatttgtctaaagacgcccaaagctctatcaggaaatccattctgaaggtaaccggtgattacagtattccaagatactaagcttttatcttccattgcatcaaataatgcttgtacagtgcatagctccccacaatgaatgtataatgagagtactgataaataaacaaacaaatctctttctaaccaatttcggattataaacccatgcacttcctttcccaaccgcagggattttagtttagaacaagctgaaagaagactacagacagtaaaactatcaggtagcaatccagaaattttcatctgcaaatgagcatccaaggacaatctcggatcattgctctgagcatggccgccaatcaaagcattccaagagttcactgttttactccttataccatgaaacacacgctgggcataactcagtgagccacactttgcataagaagccacaaaggcattggctactaactcattgtatacaaactcttgttttaaggagtaacaatgaagttcctttaaactcggtaagaatgattcatggaaacaaacaggcactgcatttagaatggttacctcgtccgctttgacatcttcgcctcctgccagcatctgtctcagaacatcaaacgtcccatgtgtatcaccctctgctgaaaaacctcctaccattgtgttccaagaaaccacattcttgttattgttcatcttaaagatcatttgtgcattagtaatgcaaccgcatttggagtacatgtccattaaggcattgttaaggactagttccttgtccaacctcaatttcaccgcccacccatgaacaccttttcccaaccctatttctctttctcttgcacaaaccggcaacacagtaacaagtgtagcaacatccggcataaacgcaccatcaccattttcctccatcatttctccaagaagcaagaagctttcttctgagaaaccattatccgagaacactcgaatcatggagttccaggaaaccaaatttctctcaggcattatatcgaacagttgcaaggcatcagtaacaaaaccatgagttccatagaaagacaccaatgcattacccacaaaaacatcttccaccaatccggtcttcaccaccaacccatgaaccgcaagcccgatcccaacatcagacatcccagcacaagccttaatcacacatggataagtgaaatgatccggtaaaagatcagtcgttgagatcatctcgataaacgtctctaatacttcatcgtaaagctcgtttcttgagtaagagctgataacagcattccactggaagagattcttactccgcaaggcatcaaacacaaaccgagaatcatcaggagagccacacatagcgtacatggtgataatacgagtacagagaacgtcatcattccttaaccgggtcgacccagaaaccagctggtggatctttcttcccatttcaatgtcttttctcttcccagaagcttgtaagagaagcccaagagcttctcggacaagaagaaacgcatcggacgagctctcgtcatcgccaacgaattcttggacagttcgaaaggacttgtcgaggtctccggtttcacagaagttagaaatccggcgaaggaaatgattggcattggttgaattagaagaaatggaattggaattgtagacggcgcggggaaagcttgactctttacggctcctgcgataatcaaacaaaacaaatacttgtggcaatggaagcaaaacagaagccataagataagcttccttatccaaacacggagaagctagttgtcatagaaattcaaaatctgtttggtttctctctgagatttttttctatgagagtgatttgattacattgcctcacgccattaagtttgattcagtatggagttgaataagcagatcaaacatctagagaccttgaacaattatattgaataagaaataatgttccatattgctacaaacattatctatcgttttaatgataaaaactacaatttatgcgccaagaagatgtttatggttggtcatgctaagaatccgccaatgctagacttgcaaaaggcatcaatcatctaaacagagagtatcaacgaaaagtcttcaagctttgacttcaacttgcttaggaactggtaccagtaacccgagacccgttttactatcaggagctacatgagaatacagattctccttatacaatggattcgatgtcactatccgtacaccggagtccctgcggatctccaaaacctcaggcaatccatcagcacatcccttggacatgccaacatcaatcctaatggctttatcattacaaacaccgttgataccagcatcctggattgtatgtcccatgatcatcctcttaaccccgggaatagtggaaagagcatgctcaagagctgcacaatcacatttgtgagccatttcttccgagaacttcctcaaccaaactacagagttccctcctctacaataagcaggcgcatatcttcctcctttaaacccgttaatccaaccccgaacctcctcgttaatcctctccagtccatactctatatgctcagctaaaagaccaccgtgaacaaaaaccgaatcaccaacaacagcaactgtttgattcttagtcaagaatctctttgcaatcggaccatcaggtctcaatgcagcaatcctagctctaattccttcaaaacagtcggctctcatacgagggaagctcatcggaatcccttcgtaaggatccttaggtttatcaagaccactgcataaagtcttcatcttgttccctaaacaataccaatcagcccaaatctgaaattcctctaaacctttcttagtcacatatctaaagtcaccttctatattcatgatctcatggttcccattcatagtcagaatcttacctccagctctctcagcctctcgtttcaatttctctaagaaataaagtatcttcaactcctctccacctcgatctagtacgtcgcccacctgaacaaccatcgttgatccaccagtccatctgtccgacgaatcaatcagaccagcgatcttgaatgcttctctagacttctcgagatcgccatggagatcaccgattgcaacgagtcgctccggcttctcgaacctcgtttgcagaatctcattttgtgagctaggatcttggggcaggaagatgccggagacggagtaatcaacgaaagtgtcgacgaaggaagagatgagcttgggaatgcttttgcagattccgctagggttttctctgcttgacattttccgtgataaatggcggccaagaacaatgcgcctttataagtttccttattaagcagtttattaaattaattcattgactagccaataaacgaagccaattagtgagtgactctttttgtctgtgtatcttctagatattgttcaagttgggctttggatctcctacaaggccacgcccattgttttgttgctcatgaattaagtaggcccattaacccagatagttggaaatgagttgaaccagagtattggactctgagcagcagagcagcccagagttgagaccagacgagatcttccaagcttagttgtataaaccaacgatgagtgaccggtattgaagtccctttactacaatttgcgagctgtcttatgtctattttatatacaagagttacagtacacaaatagttttttactaaaagacaagaaataagaaaacaagattcattctccttatgacaacaaaaaaaagaaagaaaacaagattcattcatacaaaaaggaggaagttgtgtcagaattgcaaccaatttaaatacatttagaaccgtcaacgcctctattgtttgttgtgactcttccaagtatgaaggttattgtattaatttatcctcaagttttttataacattgatatgataatggttttaaacgctttatgcgttattgtaaaatttatttaccccacaatagaaaaagaaaaatgcaattgtttagttttcataagtcacaatcgtagaaatattttaatataaattgaggtgtttgttgtatgtttatttgttctctttggataagtcacgacttgccaagaagaaggagcgtgagagatcgtgttaatgtggggtctttcttcttcaattaattacgatctaaattgctgagtttttttttttaataatgatttgactttcttttcctactattatactaaaatgatattttatcccaaatgtagtaaatttaatagcgatatctaatataagtttcagctaaatttaattcaatactcttttttttttttttttgaaaaacagtaacactgttatttgaaaaaattcaaaagcatttaaatatagtggaaacaaaactttatcctttgaacttttttataaagaaaaagtttagattcttctactgtttaaaaagaaaagaaccattaagtacgttaatgcggttaccgaacatgacattaagctttcgtttccttaattatccgagtggtccaattctttaattacgaaattatgaaagcgaattaataattagttaacgaaagtgacattgagaacgcgtttgcgtttcagttatggcgtgcaaacaaagctaaacaaaaaattcagagagattaaaaaaaaacaaaaggaatccaaaggaaataaatgattttgtttgcttttgcttgcaaataaaaatcattaaaaaaaaacgaggcgtaacaggaaggagaagaagcaggggtccatcatcaaatacaacattgtagcaattgcgttttcgactttatagagatattttcatagagatggtctcgaagctaacaagttgacaaatttcttcgttataagagagatagatgagttgcaggagagtgctgaagtcgatacaagccttggcggctcatagtttactcttctgtttcacgcttttattggtgcttaaactcgatcacaccgtctcttcctcatggtggttagtctcttttctctctttcaattctcttttctctgaaattgactgcatgattcaaattctttgcttctgatttgttcaatttcgattttcgtttttggtgtggaggagaatcatttccctgatttcataatttggggattttgaatttgaggaccttgtctttttgccccccgttgaatttcgaagctaaagattgtctctttttgtttaggcaaagtatcagtttttgtttttgagagaattgaaaaagcagatcctttaacaatttcccgattcattgtttctatttgccgttaatagcaacaaaagcaatcacgtcaatagtttttactgtataaagtttttgcaaattttggtaagtcatgtatgcattttgtatcctagtgtgttaaaaagttacatcctttagaggtatgcatttaccaatgactttcacgaaaccaaaaggattcagctttttacttgggtctgataaaaaatatttctgtatttggggttatgcaggatggtgtttttcccgctgtgggcttttcatgcagttgttgcaaggggcagattctctcttcctgctcctgttgctccacgtaaccgtcatgtatgtcccttttcactttcttacctcttttagcaaaatatcactcaatgtcgttcctatgatttgtactgatgtgtttatgatcccgtttggtttacagtgggctccttgccatgctgttgtcgcgacaccgttacttgtagcatttgaattactcctctgtatatacctcgagagttcttatggtaaatatcctgtaacctacagattttgcacttcataggttttttgggtgatagttttttactatttggcatgcgaacacactgatttcttcaatactaaatataaacattggctatgattctcaaagtttcttcttgctactgtttgtatttcggataatacggatggttaagttggaggacatctaaaagtagttcttgtgttacaattttcttgattctgtatgaaggtttttctttttgcactttctcccatttcatctgattgtggactgttctatcttaaatgcagctcgttggccaccagctgtcagtttgaagattgctttcttaccattgttggcttttgaattaacaatactggtagacaatttgaggtattgatctatgtgtctcgtgaacacacaccaaatgtaaatcatataaatctaaagatcctaatgactgcaagctttatcttcagaatgtgtcgagcattgatgccaggagacgacgacagcataactgatgatgcaatatgggaggcacttcctgtaagtccactattgttgcataaaatatttgaaggcttgagcttgaggcttggttcagctgctttaggcttgttgctctttgattttgcaattttttaaaagtatttaggcaagatcaatctgttaaacatgaatgaaaatctgtctctaattttccaattacacaactcaggactgagaagggagaaaactttgaccaatgtctctaatactttagtttccacaaacacaggcttgggattttctaatcttttgttgatgggtggggaagctggtcagtactcaaaaataaccatttagatgctttttccttgttgcctgcagcatttctgggttgcaatttccatggtgttcacgttggctgctacgttctttaccctcctaaagctttctggtaatttttgtctcttgaatgctctgcttaaatagttgtcttacctctttgactattgaaatcatatcttccaaaggtaatttcgttgatgtggttattgtgtacttattctcccttcttgttttatttgaaatacacaggcgacgtagttgctcttggatggtgggatctattcataaattttgggtatgttttgttttggtctttctttgtttaagtctttgagaagtacttgccatttttatggttgctggtaaagaatatgaaagtaatatatatgaaatgttctgcttgcagaattgccgagtgctttgcttttcttgtttgcacaaaatggtccaatccagtaatccatagaagctcacgtgcccgagaaaccgggtcatcttctaccagtatcagatatcttgactggaacagcggccttgtggttgctccagaagaggatagacaccaagatagatggtgcggtttgcaagatattggtggtcatatgttaaaaattcccgttattttatttcaagttgtcctttgcatgtatttagaggtatacaccacatgactctctaacttaccatattgtctttggacaatactgaaaaagctaatggtttggactttcaggggactcctgaaagagctaaggatatatcgatcccagtactgttttctccactattcctattgcaaggcctcggtgttctctttgctgcttctaaactcctagagaagatcgtcctcttactccgcggggaagctggtccgggattgtattttagattttcatcaagtgcccatgattgcttgggattcttgcaccatggttccaggtgacaaacacgtctgtctattttcccaaaagttttaatttacaaaatgtagtactaacaaaaaatcaatcaatcaattcacttgttcaggctattaggttggtggtcaattgacgaaggaagccgggaggaacaagctcgactgtactttgatcaagaatctgggttagttagtatattccaaccttctatatggtcaaacaaagatgttatgggatctgctgaagatttcattataatataattgtgcagttacaatacattcagtggtcatccgcctgagatagtcaagaaaatgccaaaggaagatcttgcagaagaggtaactttacctctctggcatttttttgtttcccaattcagtgctgatattaactttaggttctctttgttgttgaatcttgtttcttctagtttcagcattgcttaagtgttgtttgcattcaatctaatttgatatctctaggtgtggagacttcaagcagcacttggtgaacaaacagaaatcacaaaattcagccagcaggaatatgaaagactgcaaaatgtatattcatttattagccatgatgtttttgtaactttcttgtttcgattttactttttccctttgcttaatcctgtgtcaatgtgtcttctactccaggagaaagtgctgtgtagggtttgctttgaaaaagatatcagtttggtactgcttccatgtagacaccgtgttctctgcaggtaaagatacttgatcatgttacacttaaaattttatgcatttgcgctcaattcgtctagaaatactgtacaaagaaactaggaatctatgaggactgaggtcatatcaatatactcattggactcagtgtcatacctgacttaatgtcattgttcacaattttttgtttctgtgccatttttgttgcagaacctgtgcagacaagtgtacaacatgtccaatatgtcgtatagacattgaaaaacgactatctgtatacgacgtatgactgtgttaactttggcccatgatcaagagtaggatttgtggttgatgctccagacaaacattccagtttaccaaccatactgtttcccaaacttctgatgtttttgctgaatctttttgtttgtctgaatcagcagctagtataaaaaaaagtataggtgtatacgtgtatgtatttttctgtaggaaacctcattcaaactttagctgtaacatacaaagtttgtataatatccatctcttttttgtataaatcacaaactaagttatgctttaatgtccacgacttaaattgttatggaaagtgacactgacataaatagagataccaaaaaccatattcatatatacataaattgtttaaagccgactttcgtgaacaaaaaacattacaaagacgacaaacataaactctataaaagcctcttctagtagttcacagatgaggtttgcctgtttccattttcttcttcagcttcatccccttcttatgaaccgtctgagtctgcgttggctccacgagaagtaaccgcgacatcacatacgccaaaagctcttcacggtgagagaaggtaaaatccaaatgagcatactcaaactcattgtaagaaacatctactcctgaatctctcatcaccctgtaatgtttcctaaccattgaaggtctaatcactttgtctttctttccagctactaaatccacaggcacatcgatcaacccataaaactccccaagatcgagcggctcaggggacccgtaaacatccatattagctgaactgctaccgtaatcaaacatcttgaacttaccgctatgtttaatctgtgcaagatgctgagccacacggaaggatatacctggcatatcgttcatgttatagtgaggcaatcccatgactccaacccagtttgagctatctccgccaactacataactcatcaatgtttggactaatccaccaacagcaggatagttatggaaatctcgagctaacttgttgagaagcatccggaagaatttagtggggatgtagaaagcaggaacaatccgagatagtacaggacccaagaaaaggaacgtgtactccatcaacgtgaaacacatgttggagtcatagtgaaacccagcaggcgaaagaaggatcagtctcgagagtctgtgcggtttctcttcgattttacgggtgattacatacatcagaaccgcggcaccgcctaaactgtgagatacaacacaaagcttatacggttgatcctcgtttactacctcttccatagtaggctgataaagtttcagttctgaagttttgatttcgtgaatcttctctatcattgctgggatatcttccgttgcatgttcattgatggagtaacgccagaaactgcatgttttgaggattcatcaataagaactatacaaatatcaaatccataaagaagccgtttattctatactactcactcttttgaggatatgttttttttcacatgatctcttgaaactaaaccacgaaagttccctaggaaaacatcgtagcctggcaagaaaagcagagtaaaacatcggtaaatcttaacttcatatttatcatacagtaacttgggaaactaggaatattttggcacggaccttgatcataagctgcaaaagctggtgatccaacaacaccatttgatacccatctgaagataaaggtccagatgagaaaccaaggcaaaacatttcctgacaagtcatcaacgaaaaagacaatgaaactcaccccattgaagaatccattacaccatgctgcaaataaacagctttcctcgcatctcgtctggaaagacatgatgattacattttaaaggaacttacagaaacataacagactatagagaaacttactcaaccataatagattctataccttggtatcctttccaagagaagaccatatccatcagatgtaacaacacgaatagcttcatatggatacctatcaagattataagagaagttaaatcgaaagggcaaatagttgagtaacagcagaagtaaaaaacaactatgcacgaaatatcttctacacattccccccttacccaagctctgttataacatcttgacaggtccgggtatctgtattgtataagctcgttgtggttcttctttctgtaagagatgaatcgttatctcctagaatggcagtctgaatgatctcatcatccgaaacgtcaccatagtttcctttagagctgtgactggaggaagagaaccatgataaaactattccaaaagtttctgatggagaaagaagaagatgtgccgccttgtgaaagaaatcaaatattgtttctataaagatctcgataccaagctgaagatcctgccaaagtagaacacataattgcgtaagaaaactcaaaaacaagaaatgtgatttaagtatgcccatcaacactaacctcaatgactccgcgtcttttatcagtagttcggttgggcacgtcatgctctttccctgagatagctttgctaaaacaaggtctagacgaatgttggtaccttcctgggctcagaggctgcattcttgaatttcttctagctaaaagacgtaaaagatataatggtacccatagaaggatccgggcaggtagtaaagcccaccagacaatgaaggttatccagtctgtccaatggctttcgtaattggcaggaagactagcccaagagcggagtgagctttgagacaagggtgatggaggcgtggacatgccatcactatcatcatcaccagaggaatagtccaagctagaagtatcagaatccacagagagttcgtgaatgaagtggttgaaagaagagactccactgcaaaaccacagaaatcaaaagagagtcgaataagctgctataaggtaaccacaaagaagtattagagagttgaagagagttttacttatgcatccagcgtggtaaacgaggtccacgcaatgtaggcctaagctcccatccatgaagaccttcaagaacattggactttccgggcaaaagtgtcaagagaagcgcagaaaatccattaatgcatcttgcaatgttgttcaaagactcataagtcagagttttcactgacctgcactaaaaaccaaaatcattagttagcttaaaactattttagactaacacaaacaatcctaataccaatcaaaaacccacaacgaacaccaaaaacccaaacagacaagcattaaacaaagaaaactatccgcagatacaacgagaatcgctgtaattattacaggacaaagagtcaatatgtatactttcttcaaagagacaacaaaccttcaacaactaactaaaaatggtaaatcagaaatgtatccccaaattagtaaaactatataccactaaatctcaagattaatgtaaatcagaagatataagatatagacttagctcctagctccactataaaaccactggctcaaaatttggcaacttccatatctaaagcaaatcgaattactatttgagaaaatctaatcgaattaaaatccaaattaaggaaacaaaacagttgaaatcacatatcaaattactaaaaccactaaacatgcaactaaaaaaacaaatcagaaatcacaaaatcaataagcgtgcacagactaatggtgaaatcgaaaagagagagggactcactcttttgtgatagcaagagcattatcgacgatcctctgcatgattttgtttcccaatatagaaatacaacaaaataaaataaaaaatctgaaaaatgaaagaagatagaatccaaaaaccaaaagcccagaaaaactgagaagagtcccacaaaatcaaaagccgtaatcgggaatcgaagagaaaagaaacgtttttttttaaattgtgagtgtgtctttggattgaaatccgatatattaggggacgccggcgattcttaccgtccacaagagaaggtcggtaaacgttatttagagagacgagacagaggttgacacgtgggcgtatataattggatgatttagaatgtgtcatctattggattttgcatgcggatatggagacatgacacgtaagtctgtagtggcggagaagttacgtccattttgtctttattattattcagaccattttatgattaataaaagtattattacttaccaatatcaattacattatttatattattaataatcttgtggttcaaaacattttgctattctataaaatatgttcgaagaccggaattttggaacttcgaagtcattagctttttgagaggcacgataaagctgattttttcttcttttttaaaaaagaaaaagaaaacttatgaagctgctttttgtagtttcggatttgttattttcttgttaattttgtggattatcttggttcgtagtaacaaaacgtggacggtcttgattgtgcgaaaatctaataaagcaacgaaacttcttccacatgtttttatgtttttaaaatagcactataatgcttgttaatgacactcattctaaaaggttcaggcggaatactaataatcttcaaggaacaacgatgcacaatgaaaataacacattagtttccaagtttcgtcttgtcagactccacataatctgaaactgcctgctttaagggcattttctctgaatgtaggaagctccatgttcctcatacctgccatttacaccaagaccccaaatccgagtgtcaggagagaaaacaaactatagtttctttgcgagtctgattaatggaaaatcagaacagagacttactcagacttggagaaccacatctgttgaaatgagcctagtgatgccaatatactccctcctatccatacactgcacatacataacatgtttgttggttgatccaagcaaaaaaatttgggtctcattatagaggaagaagtgaacactaaatccagacctgaatcttctttctgttgtgttaccgcttgccaacactttaactctagctgagtgaggagactcctgaaacaaagatagagggaccaatgaatgattttcgccatcataaaaactgggatagctttaaagacagaggaaaagagtttaggacacaatacttcgatcaagtccttttcgagacgttctttcagctgttgcattgacgatgtgccaccagcaagctggcataatgcgagaagaaaggaaatgttaatcatccacatccaacgaaactaaaagtaggggtatttaagagttggcattgattgctattttaccagtatgctactatacaactctctccggatgtctacatcacatttgttgatgctctccatgacctgtacaagtcagtaaaatggagagtaaagttagaaaaagttaagagatggaagctttgcaatgactaaataccatgcatataccatgtgtggtaacccacgaacggaaggaatcatctcagcatacttctccattccaggaatcgtctgcaaattgcaataaaaacggagaagaaacctttgataaataattcgaggctcaaaacgctcaagataagaaacaaaatgtcttcagaatcttctgttgaatttatcgtgctcaaatggtgtacctggactatggacgggttgaacatcacatcaggaactttgaacctatcagcaccaatctcgagcgtccttcaacagacatggttaataagatattgagaaagactacaaaaattacaggtgcagcttcctgtcttcaatgaagctagcactttttcttttaacttaattctcattatgaacattaggttccatgcaggtttccaaagcaatgtctgactcttctaaacttttatgcccaatggctttaatgactcagatccaactaagcacttatctcagcttaaacaaggttcagagcagtggtacatttggctagaaactaagctcaaaccttatacgtagaaaacaaaagcaacagtagcatgtacatttgaggcacaaataaaccgaaatagacatataaactgagcttactggccatcaggaagctcgtacgacgtagtagggatgtttgaatatgatttatctgcagataaatgcatcacatcagaaaaactaaggctatgcgatcaaatgacattgaaagataaaaagtatctaacgttcaactctcaagcaactttaaactttgaaataaaacaaatttatgaaaccagagacagacagaataacataaggtaccgtcatagggagtatcaggaactcgacaaatggaatccttgatatcacccactatcatcctctgttgaaacaaatcaccaaattatcacaactgaaattttcaaacgaagtttcataatcaattacagacctggcagaagagtttgtagctttccgtggtgtcaggaatatccacatcttcaacctgcaaggattcaaagggaggaaattagagactattcactgctagtagtttcattcactgatccacatatgcacctggaattcccctgctcgtacttccttcctcttgaaagagtatctaggtcttatctgcagaaaaaataaccagtatcactcagataatttggcttaaaagaaaagaacagtgaagaatttttttaacctactttaattcctttactctccaagcttttcagtaggcagtcagtgagaaattcccctccaagtggagacgatacaacagcctgcgaataaaagtatggtcaacaatcggagaatcacaatctacatcaatgctgtaggtcataattcacatggatgagaatttatagcagctacagatgactatggaaacgagagatgggaaactttctcctgcagtacaaaatccaaacccaaagaaacagcatcacaaagctgaattcttactaaatcgtgtaatacaagtaccttctgaagaacataaccatcatgcaccggtgaaatggttgtggatcctccaccgctagaaatacaataaagtgtcatcagtgcttctcaaattatacaccatacagaacaaggtagactttcacagcatatagagcagaagtggaacattagtagcttctacatactagagaaacttttaatacttaaagtcttaccagtcaacaaccaaagaagtagcacgcccagtagcaaaagacgtgagaacctagcaccaaaaacaccaaattcatgtagatagttagacatctgattacacaagagctgactggatatcaacattacagtgaacgtcatataataatctatcaaaaagaatgatgacccaagggagagggaatatacagggttcttagccataaacagtgccggaactttgtacttttcaaacattagctctgccgccctgtcaagcatatgatttgagaaaatcagtaacacaccaagataaagcaacagtggtaataaaggatatttcaaagcagataaatcatacttctctctctgctgttgagtgtttaaaggaggctcagctagcagcattggatgctccgtaggatcaatcatcagacaactccttaaaagacaaagtttttttagagatgaaatgcaaacaacaattaagagaaaatataatgctttacacatttacttgaaagcatgttcccatatattgtccaccaaatcccagtcagaaacgatgccatcttttataggtgacaaaacctggtgagagaaaatgcaatctgtaatttcaccaacaaagttataaactttaacattaatcaaggagaaaaactaacctccatatgatctctgcggtagctcatggcttgagatcctacatagagcttgcgtttgctcttttccttttcagactcggtcttcgaatcctcagagttcgaattagtctttgtagaatcaacatccacatccattgcctctacaccatctactgccccaataaccttatgaacacatcaaaaaaaaaactaagagtctgaagatacaagggacttgagcaaatctacaataacaccattaagcttatagtgacataaaatgctggtaattaagacttacggaagggaaaacggccttgggagcatcttcaccggcgtaaccagccttgcaagtgtgcgaacccaagtcaaccacaatagctgacacttcatctgtgaaaacccaccacggaaaaaaacagctcaggaatgtctcaaaagataaacgacaaagcaattcaagggtttaaagagaaacccacctccgccgtacatggctgcagcgaacgacaagggtggagcggttctctatctgagctttgtcgccggagggtttaaacacgggacggggttctctgtaatctcggatccagctgaatcgggtcgacttggttttactgagttcgagttgtggggaccacaaaacctctcatttaatccgtcgggtttaaattattcaagaaactaaccgaaccgaacacaatttttctaaaccgaaccaacttttgtgaccaccctttttgcagtaaacgaagctgatttattgccaaataaaatgtctatgcttaatgaaagtgtataatttaaattacagccgaacaaatactgaaatccatattttcgagttacataatagaaattatgataaacaaataatctggttatcttttgatgtacaatttgctcaaaaaggattcaagtatggaaccaaaaaaaaattattaatgaatcagcaagaacactttgtagtttgttatatgaatatatgtaatgtaacaatgtcacttctaactgagttgctccatagattttcgagtgttgacaaatgttgcacttttgttgaacccctcaagcaaaagaatccttattgcctctaacccggtttggaatgtgtgatccaactgcaaaaccaaaaacaatcaggttatgtctttctgaaattttttgagataattatgggataaatctgcttctacctcttcctgttcctgtctattgaactggcggagaacaaaattggctgtatccatcttccctggaggacgtccgatccctgaaatgaaacattcgacaatttgcaaaaccagagaagaaaatgggaagatatgtcggagtggagaaaaatgagaactgtacctattcttagtcgaggaaaatcacggctacctttgaggcggtctataatacttctcatcctgcaagtaaaagaacaacccatcatgttttcttgtagagtttctctatgatttgatagtgaaaccgcaaactattatccatccacattgcttcttaagtaaaaagtaagacaatacttaaaagttaaaacacaaatgaaaacatcaacaggccagatagagagtgaaaagcattgtacccattgtggcctccgtgaccaccttttggcaataaacgtagtttaccaaagggcaaatctaaatcatcgtaaacctgaaaaagacaaaaaaaattaagacggcatatgcactctagagccagaatttggagagtaagcgagagagaaggttaagtataccacaagtacttgctttaacgggatcttgtaaaatgaaacgatttgtccaaccttcaaagaattccagcaatcataaacagaaagaatcaaaataacaagtgataaaagttaaagagattggttaactaaataaaccaaagtttgtttccgatgagctcacttacagactcaccacttaggttcatgaaagtttgtggtttagccagcataatcggtatatttccaataacgcctatgataaaggaaaacaatacccaaagttagaaacaaaccagagacagaaaatgatatttatttcaatattcattctccggaaacagttagccattgtttctatcaccctcatcaaacatttgagacgtatgaaatttgaaagtttcaaactttgagataagaaaaccatttcaaaatgaaaattcacaatggagaagataagagaatgaaaaagagaacctttcccaaacaaggccttgaagttaacagtgttcatggagatgccttctgcatcagccaaagcgtccaccatctcaaaaccaacctgcaattcatgatcacgttaccgagctgaaaaggaaaatgcaaagtgagaaagcaagagagagacatacgttgtggcgcgtgccctggtacttcttgccgggattacccaaaccaacaatgagccatggcagctgcagtggcggagattttggcttcgaagaaggtaaagcttgaagtaactctgattccggttgagaggagaatgaattcgatgaaaatgacaatgattgtgacgatgatgataaacactgagacatcaagccttcgagacctcttattcctttcgtcagcttccgacaaggcaatgccggcgataaaaacgtcgccggtgatcggaagaatagtgagcaacagttagaagggaagctaagatttgcgattttagcgggaaaagctacagctttcatcttttcttctggggaattagggtttatagtttatccccaaatggattttgttctgtcggtgtcgaccaaaaaaggtaaaaaggagaaagaaaactgaagggactagatttaaaagaccacaaaattgaggtacgaaaccgaaaataacaaaaaaaaatcgccgttgccggggatcgaacccgggtcacccgcgtgacaggcgggaatacttaccactatactacaacgaccttgttgatacacaattcaatataataattatttaattcgacaaatacaaagcatacacttgtcgtcctctttttcactcagagacagcttctttgaaattagctttgacactgagctcatcgtacgcattcacgagattctcaagcctcgcgacgaattcgatcagtagcgaagcgaacgtagctagagaaagattactcgcgctctcgtacatttttcccggctctcccagtggtggctgtaacatacttcccggcgtaatagagatccggctaggccacgacggctgtttatgtatcatcgtccttgattgcaggtaaggaagcatcgtcgccgaactcaagttagctgcagttgtaacatcatcccaattcttcggtggacgaagagtggcttcactctgagatttatgagccaagatccgacttagatcagagtcgagattcgagattttttgttcatcagtcaaatccctaaccctaggccggttcccgatttcccaattcttggcgttcacgagaaggtatgatttcttgtcgattttgctctgtagttcttctgctgcttggtgaatctcgtagagtatgtcttctatagggtttagcttctccatcttcttcaggctttccccaatgtatcttagtacttttgctccttcgattcccactctttgaagctcattacgaaattctcgtcttctatcctctgcagcctgcaattactttgcatactcttgtctcaaatctctcttaagatctgaagattatagaatgtttctgacttaaagattggaaagtacctggatctctgagagaatgcagccatgtaacgccatgaccatgatagcacaatgcctcaatgcaccacctactttcacatacagtgcccatgggtatctaaaggatttgtacggtccgtgtggtggctcccatgatgcaaaactcatcttcacaatcacaccaacaacaagaaaaagatgtgaggatctcaagtaagctggtcttttgataatgttgttgctgttcttatgtgttaaaagaatcttaccagggtgtcttcttggcttgtagattgaacggctgatctgtaaccactgtacactggatcttccgcgacagcttcatagaccagaatcctagatgggattgtatcatatgctacgcactcaagatatccgttcacacaacctgcacaaaggaacattttccatggattggaaacagactaagaagcttttcaaccagaaactcaaattcagggagagagttaataataaaccttccagagaagtcgctacgttcacaaagttcttggcgaccaagttatggagatcttccccagcccatatgggataaatgcaagtattcactatgaggccaacactggcaccaagagctatcagaaggaaccttgaaacagctgtttccatgaattcccctgttttgtatcctgacactattacgtagcaataggtcagcaagaacacccggaatccgtactcgtaaggcttcatcgttggatatagctttgcataagtcgcaaaaaaggctgatacaagagcaggcatgcgatattgtcagaaatcagaatgagattgtggaagctttagtttagaccacacatcatgatttcgtatatatacctactacaaagatgctagcagcattaaaaacatctgcccaatttccagtcatctccgatatccaagacatgccaagcgccagtcctcctgcggacaatgttcctagtccccggttacatcctttgctaaaggtggctcctatacaaaaaacaagagaagatcacatgtcaggtattaaagtttttagaatgctcaaatttgatgtgtaaagtctgttgcatatacctatactgaactcgaagataacaactactgtaagaattgcccagagatagtggccgctgagctctaatcctgggatcttaaagaagatgaggatagaggtaagtgtcagagccaaacccatcttcgccgagaatatcatcttcctcgggtcagctgttcccatctcccatgccgtaaccaaaacatcctttaatttcttcacaacccccgtgatcttgtcagagaagtagctgcaaacaacaccaatagcatttcaagacttaaccatttgagattacttgacattggactccaagaggcatcatattaagataaaatggcttcaaaaaggtttggtcaatagaaggttctggaaagaaggagagattgtatgtaatgtataacctgtaggagcagcaacggacggaagttttgtcatcgtcgttgacattggaatagcctctgctctgtaggataagcctatctctcatgctttgtcgaaacgaaccatcgaacatactacctcgcctgaaagatccgtcgaacatgctaccccgcctgaaagattccagctttggtgccgccatttctggttcttgattccgatgattgcagaagattgatagaggtgtaaacagagacggaaagactcgggagagattctattatttattgtgcatttgtggtttatgatttctatcaaagacacgatggtgtcatgactgatgaatcatgaactgaaaaaacccagattcccaaatttggaactgttttcgaattttgcaaagaaatggtatgcaaatctggtatgattgctatgcacgtcttagagcacgttttcgtgtctaattacagattgtttttcaacccataatctcaataaaatttattttcattaataaaccaaaaataccggtcaaaattatgaagtgtttaatgaagtgttgtttttttctgaaaaagggattacattaagcgtatccattatggcagaagtttattaagatattttgttcaattttttggagtgtttgtggctacctgctatcaatatattttctttcccattgggtagaagtgggacttttcttcatttgtttatgatgattatgtgaaattgcaaacttcagtcaaattagttttacaacaccatattggtcttgttttcctggtttgatgtctctctctgctgtgatatcttgattttaaaaatcatactaggtctctggtccaaggccattcgatgtgattgccaaagaatattattcggcaagatcagatgctataaaagcaaaggagaagcgtgataaaagaggacaggagcaagcaggcctagccattcgcaagctcaagcaagagatatctcatcttggttaaatttaatcttgagtaatgaatcagtcaataatttatgtcatgagatatttgagtttgttttgcagggttatcagaagcaatgttggaatctgaatttcagcgtgaacatgcttttgaaagtgctacagaacaagaattaacctgtcccatttccgataaccttcatgagtcagttgaggctgacgatgactctgttcagatgttagataatttgaccttgaataccaatcctgctgagagctgtgagtctgaggaaattcaaactaaagctcttccctcaagttcctcgggacaagatttagttgcatcagatgaagattcagaggacgtggaacttggcgatacattctatagttgctctgagcttttacagaggaattgctgtgtactaccatacaaagcacagaagaagaccaaagaaaatccattcgattttgatgtactaccataatgagaaatccatttgattttcatatattacttattaaccaaaaaaaaaagaaagtataaattcgaaacaaagttaggtactacatctgcaataaacaaaaaacactacgaacaatacataatacacaaaaattacaggggctaaaagtgaaaactccaaaattaaaacccggcctggtcgtacccgacccgacccgtataaacgactggagaagcagagatactcgcgcttcttcctacattcgcgctacagagacgaagaaaaaaaagaaggaaaatttggtatcaattaaaaaaaaaaagtctgaaaaagtctgattgacgtgacaaatccacgtctctgtgttttcttctggcaggttaggacttggtcttctccttgcgattttcccaggtttggagagatgatcttgctttcccctgtggttatttttcatgatcggatattctgaatggtgaattgtactgtgttttttttttttgacttagttgaacccaatgccgttcttctcttgttgcaccaaaagagcaatcttctgttcctctccaggtaggttcgtctcttctgctattttcttcttaattcgcattttgagaatgctactaggtagatccgaatgatccttgcatttcattagcatggttttacttgatcatgttgttgcattccctggtttcaattagtttcctctaggctttatgttttgtagcttctttgtatgtgatttggtttgatgatttatataacaatcgtgttttcaggccttgttgatagagaatgaaggacttgtggctttatcaagtgtttccataagtttgcctttggtgaattgatgatgaattctctcactgatcaatcaggcagctctcatggaggttcaactccccgtagtcccttctctccatcatctccacgtgaaaggcataataaaggtctggcggattccagatttcaacgtcccctgcccaattcttcagctctaggtacatttttatgtatttgtctgcattatgttattagaaaaggtctctttataatatgacgtaatgagttatttctaccacagatccatcatcccctggatcaatgctccatggaggacacaagtcccacgaggctttccaaatgaaacaggggcgatttgatctccaagccgcaaagatttcagaactgatgaaatcaaacaatttagatgtattgctgcttaagcttaagtgtaccttatcaatgaatttttatatgcttttcctaggctctggttctcttctttgtcatactagtttatttttcaaagttgtttataataataccctatatatgcttctgttgaatgcagaatgctcccacacagtcacttctaagtatcgttaatggaattcttgatgaaactattgagagaaagaatggtgaactccctcaggtacttgagtctctaacaatcctgaccatgatttttatggatgctacgtgcttgtaaaagcaaatatgcatgcacacatttttcaaatgctgcttgggacatcttttgatctaatctgtaatgatcagcgtgtagcatgtctgctgagaaaagtcgtgcaggaaatcgagcgacgaatttcaactcaatctgaacatctaagaacggtatttcttgtttcttcggagaaatagtaaattgtgttcaaatgttttatattctgagttctcttttttgcagcaaaacagtgtgtttaaagctcgtgaggagaagtaccagtcaaggatcaaagttcttgaaaccttagcttcaggaactagtgaagaaaatgaggtatcgtaaagaacttaggccctgagatttttttgtttcttgtaattcactaatgtgctatatctcaccagattgctacaagacaacttcgacggataaaggtaacgctttttgcatctttccactttaatcatgtaattactgaaagttttgcggggataaacttgattatagtaagatgtttatttgcttgagatggctatgatagacagaaaagtccaagctggaagaaaagaagaaagacaaagaggaggatatggttgggatagagaaagaaaatggtcattataatcttgaaatttctactctaaggcgagaactggagacaaccaagaaagcatatgaacaacaatgcttacaaatggaaagcaaaacaaaaggcgctacagctggtatcgaggacagggttaaggagcttgaacaaatgagaaaggatgcaagcgttgcaagaaaagcccttgaggaaagggttagggagcttgaaaagatgggaaaagaagcagatgctgttaaaatgaatcttgaggaaaaggtgaaggagcttcaaaaatataaagatgagacgataactgtcactacaagcattgaaggtaaaaatcgagagcttgaacaatttaaacaggagacaatgaccgtcactacaagccttgaagctcaaaaccgagagcttgaacaagctataaaagagacaatgactgttaatacaagccttgaagctaaaaaccgagagcttgaacaatctaaaaaagagacaatgactgttaatacaagccttaaagcgaaaaaccgagagcttgaacaaaatctcgtccactggaagagtaaagccaaagaaatggaagaaaaatcagagttaaagaatcgaagttggagtcagaaagaactttcctatagaagctttatcagtttccagtgccaggcgctacaagtatgtttacatatgccattgagtagaatcagtcatcgtgtttttctatagtcacctaaacctgccaattttccaggagttgaggttctattctaagtctatcaaacaagaaatactaaaagttcaagataagtatacagtagagtttagtcaattaggtaagtcagttcagacatatgcttcttataaatagctcaaagtatgttatatttgtgactttgtaaattttggtggtgtttatcaacaaatactgatcctcagggaggaaattgcttgaacttggagatgctgccgcaaactatcacgaagtcctaactgaaaaccaaaagctcttcaatgaacttcaggagcttaaaggtaagtaatgtgtatcatgcataacatattgatgtttcaacttctatgcaacctataagttctctagttatggcttgcaggaaacattagagtgtattgtcgagtgaggcctttcttgcgtgggcaaggtgcatcaaaaactgtggtagaacacattggtgatcatggggagttggtagttctcaatccaacaaaacctggcaaggatgctcatcgaaaatttaggttcaataaggtctacagtcctgcctctactcaaggtgttcttttgtttgcctgaggaatttttcttcaatatactttttgttggattggtgtgttcttgggactaatcaaaaaaattaatatacttatgtcattgtatcttttaattcttgcagctgaggtattttcagatataaaacctcttattcgatcagttcttgacgggtacaatgtatgtatctttgcatatggtcagacaggatcagggaaaacttacacaatggtactcattcactagtatatcacgattaagtggccagacaaatgatgccactacattcataccattatcattgtttttgtccagactggtccagatggagcaagcgaagaagagtggggagtaaactatcgtgctctcaatgacctcttcagaatctctcaatcccgtaaaagcaacatagcgtatgaagttggggtgcagatggtggagatatacaatgaacaagtgcgcgatttactctctggtgacagttctcaaaagaaatatccttttttgtgctctacttacttttttttcttttgccctttcaaatttagttcctccatatgaattttggctctgttctccaactttctgtttgtgtttccattatgttgttttccttgactttcacacactagggattctctctacaactcaacagaacggtcttgctgtacctgatgcaagcatgtatcctgtgacatccacctcggatgttcttgaattaatgagcattgggctacaaaaccgagttgttagctccactgccttgaacgaaagaagtagccgctctcacaggtgctcatattgatctctgaaacaaacatgtgtttttcttttatcattctctagatagttaggtctcctagggtatttgagaaaagacaaaaataacttggatagatgattcctaatgcagcattgtcactgttcatgttcgtggcaaggacttgaagactggttctgcgctgtatggaaatctacatttggtagatctagcaggtagtgagagagttgatcgctcggaagttacaggagacagacttaaagaagcacaacatataaacaagtcactctcagctctaggagatgtgatattctctcttgcttcaaaaagttctcatgtaccatacaggaacagcaaactaactcagcttctccaaagctctctaggttaactccaaatcttctgctctgttttttcaatcgtgatcgaaattttctaacttatctctgtgtgatttaacatcacaggtggtcgagcaaagacactaatgtttgttcaactgaatcctgatattacttcatattcagagtcaatgagtactttgaaattcgcagagcgtgtctctggagttgagttaggagctgctaagagcagcaaagatggtagagacgttagagaattaatggagcaggtaaaaaaactaaaacacactctcacaatatctcatgaagaagatctaccattaggtcgatattgcactaaaccttaaagaaccgttgcagttagggtcccttaaggacacaatagcgagaaaagacgatgagatagagcggcttcatttgcttaaggacataaattacccacagagactgcagaaaaagagcttaggacaatccgatgactttaactcagaagcgggagattcgcagttgtctatagaagatgactcaagattccaacacgattataccagacagtcacgacactctgtcacggacggggaggccttagcttcttccactgatgcggagtatgatgatgaaacagaaggatccactgatgctccttgtgcagcagaagggagaaaacctttaaagatttcagacaagtagcgttttttccattctcttgcttcaatatgatctagtttacggtttgtttttgtctgaaacatatatattggtgactgaaaatcgcagacctaaaccggtgactccaaggagtaatacgacaacatcacgaccacttgataaactcaagcaagtcactatgaggacgacaaacattgcaaaggctacgtcagccttgttgtcaccgagtaagaaatcaaaatttataaggtttaggttataagtcgaatagattgttatacttgctatttgttactattagttctcataatgatgtatataaatttcttgtttctcaaggttctcaaggcatgaagaagacgggaagtgcttctaattttctaaagtcaccgaaagattcgaaacgttggtcttaaaaatagtatattttccttagcatctaattttttagctttttaaataagaaattattttctccaccctctatgaacccaaatcaaatgatcaatggtttcatttgggacttaattttgtaaaaaaaaatttgtttttctatgtaagcatttgtcaatatacggatcgtaataatcttacgatttttttaataatgtttgttaacttgacagtaatgtttcatcctaaatttataacctttaattgtactcttcttcaaaatatggggaatatttatagcaactctactatgtatgaatagtatgcataagtttatgaaacttaattaatagattagggtaagagtaaggttcctgaaagtgtgaacgaagattataaaatgagaaagggatttaaaaagctaagataacaacttgtatcaacactcaacagttagctccaatccgatccatagtaattccactaataacaaaatattggtgggtagtccccacagtgtaatttgcatacttgaatttagccctgtttttgttctctgtcaccgaatgatgtgatcgccaaatctatttttggaatattttggggccccaatattttcacttgttattgtaaacccccaattctgtcctcttcagcatctaataaaaatatgaatatatatatgatcatcctcaacataatatgctgtttcatgtatgttaagatagcaacagaagcattgactagttcagaaaaattaagattaagtggttgagacttgagaggctacgtttaagcgtcatgggcaactagagattgtaactatttttgtatataataatcattgggaaatattaaaactataataaatatgacaaaacatatccctatagtttaagatgataaacgattataatagttgttagacactctctgacattttgctttcatgcccattgcacatacttatcagtggaggaaaaaaacaaatagatacttggtcttaaagcagacaaagaagatatagttttagtcttttagatcaccaaataggcaaatacaatagaatatataagaagacaaaacaaatggttgtgtagaaaccagtagcttgtacctaaaaaaaacaagaggaataatccatagtatatgtgacccctgatttgtattttgttggattttaggatcataaaattcgatctatatatgatagttattaatatattttgacaacactaaaaacttttatgaattgaaactaccacaaaagtctgtaagatttaatcatgaaaatgagcctttttcaataaacaacgagaaagtaaacatgaaatcccacattgaccatccttcaacgaatggtccatttcaagctgtccttatgaatgccatgagatgcatgcatctttttcgtctttctttctattaattttttggctcttgaagtagttattaacaagtttgcattttagctctcggaatttttttcttttgttaagaagtttaattcctgcatgaacctatgtataaacatatctatcatgtattaatattatattcgaaatatttttgtaaggattttatcataagccatctacaccatactaatctcgggtaaattacgtaatacctgcattacaaagataaaacttaaacctcggctacgacctgccatgcatatggaatgagtactagctagtgtccaaaatgtcataaaaaaaattataataaaaaaaaaaaatcagaaataaagaaacatgtatagagagaataacagaaagacaaaagtgtattattataccctcactttctttatatatacgatcatacaaatatctgaattgttctatcaatcataaagattatgaataggcaacatccgtaagatcctgtgaagtgaaccgtcgctattagaattatttttgaaaaaaatatgaaatatataagagatattcatatatggataataagagagaccacaaaagaggaaggaagtctcaagagattggttgttcgtctgtaaaacacgtccataggcttcgcatcacaatttactattttgtctctgtttttggtttgggagacacacatcattgtctttggaaagctacagaagtgaagggtgtttttgttaatttacaccgacaaagtctctttggttccataactcctcttcgttaccaaaccttgcgcaacttgcctcttccagtttatcgtatatgtaactatgcctttctcgctgaaaaaggaaaatgtttttagtaaccaaaagcaaattacatatgaatggaaatataatcccttaacaagaacatatcgttttatattataaactaatcttcatttttagtaattctatagccgaagccgtttttaacccactttacgtaggaaagtgaagtggaactctagacatcaaaagcacatgcatgtctgtaatcagactaagaactctcgaccctaaaattaataaactaaaatcaatatttaaaccgactggtaacgctcatttctttttgttataaagactaatcacatttcattgaagatttggtaatatatacaatttacaattgatttctctcttcccatcatcgtcaattcactcatcaacactttgacatatgagctaattcatccatgatttataacttcatttgcagaaacaaaataaaaaaattctgttgaattttatttctgatcatttcataacttaagaggacaattacataagaggaaaaggaaaaaggtgccaagcaaacgaaatagcaaagcgaaaagggagaggacaactgagatatttacatgacaattataagtcaccaataaatttatatcgtcgaaattacaagtatacagattacaaatattatcccaagttgggtcgtatatatgacatatcgcatccaaataaatagaagaataatttcgaaaacaataaaaaagaaggaaaagagaaaagagaaaacaaaagtcaaagggaccatgttgataaatggaagacaggactcccatctcttgtttgtctccccatctccactgtctcacgtgcctttgctctctgccaattgtattccattcatattattcaatactaatagaaatactttatcacgttaaaataaagtaattgtcataacaacaactagttagacttaaaccatgcaaatataatgccaaaaaaaaagagactacttaaaccaataaaccatacaagatcaattatgcaaaggctggatttgacctgtcgaacatattttaattgcgggtcatatagtccgcgtgatcatatattatagtctaataagattgaatctaaactacaaacacttgtatttttgaataaatctttgtagaaccgactcgatcaaaacataccggacccattacaacatctctaccagactaccactaattaattatatatatgcttatcttaagaattgaaaaacattattagaatgttctagtacctgcatggaatcaactgcatctgtctctgagttaaagtcataaaacgaacttgctgcagtgagtttcatcgagaggaactgaaatccacaaaaaacatgaaacaaaattgagtaatttataaaattaaagcttgtgttttggaagttttttaaagtgtgtggtaagattttcgttttttttttgtaattttcgaatatctaagatttgccgtgtttcggaaagtactactaaagtaggtatttaccgaacctcccatctcatgaaacctccattttctagttttttttttctttctccaaaatacaagaagacaaagtcttattgatatatgtagtttatgattacaacttaaattatttacctcgacttgattctgtagagactggacataattaattatctcgtcaagcatcgtagccattcccatagcctgcacccaccaaacatacactttcattataagaagtaagcaccactaaatcaatagaaaatcacatcactttttctacaattttttttctgagttctttgtaaacaaaaaaaacaaaaaaaaatccgaagaacaattttcggaaaatattatgagcggtatcaaagaaaaaagctaaaatcacactcatgcatgttaaaaatacttttggatacatatgttcttgtttaactaaaagtatcacttttatcataaaatgcttaaatttgattcaagtataattagtgacaattaatgccgatgatgaccttttcatatgctatttattgtttaatggccattagtttctattttgattacaaatatattaaaaaagaagtaatgaaaagttgaaaatgttaaactattatatttatctttgcattattaccttataacatccgggcaccatatcttgcaagcatcttaatctctcgtttattttccctcgccgaacctgaaattttgatatagagtgtagacatgtatataaatttaaatgaatacaccacgtttataaaaaaaatgaatttatatagacaatttaagcaattttacccgttctgctaagctgtggctatcagtggcttggcctcttctggctctcacatgaacaacttctctctctttctcgtcttcttcttccttcttcttcttcaacctcttacctcttctcaaagaaccctagatattttttagacaataaaagtaattattttaaacgaactttttaatgataagttatgaaaatgataagataattagctagggtttcgagatcaattactgtttcagtggcaataacattcgtattatcggagacgccgctagtctctgatgaagacaaagtaggtaacaaagcttttctcttcttggtctcatcgacgatgttgtgatcactatggaggaaacttgaagttgaagagaaattgttactactgtctggagagtttccgggaaagtgaagtaattgttgttgatgatgatgaaggaagagcgattcgagagaagtagaggaaggatgaaatgtttgaaaatgaaggttactgttgttgttgtttagatctgcagcttgagttatggaagaatatatatccatggctattgtctgaaaatcagaagaaagattctcgaaatttgccataatataatgaattgagatatgatcttcttgacacttttttttttttttttttctgacaacttctttagactggttgatacaaaacttgagacttttatattgttcgattggatttttttattaatttaatttatgattttagaaaaagaaatgtggagaaaattaagaaagaaaaagagagaaataaagggagagccacgtgggcaagtgaacgttctgggatttgtgtgtcggggagatatgtccaaacaaggaaaagtaggaccaatgtttggtcgtgggttccattaggctttctctgtttgcaagggggaagaacatttctagtcagtttggtgtgaggttaagaactagtggtctatctttaaatttattattaatattgggaagaaaatattgaaatggatgtagctagtcaaactaagttgatatcaaaacttgttttaatgaaaacatccattaatgttttgcatggagggttttttatgtaggtgtatagggtaagagatcacatccatttgccaacttaattataacttccaaatggccaatgccaattaatcgacaaaaatactataaatatgtgtatgtataaaaatatagggagataaacgaaagtatatatgaaggttcttttacataagttgacgccaatttatgaatctttagttaaagtttaagttaccaaattatttatattggtgaagacaaattttcactttaatcggcatactagagatttcctttgtttgtccttgtgatgatcaaacacattgagttttaggaaagagtttttttttttttttttttttcttccttttaggaaagagttaggttgcaacaaatgtcaatgtttagttgggccattactatagattatctattatgtatggtggagggatttgattcacatgcaatttcattcattcaagacaacttactctttaacttgttcattaatagaagtagtaaagcatccatgcccaaattggtgtgctttaattaggaaattttggaaacagaagttttttttttttttctctgaaagtgtctttcattaaaacttcatagatgcaggtcttacattgtgattgcagcagtggactttccacttacattggaaacagaagataagctcaatatacatatatatattcttctgacgttaaattggtggatagtcatcgccgtcgctgagctggcgttacttaattaccatcattattttgatgtctcaaatatttttaccttttccgtaaaaaaataaaattaaccactaataaaaaaatagtttcagttggcagcaaatagcaatacaaaattgctgatttagtccggtcaggcccaatcacgaagttttgtatgttacggtccctctctaggtggaatcggaacaagatcatcattatatacattcccaaaaatatcatctaatacagaacacgaacaccattctctaactgttaactgacaattttaaacatacaaataataaacacatacaatgttagtggccgtgcgactaattttacttactgtcccatttcacaatgacactatctggagactgtgcaaccaacggtccactcttgttcacatctacaacatccatttccgaaccaaatccattgttctgtatcctcgtcaacgtatcctgcacgtgcgacatacatggcctaagatctttatccgactgcaagcattggaacgccagctcagcgacagcgatcaccgtctgtctcactcttgtatccgtgtcaaacccaagtgacggatccaccatgtcgcggagctcgtggttctggattttaacgactgccatgttcgagaggttgatctcttggcgcggtcttgtgatgtcgactgctggaagtgaagagataagctccattaacactaccgcaaagctgtacacgtcgcttttgtttgagagttgatagcataagtggtaatccgggtcgacatatcccggagttccttgtggagcggtagatacgtgcgttttatccataggaaacagtctagagagtccaaaatccgcaacctaaaatgtcgaaaacagtaaaaaaaacacagaaagaagttaagattatgatccgataaaatcccaccagattgagtaataaccagtgtgagttactgaccttgacattgaagttttggtcgagaaggatgttgttggatttaacatcacggtggatgatcttggaggcgtggagatacttcaaggcagaggcagtttcaacagcgattttgagccgaatagaccaaggaagtgagctagggtttgcctgtggaccatgtagatgatcagctaacgtgccgtttgcaacatactcatacactagcagtaagtcccggctctgttttgaggagcatccaaagagagccacgaggtttggatggcgtaaacccgttaagatctcaacttcattcctgaattgctctgctcttttgaagttgttatcgtataaccgtttaacggctacgcttcgtccatctttaagcttaccgtaatagacagtaccaaagcctccatcaccgagttctttagatgggtcgaagttattagtggcttcttcaagttcttcgtaagagaaaatatgaactccgactaataattcctctgctttctcgatgtcaaaagactttgcagatggatctgatgagatgtttcttggaagcaatgctgaagaatttctgtaactttttgtttttctacgatggtatacataccaaaatatgctcgcagctattaatcctacgaccgcagcggatgcacctgagatggattttgtaatctgttaaaacttgagcgggatgattaacgaaacaacagagcataacataactttgccaaagtagaattttatatcttttgatggtgcgaagagcatcataaatcaaatcgaatctattaaaatactggttagttattataaccacatatcaaagtctttttcccaaaacagaagattaaagaattttacctatgagtaccttcactatcactctccttcttttatcatttttgcctggaatgaagaaacagagaagaataaaccagtcaatggactttcagatttcagcattcgtaagaacatatagattgagactaaaagttacttaaccagtcagagattgtaaaaaagcctttaacaatgtattgacaaaactaaagcaaagaaaaaggaagggacaacatgtcagaagatcaattagacgtcaattcacaagtggttaccattcgtgcaagtatcatgaagtttaggtccatcaggacacaagcatacgaattcttgttgatcagttccacatctcccgccgctggtgatgcagcggaagcaactgtttgcagtccaattcagaacaaaacccctcttcaaaatctcaacataagtcatacccatcacatcagactcattactagctaaaacaggaacatccactagtttctggcacgacatggatgcaatttgtttctcttttccaagtttctttctgtcaaagaccccaaaagatcgaagaagactcgtgtttcgagcacaagtaagagggtatgtcctaaaatcctccagcaggtgatcggaacaattgtaaagtatagtgaagttgatatgagaagggttcacaaagaaaggagtcctatggagggtaagattgttcagcggtctgggacatggatcatgagaagcctttgagttcacgacctgaaacgactgtgttaagtaagatatgttcttgatgacatattcctcaccggagatcccgagaacagggagcttttcttcatcatcacaagtgagttcaaaacttggataaccacaaaaagattcttgctttccagatagataaaatggataggagatctggggacctttgccgcatgatttcggctcacaagccttgaactttggatcaagagagagggtttgagttgctattattgtgaagtagaagaagatggatgtgtagagtaaacttggagttgaaggattcattttttaagaaaaaactagatgaagaagaaacaagaagaagagaacaaaacagaaagaaatcaaagattttcaggaggagtgggtgagagttaaaatgtttgttcaactagtgtgttgaaagagtataatactaattttcttggtgtaaagaaaataaacactgcaatttgacttaaaaactgaaacttttaatttgtctctttgagcctttgaggttgaagatgaccccacaaaaaaaatcttttatgggaattttagtgctctttatttttttaaactggaaaaatcattgtagtggaagtataatggattttgtgtaaaaagagattttttcaagagagggtcggttagagtcgtcgtcggtctactagcagaaacttcaaacgcaagaaaattaaaaagtcgtttttttgcttcttctaagaccgaccatgaaaaagtaaaaccggatcgataataactagtgtaggttcgacccaaaaagcccaagatttgatccagcagcatgctcgcgctacaaaaacaccagctgtgtaatccctaatatttttggagcgaagactaccacataaatacttgggacaaatgataaacagaaaactggacacgtaaatccaggttgaaaaagtcaaaatgtgtctttaaagattattaaaagttttggtcaatgacgataacaattctcgaccaatttggtcaaagtatacgttctggagtctgacgaaactaatcttaaatgttaatcacatcaagaacagaaattggtactaatcttagaagaaaagtggtactaatcttagaagaagtaaaagcttgaatctaaatgataaacgactaaccttggttagtgttatcgtcgcaggaggagttgtgaggtctgtccgcacatagacaccggaaactctccgaatctaacgccgaaccacaaatcccaccggaatcaatgcatctccggcaagctttgtcttccatgatgtacctcaaatcgaatccttttctcaaagcttccacaaaagttagttcggaccgttgaagctcgtccttagcagacctcagcatcggaatttctgcatatttcatacaaccttcgtcagaatccgacgatcgcaagacatgatatgtcaccggatcctcgtagctttcttcgcaagaaatctgcaacggagctacgccggaacagttgacgaatacatcgatcgtctcggtgttggagtctaatgtgaactgattcttcccgttgaagttccaaatgtttaggcaacctccgtctagtagactatcatcggcaacggaaattttatgatcctccagattcgcagaaacaacgcgaagagtgatgttcccgatcgctagggttaggttttgatcaccctcgcaggagagtttgaatgacgaatgaccgcagaatttgggtttattgaatccaccccagaacggatacgtggtactctcgaataccctgtgtccagatccacatgtcagattacgtgagcgacactcctcgtactgttgatcggctgagaagcacgacgggaggtcagcgacggagaagacgacgaagctgatgaagaaaaaaaagatggacattgggttttgacaactaaagccttctttttttttttttggtgagaggttttggggattttatggaagattggtcaaaatgatcggtgacgacttttattaattacagtccggcgaatttaaaacagattatgatcgctgattagtgattacattataactacatcctaaataaattatttatgtatatgaacggtcagagattcatacagatctttaatggttatttgacttgttggaaactatagtgtgtttttttttggacagactgaaagcgacttgatagttgatacctataaatatcgacttcatagttacatacaaatgcaattgttcgactaaggttaattaatgacttatttgtaagttataaacattttaattctttgacccaaaagaacatttttaagtatgtcaacaatttttcttgaaaattccactgcgattttatgcttccaatatataacaggactgcaaacttataaaattgatgaatataagaaaacattatatatataaaggaatgaagagaactgatgattatacacaaaaagaaaaaaaaacgttaatcgaattacaaaagagtattatgtgaaaatttatgttagtatttcattaaacctcactaaggacttcaatcataattttgtaaaagaaattgcagactggtgaaatagtccaatagcatataattgcatcaaaatctgagtgaacatggttttgatatactttattatgaagtcaactgaatgatagacttgtgatccaatcaaaaacacaccattgaataaatagcaaagagatggagaattgattgttttttttttttgaagtttgaatttttgaccaaggaaaatgagaatacatgtgttatcttttgagtttatttatccatttatgttgttttcttaatatttgtatacacatattcaactaaagttgctataaaaaacgaaatatacaggcttgcagatatttcaaaatctcatgccgaagaccttgactccacacctcaaagactcgtataataatattccaatcccacttgctgcaatagaggggaggttctgcctagtgaagtataatgagggtgtaaacgtagtttactatttttatacgccaaattggttagtagttactatttcccgcttgatctgcaaataaattaaaattgtagaggatgaaaaagaaaataacaataaatgaccgttttgtgttaagggccaataataattacaagaagacaaaatacatcaaaattggcagctaagaaaaaaaacaaaataccgaagtaataattaaagatgaaatgataattgacagaaaaaaaaaaaatctatagagaaaatttgcagaaacagtaaatgagaaaattatccatggaaaaaattgaggtaaaggtgatttctagaagaaattaaaacgtggggagagcttttgaaataagctaaaaataaaagcccctcaaaagaaacgtggaaagaactagccgttagaggttcgtcagattcaaaatctcactctgcacgggtttccgtaaagacaaaagaacccccaaaacccgttcttcttcttcatcatttctaccacaaagatacacgaaacccagaaaccgctctcactatcttctcctctcaatattcttttattcttttaatttatctctatcgtcgatctgagacgattctacattcttagctgcctgagatctctctctttgatctgagagtaaaactccgattcatttgttcgtttttttctctgtaagtgtttttgatctctcttaactattgtttttgttagaactatttagtgaaatgacgtttttaggaagttttgaatataacatttctggatttgatgaaattaatctgaagaagctaaattttccttttatgagcaaaaactaaagattacctttttatggattaagtctgcacaatgttgccttatatgaacttttttccatagatctgatagatttgggggagaatttaagcttagaattaagttgatctattagatctgatgaaaaaattgggaatattttgtagggaaatgactataaaaacaccgggaactccggtttcgaagatggacagaacaccagctgtaacaccaggtggaagctcaagatccagggaagagaagattgttgttactgtaaggttaaggccaatgaataagagagaactgttagctaaagaccaagttgcttgggaatgtgtaaatgaccacaccattgtgtctaaaccacaagttcaagaacgtttgcatcatcagtcctcatttacatttggtaattgaagttttatatctgatgtttccaactcttcaagtcctgcggtttttgatggctaataatgcactcttttgatttcagataaagtttttggaccagagagtttaacagagaatgtgtatgaagatggtgttaagaatgttgcattgtctgctttgatgggcataaatggtacttgtctttttaatgattcttctgtcttttactcggatttatcatagatgactaacttccctttttaatgattcagcaacaatatttgcatatggacaaacaagcagtggaaagacatataccatgagaggagtaacggagaaagctgtcaatgatatttacaatcacataattaaggtaagcactgctttggtcagagtcaatgttttagacgtcaaatgcagttcttctgaccaatacctttatttgtttcactgttgtttccagacccctgaaagagattttactatcaagatttctggtctggaaatatataatgaaaatgtcagagatctgctcaattcagattcgggacgtgcccttaaactccttgatgatccagaggtatcatactaattttatacattgattatgttcttgctgatgttatgtccttgattcagtctagactttcgttgatctaataacctatttatccacaattgcagaaaggtactgtggttgaaaaactggttgaagaaacagctaataacgataaccatttgcggcatctgattagcatttgtgaaggtaacttgaattacttggctttttgtaattctattctcctggttcattctggatagtaagactgactgttggtgtttattttctttgtgttagctcaaagacaagttggagaaactgctttgaatgatactagctcgcggtcacaccaaataatcagactggtaatgatcttaattcattgattctttaaaacacagatacatatactctgcaaatgctaataacatgttcttgatggcaaaacagacaatacaaagtactcaccgcgaaaattcagattgtgtgaggtcatatatggctagtctggtaaaaattgatccctctctgttcaatttctctgttttttcataatgattaactagaactttgtggacttagtgcgtgtgtgtgtgtgaatgtattgcagaactttgtggacttagcaggaagcgaaagagcatcacaatcgcaggcagatggaacgagactcagggaaggttgtcatatcaatctaagtctaatgacacttacaactgtcataaggaaattaaggtactgtacttacatattttctgagagattaaaatctcaatctcaaatactttttaagtaagaaacttatttaatctgaatctgtgaactcttcatagtgtggggaaaagaagcggccatataccttacagagactccaagcttactaggattttacagcattcactaggtgggaatgctcgaacagccattatatgtacattgagtccagctttggctcatgttgaacaatcaagaaatactctatacttcgccaaccgagccaaggaagttacaaacaatgcccacgtgaacatggtaatgatctttgttccatgcttttggttcatcttagtgcccttttggatgaaaacaaactaaaatatttacttcctgtctattatctacaggttgtctctgataagcaactagtgaaacatcttcagaaagaagtggctagattggaggccgagcgtcgcacccctggtccatcgacagaaaaggatttcaagatccagcaggtttctgtccatttcagatcaccaaaatatataattgaaccaaagctttggtacttagtttatggctattttgtgacattctcagatggaaatggaaatcggagagcttagaagacaaagagatgatgcacaaattcaacttgaggagttacgccaaaagcttcaaggggatcagcaacaaaataaggtctcttaatctacctctctgtctatctactgtactaaatatattcacaagcgttggctgaagtttaaactaaaccttttgttgaatctcagggcttaaatccttttgaatctccagacccaccggtcagaaaatgtctttcctattctgttgccgtaacgcctagctcggagaacaaaacgctaaaccggaatgagagagcaagaaagactacgatgcgccaatctatgatacggcaatcatcaactgctccatttacattgatgcatgaaatccgcaaactcgaacaccttcaagaacagttaggggaggaagcaacgaaagcccttgaagtgttacaaaaggaagtagcttgccatagactagggaatcaagatgcagctcagacgatagctaagcttcaagcagagataagggaaatgcgtactgttaaaccatctgcaatgcttaaagaggttggagatgtcatagctcctaacaagagcgtaagtgccaatctcaaggaagagataacaaggctccattcacaaggaagcaccattgcgaatctagaggagcaacttgagagcgttcagaagtcaatagataagttggtgatgtctcttccgagcaatatcagtgctggagatgagactccaaagacaaagaatcatcatcatcaatcaaagaagaagaagcttcttcctctgacaccaagcagcgcatccaaccgccagaacttcttgaaatctccatgctctccgctttcagcttctaggcaagtcttggattgtgatgctgagaacaaagctcctcaagaaaacaacagttctgcagctagaggggcgacgacaccacaggggtctgagaaagagactccacagaaaggagaagaaagcggagatgtctcgtcaagagaaggtactccaggctacagaagatcaagctcagtgaacatgaagaaaatgcagcaaatgtttcaaaacgcagcagaggagaatgtaagaagcataagagcatacgtaaccgaactcaaagaacgagtagctaaactacagtaccagaaacaacttctcgtttgtcaggttagataaagatcacaacccataaataaaccttttttcctccttttatattttctcatcagttttgaacttacgcaggtgcttgagttggaagcaaatgatggagctggatatagtgtagagaacgaggagaacacgataatggaagatgaagagcagaatcaagtggcgtggcatataactttcatagaggaaagacaacagatcatagagctgtggcatgtctgccatgtctccataatccacaggacacaattctacctactgttcaaaggtgaccaagccgatcaaatctacatggaagtcgagctaagacggttaacttggttagaacaacatctagcagaagtaggaaacgcaactccagctcgaaactgcgatgaatctgtggtttctctatcatcaaggtaatgaatgaatgaataactctcacttggaaaaatgttgttgtaaaagtttcttcaactaatatggtcttgtttcgttttcagtataaaagcattgagaagagagcgagagtttttggcgaaaagggttaactcgagattgacgcctgaggagagagaggagctgtatatgaaatgggatgtgccattggaagggaaacagaggaaacttcagttcgtgaacaagctatggactgatccttatgattcaaggcacgtgcaagagagtgcagagatagttgcgaagctagttggattctgtgaaagtggcaacatctctaaagagatgtttgagctcaatttcgcagtgccttcagataaaagacagtggaacattggttgggacaacatctctaatcttcttcacctatgaagacttattgtgtgtttatgatttgtaaaagtacacgacacttctttgtctcctctgaatttgattaaataagctttaccagactcgtctgattatgtttaatatagtggtctagatttcttaaaccttgtgaggacaagcttgctaaaccctcaagtccaactgctaaccaaaagttgtccaaaacactgcgttttattggaaacaacgatgtgccaacgtggcatatttggaagactctcctcgtctttttcgctggacaaccatataattatctcagctactaaccaacaaataaaaaatcaaaatattatttaaatgttaatgttgttctctcgaatcattccttaagaaagattttcactttccaatttgcttcactgtcttgtcgattctgcttctccaaaaaatttcttctttagttctgagtttttctctgttctgaaaaaccccaaattttgttttttttggccattcaaaatttcagaagaaggcgatacaaaatcgtctttgaattctctttgtttatgatctgttcaagtaaaggaacggtcgtaattgctactagaagctcatttcccagattactaaaccggattcaaaatcgaaatgatgttccgattagtgtcatagctactcgacgatcatcaatgtcggtggaggcgtttccgatgaggttaaaatcatcacagaagaagaggaagatgaacattggttgcggtgtttccccttcttcgccgacgacgacggtggtagatgaggaagtagccattaggcggaaattggcaatgagacgggttttggaggataacggtggcgatggaagctccgtcagagatttctcgctattcacgaccaagagaggtgacacgttgttcactcagtcatggactcctgttgactccgctaagaacaggtcaattcttgttttgtctgttattgatgagtgattggaattggattgtttctctggaaacttagtaaagaaagatcttttaggcttcggctatgttgagtaaatcctacaagaagaggtccctctctgttttgagacttgtggttcacgagaatttgagcttaattatgacaagacaatgtcgttttctttggtgtgttcttggattgctatatcgttttctcagctggtcctaactattattaccttggcatttaccttgttaccttggattcaattctgccctacttagatttcattagttcctcaatgttgttagcgttcatgtgaagaagatcaaacaaatatctgagataatctttaggagaggattctgctaactgggggagagattttgaagatcaatgtattatattatacagtagtcggtttgctcttgaccaagtcttcagtgtttatgtgatacattgacctccaagatctcttgactatatatagctttgtgtcacctattttccagttttgtatctttaatctcttgtttatagtcttcttctattatttcttctttggtttcttatgttctaaagctgacatctttctgtgagcttgtttgtaggggacttgttgttctgcttcatggtctgaacgaacacaggtttattttgtagcttttgagttgatcataaactctccttccatataagtagcctaacatgtccatattcaaacgctcaacagtggcaggtatagtgattttgcaaagcagctaaatgtaaatggattcaaggtctatggaatagattggatcggtaaaaccactttaccaattcaaagtgcttgtgtcaagcatttatcagtgtatagtttttctcttttgatactgaataaagttttatcttggttaaataggtcatggtggaagcgatggacttcatgcttacgttccttctcttgattatgctgtcgctgatttggtataatctttttttcagtttccaagagcttccatatacttaactcatattgctgtttaaacattacattgcctctgaaaaaaaaatgtctgtagaaatcgtttattgagaaggtaattgcggaaaacccgggattgccctgtttctgcattggccactcaacaggaggagccatcatcttaaaggttaaaagatttttaaacatgttcatatcattgctcttgaaacaatatgttgactatataaactatttttgcaggctatgctagatgcaaagattgaagctcgagtttcagggattgtgctaacttcacccgcagttggagtccaaccaacttatcctatcttcggcgtaagcaaacctgaaaaacctcaagaatctgaacaattttcacaaacattttgtggcttttgtcttgaaaattagagctttttcaacaggtaattgcaccattcctctcgttcctcataccgagatatcagttaagtgctgcgaaaaagaaaataatgccggtttctcgtgacccggaagctctattggctaaatactctgacccgctagtctacactggatttatccgagcaagaaccggtaacgagatccttagacttggtgctcatttactgcagaatctgaacagaatcaaggttccgtttcttgtgatgcacggcacagctgatacagttactgatcctaaaggtactcagaagctatacaatgaggcttcctcatccgataagtcgatcaagctgtacgacgggttgttacacgatctgctctttgaaccagaacgggaaactatagctggagtcatattggattggctaaaccggcgggtttaaattcctcaaaccaaatgtagcacagttccttactccttaggtaatatagagggatatgcgaaagacataatcaatagttcctctgtttctgtcgattgatctcgacactattttgacattacgcacacttttattgtaatgaatatacgatgttgtaactctgttagtggtcatcgtaaccatttcttgtataaacgatactagatttatattttgttgatagggagataatcataattatatatggggtttataagaatatgaatcgtcagatgaatttcaatagagcatatttctgatcatacaaaaattctacaaaaaaataataattgcgatttgggtcacccggaaaatatccagacccgtaatatcacaagcagtcggatctaaagactttcacggagaaaagggtgaccgagaagctgcgacgccgtccacctctcactcgattctttacggagacaacagtcaacaaaactcctaaactcgtcggaacatccttccggcgcacgcggtggttctccaaagcacacgacgcacattaacgtcgcccagtcaggtctctgtccctgaggaagcaacggaaaatgtccgacgaagagctcaagtatcatcactccgaaactccagatatcgcctgcgtaaacatcggagttttctccggcggcagagtcaaatctctccgggctcatgtaagcgcaagtgccgacgtaggaattgcagtaatctaacgatcgggtaatgattttgctcactccaaaatcagcgattttaacttcgtttctcgagtttaagagtagattcgcaggtttgatgtctctgtgaacgatcttgagtgagtggagataacttaaacctttcaaaatctggcgggaaaatcccgctagttgtttctccgtaacggcgccgcggagagattctaggtttccaccgtccatatactccatgaggatcgaaacctctccgacgattggtttctcgaagatcccttgacacctgacgacataaggagaatccgtgcgacggaggatctccatctcgcgcgctaattgtcttgtgaaagcaggactcatgtcgccgttgactgatttcagagcgtatatctcccccgtggttttgtggtggactttgtatacgatcccgctgcttcctcttccgagaacgtggagtttctcgacatcggaagctgagattccgttgttgatgacgggggcggtggatgaggcaaaggagaaccaggggaggtgaacagagagcggtgggacagggagacggaggttgatttgacggcgtttacgaacaagagccatggaaatagaagagagagagagagagtgatgatggtgatcgaagagtgatggaagttgcagtttttatatggagacttgagtgggatttaagtgaggagcctgggaagctaataaatctttccattaaatgttaatcactcttttttgttctttatcttaattattatttgttgagttgtatctaaaaatggcaactagtgtgtctaccgtttatgtttatcttgcacgaggttaaatgcatgggactgctatctgtcctacttacccggaacctggctatagtggcttgtgtatattgagataaatctacgcaataatgattagatttatatacatttaaagagtttgttttagtgattttgaatggtaactcaattatcaaagtttgttacagcctgtatcgtgataattacaaattacaaaggcgttataaaagcgttacttttaacgttttgcattaatgattagatttatatgcatttaaagagtttgttttagtgattttgaatggtaactcaattatcaaagtttggtacagcatgtaccgtgatattacaaattacaaaagcgttataaaaacgttatttttaactttttgtactacttatttatatagttttgcattctaatttacagctaaaacaactttaaagctttgtgttacctatcagaatcgttatcttcacattcaaacacataatccattgttgttgaaaaataataatactttcaaaacatttattttagtgatattaatttgacttgatagtaagattattatttactcataaagacattggtggaatttagttatataattttcatatactaaactataggagattttaaagtttaatgtgaatttgtgaggttcaatgtacctcggaggctaaggacttctaatgaaaatgaccaaacaataagttatatttaggccatcatgcaaaagctttccaatggccatcgccattaatattgccaagttaattattaatatgattttagtaaaaactatgattagatcttcagattcttagtggacagtcacacatgaccctacggattacaagtatttagcatgtcgattgtcatgcgcgtatatatccaaagaatactgaataaaaataatatgaagtcaatcaaatgaataacaatcaaattatatgaagtcaatcaaacctttatgaatgtgatttgcttctttttccaaccaaaaaacttgtttgtttatttgttagttgttactcccaaaaaaatgtagtaagctttttatgccccatgtattatatatcaagacgatctccaaacatgactatagtttcataggatggattggatatcaggacatgtgtgaatttactaatttttagtattgaaacaaacaacatttcaaccaaaattttttaccattaaaattaatatatcgacgtccgatagtataaagcttgaataaactgaatttcgtatcagtagccagtttgaaaaataaatttgttccttgagattttggtgttcttttccaaaagaaagaacaaagaaaacaaaaggcccttgtaaaaggcggtttagttcataaagaaaactgggcctatctaaaaatttgaactaatgccatatttgggcttagtaagcccggcttacgatacgacgtttatagtcggatctgattcggatccaaacccgtttgatggatccggctcctaccaaatcacttcagatttctgtataagctaaaaatccttgaatttttcagtaagttactatagcatccgagaatttcattctttaactctggttcgtaatcggaaaactcaaagacctgttgtgaagatatattggagaagaaaaaaaaaacgatttcccggcactgaaatagcattatcagatctcgttcccaccgggaagatttcccggcacactgaaattctgacttggaatcgtctgtgaaactatgcctgccattgcttctaagcagtattcaggttattattaaattcctcttacttcgaaaccctcacattcctcaatcgtataagtatgtagattagatatcccaaaaactggaaacaagtctgattggctcgtgattgtttttttggtcgcagacgatgttagtcttctagttttgttgcttgatacgaatcctcttttctggagcactacatcgattaccttctctcagttcctttctcatgtaagtgtctctaacgaatctattgtttgtttgttcaatgcttcgatttttatgcagaaagcttgctgctgttatgtgtaggtgcttgcgtttcttaatgcggttttggggttaaatcagttgaaccaagttgtagttatagctactggatacagttcttgtgattacatttatgattcgtctttgacatcaaatcatggaaatttcgagagcaatggaactggaatgcctgcaatttttggttctttgcttaagaaattggaagagtttgttaccaaagatgaggagctcagcaaggaggaagtgtctgaggatagaataccttcttgtctcttgtcaggatcactctccatggctctttgctgtatcctcttggaaaagcatatagcatcatgataggtttcttgaagctatatatagtacaaactattaggatttgtttgcataagttctggcagtgatcttgaagcttagctttctctctagactgggttaagtaaggaacattttaggttgacatgtttgttctcagctaaacctatagcatgtctaaggccatcaatgttatctggtaatatatgtatttgattttcagtcttcacattttgttgttgacttaatttatggctctagatatacagagggttttccgttctggacatcttcatccccagcctcgggtgagtgttcagtaggatatatgtatcaatcagttgtcttggataaaacttttcatgttgattgctttgtatgaatcttcagcttaaagtattaatgagaatatagactcctttttcttatgtgttatctgttctatcgtatacccccaaaatacagaactgattgtgctattgacgtttatatgaaatacagattttatgcttgcaaggttccccagatggcccggaacagtatgtttcttccttcattttttttctacttgcaagattttgtcttgtttgtctggtctcattaaaaggttttgtcattctttcaggtatgttgctgttatgaactctatcttctctgcccaacgcttgatggtaatcttcattttgattggttctttgggatttccggttcttgatgttctctaaatccagtatcatgtacccaaatcacttcatcaattggttctttaggttcccattgattcgtgttacataggtgtacagaactcagcatttttgcagcaggtaatatcatttctcctttatacatgattctaactcgtcaaactggacctatgcgtcagctgttatctcctggcttatttgtaggcatcttatataactggtggtgtacatcatacacctaaacagttggatgggctatttcaatatctaacggtacgcaactcaagtccaaacgcaaaccattatgtgactcgtctctcatttagcgaactcaatactcaatggctgctaactctggattgttttgttttgcacaaaagacaatctttgcaaccgatttgcactcccgcggttttgtacaacttcctaaacccataggtgtagattttcgcgcatcgtaagtgatcaagtcattaactcttcaattaatcgggtcttcctctgcatatataacagatggttttaagtacaaaatttgcaggtgcttttgccacaagaagacaatagatatgggctacatatgctcagtgtgtctgtccattttctgtgagcatcacaagaaatgttcaacctgcgggtaagagatttgacccgtcatgttctttctcaagataacaatctatcatgttgtttgatactaatatcgaaaagcttttggaaatttgcaggtctgtatttggtcagtctaaacttgatgatgcttcatctgcctctgataagaagagaaaagctcctagtacctaaaatcatcttttgtgccagagagaaactgcaaactttgtttaattgtgtctttgcgttcattttcgataatttttataccatatatcaaagtgaaatcaattttgcaaagtttttgactctttttttttccttgagatagtacccgttgacttgagcaaacaaaacaaaaaggcctctaatagtccatatagaaagttgggcttctctatcgaatttgaacgaatacgacatttgggctgacgtcatttattattgtcggatctatttcgggtccaaacccgtttgatggatccgtctcctaccgaatcacttcagacgtggagaacgaacgagacagagggaagagaatcatcggtgtggcgagcaatggatttgaagaaacggcgaaaggtaaaaaaaatctcggaagtaatgtgtatgtttcatagcactcgaaatttcgatctttgattttgttcgaaatcgataattgagaattgtcgtgcagattttggagaagaaaaagacgattcatgaccttataaaaagagcttcttccattgacgatcctctttctccgtttgattctttccgccgttaccgaagaaacggtaaatttgttcttctgctcaattttattttcgccagtttctcaaaaatatgggattttgtttatgcgaactgattatcattgacaatgatttgatgcatataaacttacttttacaattcctaatgttactacattatgaagtagatgtagtgttagttggaattcgtgctttttaacatggatttaattatctgtgaatcccttactcatgcagactttggtaacctatgatctagtgtgctctgattagttgttagttagttatgataatgtttgtgtgaattttgttttcagtgcttacttgtttcgttttaagttcacagaagagtcttgatggttagctaattctgtgtatgtgttgttcttacgtcttgtagacttatctttgtacctggaatctggccgtggagatagactttcctcgtctgtgaaacatcacattcaaaaactcttgaaggtattaaagagaatgaagtatcattaaattttctgaacatactttcttagaaatttattctagatttattgttgtactcaaatttttttaccattcacagacgaacatggaagggttctatgggtctgattggcctatacaagcaaaggtgaagcgtaaggagatgtcttccgctgatgcacattatatctttgtgcgtgagctgcgttttggtaaagcctatgagacatctactcaaagaacttgcatggaagggtgtaatcagatagctggatttgtgcattaccggtttattttagaggaagagatacctgtcctttatgtgtatgaaatacagctggaatcccgggttcaaggaaagggactaggagaatttttaatgcagttgattgagctcattgcttctaaggttgattccaaaattagtctcttatattcctatttttcgatattgatggcattagcttctgttttcagattcatagcctgatgataatattgttatgttcgttttcatcttctcagaatcggatgagtgcgatcgtgctaactgttctaacatctaatgcattggcaatgactttctacatgagcaagttagggtaagaggtacaccttttggaagatgatcttatttcatgtaacaactcagatgatattttttgcaagtgttcatgggttcctaatatttctgtttcttgctgtagtcagtcatttctatttctcgactctttactgatattggctcgtccaaacatctgaattcccattcgtttttatacagatacagaatatcaagcatttctccctcaaaagctaatcttccggtacagaatcagtagtcttatttttcattattttgtataaggcattcactaaaagaacttctacaattttttgtgtttgcagactctctcggtgaagtatgagatactttgcaaaacttttgattccgaagctaaatctgtgttggaggtttgccctttcgctgcaccactcacatttatgacaaaactgctgatctaatataatatgtgagtgcttcttttgctttttatcttggtattgtattattaagactgctatgattgctttattttgcaagaagaatgatgaagaacctaccaaagattgagtatcaagcatggaatagcacatatagattcactgtaagtttccactttggtctactggagatatcagcaatcgtttattgtttagttttctgaaaaatctgttgcttgaatctgacagaccacagaggggtgtgataagatgcatttagaaaacagacgaatccgatgaagacttggttcctccaatgacttggttcacaccagaggcagatacagaactccaacaatgcctagcaactgccaaattgaccattttgaaacctgagtcctcgcaacaaaccagtcgtttgcaaccagcggagactaaatttggtaagctgtgagtacttctaggctttcttaaccttacggggagattgtgcagttatatactaggactaggacttagtagagtgagaacaattgttgaatttggttttgatataatgaatcagagagatatcttttcttttacaaaattgccaaaagtattgaatcatgagtgcttgaaccttaatttattgtagatagacaaatgtgagatagaatatgaattgcgtaacatagaaggacttaaggacctcattatcatataattaaattgaggaaaagatcttgttcttttttcatagtttggggtcagaaagcgatcattttaatttaaaacatataatgtatatatcaaaaatgaaacaaaaagataataataaagagaggaatggggtgatctgtccgtatcaaaattgtggctctaatagtttgtgtgattaagaaatatagttgtcacatccgacaccatgtgatgcgacttgatttgcccattatcccaaccattttataatcttttgtcatgaacttttctttcatacagttttataagactaaagagatattttgaaatcgaattactacataatacatatcaattactcaagtatcaaatcatctaattaatcaagtgatttttttaactcaagaataatgtatttttccctttacaaaaatcgaaggttacaacttacaaaactgaacaatgagactagttttggcctttttgggggcaaaccggcaaagagtaatatcacgaaagcaagtggaagtcagagacggatcggaaacacacaaaaaaaggatatcttccaaataatcacaaaaaaatatcttcttcataatttgctaacgtttcacattttttatccacagaatctttttctgtacggattagagaaacagatcagattctttgaagaagacacagcgcgtggtgtacactagcgagagtgagtgttagctttgttctgagccacaagatatctctctctcagtgtcaaccttctcgaaatttccatgaacattaaataatgataaaaatctgaatctgacgtggcacatctctgctatttaatataaaaaattggtcacttgctatttctagtaccttctttctttcttcactctctcctgtctcctcttctcactgtttcctatttcgtaattttctcgagaaatcgtcttttcttgtttacgctaatttgatttctcgagaaaaaaaaaaggaagcagaagaagattcttattttatctttacactgttcagaaatcttcggtggacggataacttgcagagttctgattgaggtttctttttcttttccctgttttctcttggatcttgtttcttcatgtgcggactatacaaaaaactgattcggtgaaattaatcagctttatgctctgttttgttcgctttcaggctggttttgtgagaattatagttgcagcaagaaagcgtttcagatattttttaatggccgctgaggtaataattgactagagattgatgaattaagagtagttattgacgcttatagaagaagtagattctatatgaagaaagtttctttttttggaagaacttgaagtaaaagccatttaatttcatttcttgtttccacttcaggatcgaagtgaggaactaagcagcaatgtagaaaatggaagttgcaattccaatgaaggaattaatcctgaaaccagcagtcattggattgaaaacgttgtcaaggtactatatgttttgtcacaactttggagaagagacaaatttcagattttgccagtggatcttacctctcctctgtgtattgttcttcaaggttaggaaaccgtacacagtaactaagcagagagagaagtggagtgaggaagagcatgataggtttcttgaagctatcaagctttatggtcgtggttggcgtcaaatccaaggtattatttgacttggagcttaaattgagcttagaatctagctgctattagatgtagttctgaagaacctaagtcttgactttgctgcagaacacataggtacaaaaaccgctgtacagatacgaagccatgctcaaaagttcttctccaaggtcttgtttgttcatatgttccataacatcagtagtactgatttggttagtttgtaacctgacagttttttatccattgcagatggctcaggaagctgacagtagaagtgaaggatcggttaaagcgattgtgatcccgcctcctcgtccaaagagaaaaccggcacatccttatcctcggaaatcgcctgttccatatactcagtctcctccaccaaatttgtcagctatggagaaaggaaccaagtctccaacctcagtgttatcatcgtttggttcagaggatcaagtcaatagatgctcttcgcctaattcgtgtaccagtgacatccaatccattggtgcaacttccattgataaaaagaataactacacaacatccaagcaacctttcaaagatgattctgacattggttcaacacccatttcaagcattactcttttcgggaagattgtccttgtcgcggaagaatctcacaaaccatcctcttacaatgatgatgatcttaaacaaatgacgtgtcaggagaatcactactcagggatgctagttgacactaatttatctcttggtgtatgggaaacgttttgtactggttctaatgcatttggctcggttacagaagcatctgagaacttggagaaaagtgcagagccgataagttcttcatggaaacggttaagctccttagaaaaacaaggatcttgtaatcctgtaaatgcaagtgggttcaggccatacaagagatgcctatcagaaagagaagtaacatcatcattgacgctggtagcttcagatgaaaagaaaagccaaagagcacgtatatgctagttttagccattgtacagtttggagtcaattttgatgatccgtgaacattgttttagccatttgctgggtgacttggatcatagcattccacgaaccaaatcctaaatccgagttggtaagtggttttacttgtccgccacatgtaattcttgtaatgaagtttctcctgctgtctcacgttaagaagacacttctttttttcttcatatacaaatcagttttaacagtgtatttgtttggccaactattcctagctctgtttcaatcttaggtctggtttatgattattagccttaagaccagtcttaatgttaaaaggtttttacattaagcagattaatatacgagtgaaacttcaaactctgagaattgaaacattgtgcaaagggaaccccctaaatttctgtggacacttgcttaaaaattggagccctcaagtctaattcacttacttaaatattggagccctcaaagtctaatgaaatctatgataaataacaacaattgaagtatatgcaatcaacacaagccttgcttattctatattgaaaagtgtaattctagcttctatctccctgggttcaggtgatgaactgtatcactatcacagaaaagaagcagcaaaaaaatctcagcaatggcgtctgttagatatctcactggtttatgtatgcctatcaaagaacttctctatgagtacagagaaaattgcaaatccagcgcaacctatacacgcagcttttggcccacctgaaacaagaccaatccattaagtcctcaagaacacatgtatcatgtaagagaaatcaaacctctacgagattacagtttgggaactaggccgttgcatattgataatgaatctctaagatttaaattccatgcacagaagataataggtcttacctcgggcggacattgaaccaccggtaacacatccagctatagcggtgtttacagtgtcatgcttagctcttgcctttttcagagaggtaaaccaaaaaagtcgataataaggttttgaagttacgatacatgagttagtagtggaatttccttgtttttcttggtcaataaacaaggtattaccttttcgacaatgcattctgcagcagagaaaaccaaacccataactgcaaatgtcttacaggaattccaactcctttgccccatttgttttgccgtgaacacaaactgctacctagccgtcatagtatcatgcgtaataggattatctaatgcccccaggaacaaacccatcatcaacccgagtcctcctcctacaccacaattcacacagaatgtgaacaaatcaattgaatatccttcacatgtctaactgtcatatcaactctacaaccggcgagcatttatattagtagctttataccttttagagtatttataataatagattcgatttgagatttcacatcatcaattcacctaaccaaatccgattattaagtgcaatctgaaagtgactcaataaccagctcagaagcatatcaccattagaaagctaatcactttaccaatttcactattctcaaaccaatcaaagtacctagagcttttagcatttttggaaaagcaagagcaatggagcaatatagatcgagaaagagaggatatttgaactgacccatgactccactagttacagcacgaacggcgcagttgttccaaacctcttgagctcggatctcctcgatggttggcatccggatcggttgaatctggtagagttctcatcagaagccgcggggggagaagaagcaccggttgttgtttcagcagcactcgaatcagccatttcaaaggttaagagagtaggatccgacaagggacaatgtcatcaaaagcttaaaagaaggggattgtacgaatcagatcaagcgtgttcgttcgcgtgcctgtgagataaaattaatcagggtttatcccgaggttctagggtttaagctacagctagctaccactttaggcccattagtctacattttgggcctgtacactcgagccttactaaggtccaatatatgtatccaattaggttttgaggatatcaagatgtgccacgtggcatattgcttttcgaaagaaaaaacgtctacctagttcctacatatgcatgccgcttcaaattccccctccatatatgctgctctaatctcttttcaaaacaaccaaagacagagatcagaaacatcaaaaatcaaagagcgaaaccagagccatggcttcatcgaacgctctttttcttttcccggaaactaaatcctctgttttaccagatccttctcgtttctttagcccagacctcctctcaaaccctctccctacaaattctttcttccaaaacttcactcttaaaaacggtgaccaagctgaatattttcatccttacctcatcaaatctgtggactcctctctctgtatctcatacccatctctgtttcacaactctgatttcttctacgaggtgtttaccgcagacatcatcatttccgggtcaaacggacccggaccgcgttcccggaaaactcatattatctcttcgttcagtgatcttgtcgttactcttgatttcccttcctctaatctcagatttttcctcgttagaggaagcccgtttataacttctctgtctccggtaactccatcactatctcaacgagccatggggtcagatctttgtccagtagctcatctactaagtggtcagacaagctcaccaacaaccagagatggctgatttacgcctcctcgcctattgatctgactaaacacggcgattcctcgattcattgccgtggtgggtttacgggtatagtacgaatcaccgtgttaccgggttcgaatccaggttacgaatctacactcgaccgattcagttcttgttacccagtttccggtgacgctgactttacaaagccctttactttaaagtatatgtgggagaagagaggttctggagatctgctgatgctcgctcatcctcttcatctgaaacttttagcaaaagacggtcgttcatgaaattccggatgaaccaagaatcgtattccccaaactcagaaccactgagtatcactttattagaaatctgattaagaaatttacaactcctttaattggatttacacaagatctaaactactttagcttgtcacctgagatttccctaaacacacaagagcagatcacaagaacacactctttgatctctctagaattccaatcagactaaaccttagtctctaataatgaaaagcgttgcactagcttttcactcacaatcacggccaagtctaacaagaaccttagcacctctatttatactatcgaggtctttggtcttctaggttagccttcgagatcttggatcactacaaatcttcgcgtgaatatttcctctccaaactgaactcatcctgttgtgatctccacgtcattcgttcatttggcggcatatccacgtcagcatcaattacttgatcttcactttagtcttctaaaacagcttccagcttgttccagcaatcaacactccttctagtttgtcctgacagagggtgcactaacagttcagtcaccgttttagatcatttccggtacaaaagtatcgacggagatttagtaggggtcgtcggagactcatgggttcttaaacctgactctgtttcggtgacgtggcactcaatgaaaggagtcaaaaaagattcgtacaaggagatcatctcggctcttggcaaagacgttaacggtttgaattcctcagctgaggtcacgagttcgtcgtatttctacgggaaattaatagccagagcagctaggtttgccttaatcgccgaggaagtttgctatctcgatgtgattccgaagattgtaacttacctgaagaacatgattgagccgtggttagatggtagcttcaaacctaacggctttctgtatgatcctaaatggggaggtttgatcacgaagcaaggatcaaaagattcacaagctgatttcgggttcggtatatataatgatcatcattaccatattggttactttctctacgctattgccgtgctcgctaagtttgatcctttgtggggagagagatacagagctcaagcgtacagtctattggcggatttcatgacgtttgggagaaaagatgataataattcaaattctagttatccgcgtttgagaaattttgatcttttcaagctacactcatgggctggagggttaacagagttttgggacggccggaatcaagagagcacaagcgaggccgtaaacgcttattactccgccgctttattagggttagcttacggcgacaaacatctggtggagacggcgtcaacgatcatgacgcttgagatacacgccgcgaagatgtggtggcaggtaactattcttgaatcttggttacggctatcaacaagttagaattggtagatatgtccctctctatatgaaaaaccaaactaaaaattaagacaccaaaaccaaaacataattttcgtaatgaagatatactttttaaaacaatatttaaatcaaaagaaaatcatattgagccagttactgttattctttcttggtggacaggtgaagaaaggtgaagctttgtatcctaaagatttcacggcagagaatcgtgtggttggggttttatggtctaccaagagagacagtagcttatggttcgggcctaaggagtggaaagaatgtaggcttgggatacaattattaccgatacttccggtgtcggaaatcctctgatgtagtattcgtgaagcagctggtgaactggactttgccggcgttgcagagaaatggcgttggagaaggctggaaaggattcctctatgctctggaaagtctttacgacaaagatggtgcaattaagaagataaagagattaaatatgtatgatgatggaaactctctcagtaatctattgtggtgggttcacagtagagactgatgtcatggcggtaggctggaaaatgttgcttgtttgttcattattgtaaaaactatgatactgcagtaaaatcctttggaatgattagacatatgatcatgaaagcgacatgtgtgattaagttagtaaacgtttttataaaggaacctgtctagcattttattcacaataaaagaatgaatgaatcatcaaaatacaaaagaatgaataaaattagaagacaaaagttgactttcatcgaacaatcaaaacttttccacacctctcaatagacagagagaagctatgaccaactgtatcccttaggaagcttcagctccatgtagaggttatctaagtcaaaagctctgtttcaccaactctaaataaacatcgtatttttcttctgagtgctactaattcagttcccactttcatcatcgtcagctagacatttcaggttaatgaatgcttcaagagcttctctcatccaccaattctgacatacttctcttgcttcatccaaacttacccatctgcgttgtctcatttccgcctcaggccatcgctcgaactcttgactgacaagcaaagcaaacatatacccatcgtgaattatgctatgtcttttgcttttgtattgccatttcccaagcttttcttcgagctctcctgttacacccgcttcttcgatcgtctctctcaaagcagcttcctccattgattcatccgtctcccaacctccttttggaaataacattcctttgcccttttgagcactgacaagaagaacttggattacttgggtttcaactccattgacttcttgtttcttgtatctatacggtacacatctgcagaaaaagttgatattagattccagaaaaaatgaatagagatagtcctcaaattttgaaaacttcaacacgttattccaaattgccgcgggaataattaaccgtttaacgatctttctattgaacacgaattttttaaaattggtaactttaattattctaacgttcgttgtaaaactatatcaaattacacctaaatatttaccaaactaatcattattgtgaatttgaacaacggccaaagctaatttctaattaggggtaaaattaatttgataagaacaaaaattagggttttggaaaaaaatgaacgaagaggcgttaagacgtacccgacgacttgacgatagccagcgtgatcgtaacgctgcaaatcgcgaccggtacgagagaccaaagagacaactttctcgatctgtgcgggaacaaccttggtggaggggatgttctcgaagatgggcgacaaatacgaggccacatttgacaagtttgacacaaaaagagacacagagaaccctgtcatgtttttttttataataccgacgaaccacgaattcagaacaagagagaaagagttggaattaaagaaaaaaaggctctgttctcgaattcgggagaatcgatttaaggaagtctagagaggaaatggataagagagagggagatgtgaatttgttaagagcgttattggttttaggactatttttatatggaacttcccacgcgcttcaactattttttttttttttttatctaatcaacttgctaaatcgaaagtatacatatttattgactcaactttcccggttattgtaattgagttctcggttttgttcggtttggaatctgaaatgtaactcctttctctgtattttgagattcgttaatgagacaactcttcctaatggattccaaattttggtttcactaatggtaataaccaaataaacaatcaaaatcgacacaaaagcctttaatatgttacactattaaatgagcagtttacgtattcccacttatcaaaataaacacgagtattttgtttatcttctagaattttaatgttttttcgtcaaagaaaaatcaaacttagatatcctacaaaaagacaacaaaataaggtcaactcgtaaaccaccaaaaaaacatcggcacagacacggagaagaaaatgcaggaatggtgtgagatacgcgcatcaacggtgcgtgaagaagctgagcaagtgtttttgttagtttagtagtaagagagtgtggtcatccacaaactcgtccctgacgcaaacacggtattaggcgatgcctttttatttcttttctttttttatcaacatttatctcaactaatataaaacgactcacatagtcacattttgttgctttcttctagaagcccaaacgttgttgttactgctgaaaaaacttataaatgggccatgggccattacactacaagttttctatcttattcattgttttttcttttctttgataattgaaactcaaactactatcaatgatgttgaatggtaggttactaagagtaataatacgaccccaaaaaatggctaaaagtttacttcttattctcataaagatggttataatcaggattaatagaacatttattatcaattttttttatgtctatgtttataaagtattttctaaagttttaatgtttaaaaattttaaatggtaaaagcttaccttttatatccttttttgataaatggtaaaagcttgcttggatatgaaaattttatgatggatgagaatgaaataatcaatctaggttattctcgtataggtttagtttaggtagacttttggcctactaccaaaaaactgcgcaggtcctttttattatcctcttttaattattgaattggctgccgatatcttttatattcagagtatctgcgaatagttccaataaaattctaaaggttatttaattaaaatttggatatatacatatatacgtaccatagtgttttttttttggtcattaagtgttttttatttattttgacaaagtatacataccaaagttgaaaatatatgtatactatatataaatacgtaccaaataccaaaatagctgtacctaaaatctggattaccaaaaaacccaattctttgattcgttgaccaatatcctttttatccaattcttgtccagtataaattaaataaacctataattacacaattgaatcactaaattatctacacgaatattcaaatcatgaacaaaaccatataagcctcaatttctctttaaagtcggacaaaaaatcaggaaaaataaaagaacaaaatactcgtctacgtttgaaaattgatttgtttatatatatagtattttaatgatcctcgagattttaggcatttagctctccacgatcgtctccaatttaggcctccaagatccatgttttgattcgtatagtaccttctcatctagggtttctcttatttccacaccatcatgagctcgatcttcattaactgatgatgggtttcttcttctgtctccggtcatcggaaatatgcagaccgggaatattctcttcaaatggttataccggcttttgttgagtgtctccgcggctttgttggagatgagagaaagttcttcttgtgttaagacagagaagagcatgtcggtcgggaggaggaggtagagatgtcgtctcggccgtaaatattcgtcgggagacacggcggtgactcggtggctgatttggagtaaagttgagtcggtaataaagtggccggagtgtctagagacgatgtcggaggttttgatgggttttgagaaaacttcaagagttccggtgaatggagccaagattttaaccactcctgaggatgagtttgttgatatgatcaatggtgcgcatgaagatgtgtttcccattattgtgatcagagtagacgaacaagagaaagagaaagagaaatagaaagagagaaagacgtttagaagaatgggctggctttataattatgcttatatatatagttgtattagtttagggattaagtgatgattaagtattaattaattttgttagctggttgtgtacaactgtgtgtatcttctttctcttcgtaatatagttgtcgtttcttaactttattgggactttatctgatagatataatttaacttattaaactacaaaaagtaaggttttcgtttcaacaacactaattcattaatgcacatatatatggccgctacataattaattttcatataatcaagtcaaactcgataattaatcagattcatcccttatgagaacagcttatttagtttgttttatgtttcgctctaccaaacaaagaaaattacaaatagaaaatgcgtgtatctaagtgtgactttttgttgtgacaaaggtcatttagaaactaaatattcttaattcagtgaaaaagcatgaatcaaggcggtaagattataagcagaaaaatatatttgactttcttacagtttttggccgtcccataaataaactttatacaaaactatgacttaactattgtcataacacataagtgaaaattgtgttttttttcttttctaaacttgattgagacatagtgcgattaaagtgtagaatgtgattaatacgatagagtagagtagagtagagagaagaaaacgcacatggacgaaggatgggtctgattgtgaagagctgggcgatagggcagagctcgagtcacgacgctacctaactcatcattagacatggcttctccctccgttttgtttttgtttttcatttttatactttgacatcataataataaatttatagttcatctgtttttagaaattccaaaagccaaaaacaaagattacataacataagtcggtaccatgaaacaaacaatatatcatatcaatatatatacagctcaatagttgtctggaactctggatacatttattcatttaattaaaggaaaatttgttagttgccacttttttatacagtatgttttttaatcaaggttttctattgttaaaacaaaagcattataaaaaaacatgccatgtataatcattactgtagatttggtattcagatgtagacagataaattcatgttactcaatagattaacgttataaatttaattaataatttgtagtcgattaagaaaattatatagacttcatatgtgtacattatacgtatacagtaacacacagattagtatcaatttttaggctttatagatgtaagaataactatatcaaattttgttgaacattattagtttttatgtctggtgtatatgtctatatatgtggctgtatgtttacttgcgtatatgtatttgtcgctgtcagattttaaaacagttcaaattatgtgatttgatttgtcaagtgccctggactttggactctacttgttttgttgtttatcgctcgttttgttggattaaaataaattaaatcgaatccatttgatgaactgtcatatggtttagtatatcaataattttacaacacaaagtcactaacactcggataacattattattatactaacacatccattagctagaagcctagaactaaagtgaaaaggggatcttaattagctatcgtcaacatatttaaatcagggaattattattaattacattatctgggagttggaatgtcaaaatcttgacaggaactaaaaagctagcttccaaaaacgttagctattaaattctagctaaggagtaacatatacattttaacagtctttttaaaaatatataactgagatatgtgtatcataaactggagtttgcaaactagttgttcgtattgtaacgttatagttaaaatcttccatattcaggtgcactaatttacatgtttatgactaagtagaagataaaaatgaaaattaagaaccataatacgaccatttataaatctggagattagacaatatgttggtaattaaagagttgttggaagttattagtactattatttggatttcatagtacatatagatcagttataacctttagttgaaataaaaacgttaccgaacatggtctgattaatttccaacaaatgaaaacctagctgataaagacgtgaaataaatatagtagatcatcagaagaagagtgttgccacgacagccgatgcaaagctaagtccaccgaagttgatggccggggctgagcttgttggcttggccgtcgaaggagctgcatttccggttgatccgcttcctgttcctgcgttttaataagaataaaattacattaataatccaaaattttaaaaacttagttttataccacgaaaaatataattctcgtataaaaccctcgcaattcgatttaaatttcaaatatttaaacttctatgtattcataccggtactggtggaagatgccggaggagttttcggggttgccggcggtgttgaagacgaattagtaccttcgttaacacaaaatattgtcgcattaattaggctagatatataagaaataaaaacggcgtgacattaggctaaattaagaaactaattaaaacgacgtcgtagtatggtttattcaccggcgctggttttgcatagtgacacgtcagctttggcgccacaagccttggggagatcgagagcgttttctttagtgaggttaagcgatttgagcatatcaacgttgttaaagacagcgcagagacacgtggcgtctttggctacgatctcattcaacggcatgcaacacgtcgccggcggcggagtcgccaagtgaagatacggctgacacggcatcagtttctgaatacacggcagtgagtgtgcgtctcctcctgcaccgccgctcggtggtgaagtcatctgagcattagacgacgtaacgtagcaaaatacaagaacgacggcgacggcgaatctaacagcctccatttcaaaacgttaaatatctctttgtattatgttctttctatctttagttggttgtgaagatgtgaaagttgtaaaacatgcgtgtggtttatatatgtacacaaggtggttataatttttggtttttgaatttaatccagctcaccagcctgatttttcgagataatcagtttctgatcctatcattatgcattggaaacgaagactaagctctggattaattagaaaatcgttacatttattattacaggagttgccaattttaagagtttagatgtttgttcatatagaaagtgtaatgatatggtaccttaaatggaatgatatcatatatgttttctcacctaacacaatacaacttcttatcatttttttttaataaatatgtataatgtacgattactatttctttttgatcaaaaaagttttgcttttggcagataagttaaaggctaaaaggctgttggatatggacttccacgtaagagcctacacgatgtaacgttacattaatctcaatttgttaaattatagtatcatatatatatatatagagagagacagagagatgcatatgaaattggtttgttgactgtaaattacatcggagaattgtagtgatcggagaaaatgagtggcgtggttgggtttgttggtcttgattctttcagcttcgaattagcttcttcgcttcttcgttctgggtttaaggttcaagcattcgaggtctgttgcttcttcttcttttttttttttcttttttttctggggatcggcatgttctggaaatatcatattgatcggggttcaattattcggaattaaacatgtgaaatttgtgggttctgtagtaatttcgaaatactcggtctatctctcgggaattcagctgttttactggtttatttcaatcattcactacacacgtgaaattgatttgattagtagtgtggaatttttgttgattttttttgctttgtctattggaaaaaataaggagggaagctaaattgttgtatctaattcgacagataagtacagaattagtggagaagttcattgaattgggaggacacaaatgtgacagccctgcagatgttgggaaaggtatagcagcatctgagtgtgttgttagttataaggcatttgaaacactaagatacatggaaatgagttcagagcatttgatttgatatccagcattagactctgtacatgcaaaccgtcttgttgtgtttgtattgctacttcgtttcatgactctgtttacttctgatactgtcttgtgtcatgttatttactttgcttcctctctcctctgtctttgtttttaattaagcagctgcagcagccgttgtggttgtactatcccaccctgaccaaattcaagatgtcatttttggtgatgagggtgttatgaaaggtaatcctgaagattctttagctcatattttatgaactttatctcagaattattgtgtaggagactgtatgcgtcatttcttcgcaggtctacagaaggacgctgtattgcttttgtcttcgacaatatcgactttgcaactccagaaactagagaaacaacttacaggtttcaatttgatactctgagtttgaggcatggtttgcctttcaacaccgtattttgaagtttgtgcttttcagtcgtgacaattgggatttgtttccaatgcagagaaaagagagcagatttttgtagttgatgcctatgttttaaaagggatgtctgagcttcttgatggaaaactaatggtatatactctcttgtctagcaaagtttgttatgctggtggagtactattgctagctgatctccattcattgttaaaagttgcatgtcaccgtacttatagtaacccttttcttttcaacttttaagataatagcatctggaaggtcagattcgatcacaagagcacaaccctatcttactggtaaaacttaactctagtgtatagaccctctccagatgtagacgttatgaattttcattttgttttctgagaaaatctctttgtttcattcagcaatgtgtcaaaatctgtacacctttgagggagaaattggtgctggaaggtatgcaactttccagaataaccttctcgtgatcactacaacttctaagtgtttgactgcctatttcctcgtcacgagtcatattgggatcataatgctcaacttgtttactgagtttaatgtcatgaaatctatgagaaacctttggtcataatatgtgtaaaaacacctttgactattctaactgttccccggcattacagaaaaccaattgatgtcattgtttttttctttctgaaccagtaaagttaaaatggtgaatgagttgcttgagggcatacatcttgttgctgctgtggaggctatatctttaggttctcaggcgggtgtgcatccatggatactttatgacataatttccaatgctgctggaaattcatggtatgctttatgctacatggactttccttttgttatgagtaataaaaaggtcttttgatagtaggactgttattaatcacaggtttgagaacatttcttgtagtagtagatctttaagatacacacatttagagaacggaaaaaaataagctgaatagtctaattctggaagttttgagaatagactattgcaagtaagttgtaactacaccagggtttcctgtttaccaaatctatctggaagaaaaatagtttttgtttttagctcctcatttaggcccattgaatatatcactgaaggtttatgccaaattgacatgcccatattttgaccatggctgtcacagaattaaattgtcttgtgtatattttgttttcaggatttacaagaatcatattccgttgttgctaaaagatgacatagagggtcgcttcctcgatgttctctctcagaatctggtatgatacatcaacttgaaagtgttattttatcgatgtcgttctttctgttcaaaggaaaataggaaagaaagtactgcataatttagctccaatttatattatttcttcactgtgattaagtcttgatgtttagcatatgtaactaatgagacgctaactgactttctgatgggaaggccattgttgaagataaagccaaatcgctcccatttcctgtcccacttttggcagttgcacgccaacaactaatctctggtataaatcaatatgatcgcttgtccgggacaatgatttcgacctctttccacttatttatttctattcataactttcccttctccaggaatatcacagatgcagggagatgatacagctacttcattggctaaggtcctgataaagttttctccattcctagttctttggaaacttgtggaaatcgtaactgaatggaaaactactgtcatagaccatttacatgatacatgattctctaacgaaaggttcacctaatgattgagcagatctcggaaaaagtacttggtgttggcatattagaagcagccaatagagaactttataagccagaggatttggccaaagaaattactactcaagcaaagcctgtgaatagaattggttttattggtcttggagcaatgggttttggcatggcagcacacctgttgaaatcaaatttttctgtctgtggttatgacgtaagcctttgattaactctccgatctccactatgaatggtatagggagtctatgatatacatgttcagaatgattgtgttagttggttttaattggtcatatgagtcggtagtatatatacatgtatatgagtaaattaacactgtgtttatagaggcacatggtttgcctcaatctaaacttttggctgtagtgcattcatagatttccctacgtttggctgttagctcggtgaatggtatgctttgtgtttcatataattgttaatttactcatgtattcacattagctcgtcagattattataaatgcaggatttactaataggtgacttaacatcaaaaagaaacgctgttttatcactcttaagcagtaaacatgcaacattgttaaataaaatgttgaaattgatttgaattgcaggtatacaagccaacacttgtcagatttgagaatgccgggggattggcggcaaattctccagctgaagtgacgaaaggtactccttgaaagcagatagattacagtgtagctgtgtcatgtagctctcagctcttctgagatgaatatctgccttttccccttaagtccagtcatttcccccagaaataatacgttaacaatttgtgactgctcctacagatgtagatgttcttgtaattatggtaacaaacgaggttcaggctgaggatgtcttgtatggacatcttggagcggttgaaggtatatctctatatcctagattttagcactggaggttagagctgactttcctatattttctttcaaatatttcagctataccatctggagcaactgttgtacttgcgtcaacagtatctcccgcgtttgttagccaacttgaaaggcgtctagaaagtaagtttttttctttgcttgatgatagaggaaaatccttacaaagtgttttcagtaacgggctacagtaaatactgtttcattctggatggtcatacgctgatcaattctcacttccatcagtatcttttactgtcacttgattgagttctttggtttattcttttatttggtaatcttgcagatgagggaaaagacctaaagctagttgatgctcctgtgtctggtggtgtcaagagggctgccatgggggagcttacggtatgaagtctagaaacctatctaatgcgtctgtaaggaagctgaagttatatagtttttcagataatggcttcaggtaccgatgaagcacttaagtctgcgggacttgtgttatcaggtgacgattgcattttcatttttctggttatatagttcttgttcacatcataacctggacatgcctaattttattatttttgagcagcattaagtgagaagctctacgtgattaaaggaggttgtggggcaggaaggtaatttgttttgactttttgttattaccatcacgatcctttatttactgacatggacacattcactttctttgtaacttgtttatttgatgttcaatagtggtgtaaaaatggtcaatcaattgcttgcgggagttcatatcgcatcagctgccgaggcaatggcatttggagctcggttaggtctgaatactcgaaagctattcaatgttatttccaacagcggtggaacatcttggtaagcattacgtagatttttatggaatatgtttttttttcttttatctttggaaaattctgtgttacatttctgagcatcaacgtcttaacatttctgatgaaaagtgaatcactctgatgctctgaaaaatgttaactatcttatgcataaagccttgtcttaatgaaaccctgtgctcttgtttgttgatatttacttttacaatttaatgagaaacgcgtttattagcctttaatggctcctatttttcatcttgcaggatgtttgaaaatcgtgttccgcacatgctggataatgattacacaccatactctgctcttgatatttttgtcaaggatttggtaagataagcaacattaatcaatttgtaaatttgttttgttttcttaactttatgcatgagttttgactgtagggaattgttacccgagaaggttcatcccgtaaagttccactccatatatcaacagtggcacaccagctattcttagccggtattctccagtcttttaactgttctcaattcatcttgcatgtgcatcatttttgtcctaccttcttaacaatacaaattattatttaagagctcattatttgggttgaatacagagttttatgagttgcaaatttcgtgaaaaatattctttgcagtgcttctttctagaatgttgtggagaaccagaaaaactttctacttttactgaactatactactaaaggtggagactaatatgtttagagatattttcatttacaggctctgctgcgggctggggacggatagatgatgctggagtggtgaaggtataattttggtttgctcttaaagcatatgaactattggacacaagatctacgtatagtgtttgctggttatctttcgtagccatagatggacagatgaagctatatcagaaacgtttggtgtcgtctgtttggtgtcttattaagctgtaagtaacggaaacgttttattttatttataggtttatgaaacccttgctggaattaaagtcgaagggagacttcctgttctgaagaaacaagacctactgaaatctcttccagctgaatggccttcagaccctacaactgacatacatagactaaatatgggaaactcgaagacattggttgttcttgatgatgatccaactggcacacaaactgttcatgacgtagaggttttaactgaatggttagccttgcatctttctctatgaaaaactgaacttatcgtgtcaacaaaaaagatatcatgaatctttcactgaaataattggcaagtcgctagcctagaaactaatggaaggaattgataattgcttattgcttttccctacattttgacaggagtgttgaatctatttctgagcagtttagaaaaaagcctgcatgcttcttcattttgacaaattcaaggtccctgagccctgagaaggtcaagacaatttttattttgtgtaatctacttattgcagagtcccaatttcatggaacaatgaaactttatttttacatcaacttcaccaatgccaagctctaactgcatatttcatcaacaggctagtgaattgatcaaagacatctgttccaacctatgtgctgcatcaaaagaagttggcaatgctgactacacgattgttctgaggggtgattcaacattacgtggtcattttcctcaggcaagtttggtaaccctatcatgaaatagcagactatcatgtcaatgttatgatttcagcttggcatctgtttctgtcataacttgatattatgatccacacacaggaagcagatgctgctgtctcaatacttggggaaatggatgcatggattatttgccccttcttccttcaagggggacgttatactattgatgatgtgcattatgttgcggattctgataggtatgtctttgtgagcaacgtgtgtgtgtgtgtgtgtgtgtaattttttcaaactttcagaatcagggaaaagttcccttcagaggatgaagattgatggtcttcattttgaatattgcaggctcgttcctgcaggagagacagagtttgccaaagatgcatcctttggatataaatcctcaaatctccgtgaggtcttaattcttccaacaagggaatcatcttatgttatttgaccctttaagaaattaatagtaaggaacaatttgatatgatttcagtgggttgaggagaaaacagctggcgtcattccggctaacagcgttcagtcgatctcaattcagcttttaagaaaaggtggccctgatgcagtgtgtgagtttctgtgcagtttaaagaaggtaaatttttctaagcagatttcgcgacgacttctggatgttgctttccgtgaacttttggtcttcatagttgtggaatcagttagtcccagttgtgtagaaagtcttaactctatttccatttcatatgtaaatcaggggtctacatgtattgtcaacgccgctagtgaaagagacatggctgtatttgcagccgggatgatccaggtaagccgcccaattattcttctagtctttttagtttttgaggcatattcaattagaggatacatttatttttctcttatattcttggtcccttcgttcgattgaacattatatttggcaggcagaactgaaagggagatcctttttatgccgcactgctgctagctttgtgtctgctctaatagggattattccaaaagatcctgtgttgccaaaagatttcgaatctaacaaagaaagcagtggtgcactaatagttgtaggctcatatgtcccgaaaacaacaaagcaggttagattatctactaacaacactaatttctttgatatcttctcaatgaaataaaattaaagagccctgagtcattttcttctaactaacaggttgaagaacttcaatcacaacataaccagaatttaaggagcatcgaggtaagagaagtagatgtaacacgggatacttatattagtatataccacatgttatgcatgctttgtttgctaagttctagcaatgatcaacagatctctgtagaaaaagttgctctcaagtcatctgaagtgagagatgaagaaatcagaagagcagttgagatggccgatgctttccttcgggctggcagggagactctaattatgagcagtcgtgaactcatcacgggaaaaagttgttctctatctcaaatctttatatatttgtgtcgttggtataaaatcatgactgaggaatatcatcattaacgggtctatattcattttgacagcatcttcggaaagtcttgatattaacagcaaagtgagctccgctctggttgaagtagtgagccagatatcgaccagacctcgttatattcttgctaaggtatttagcttctatatttatctttccatctcataaacttcctgacacactctgtcaatccccagttgaaatggtaactgttctatgatccaaagcctttcgatttttttttatgacactgtaacgtcattgtttagggtggaattacgtcatcagacacagcaacgaaagccctgaaagcacgacgtgcacttgtgattggtcaagcccttgctggtgttccagtatggaagttaggtccagaaagtagacatccaggggtcccctacattgttttccctggtaaatcttaatttgtattcaaaacatttaactgaataaaaataggtattcttaatcaactctttttccttatatgtaacaggtaatgttggtaacagcacagcgcttgcagaagttgtgaagtcttggtcagtggtagcaggacggtcgacaaaagagctgcttctggtgagtatccttctcgttctctagcttcatatatctcttctcatattgatgttgtctttctatgtaaaacagaatgcagaaaaaggtggatatgcagttggagcatttaacgtgtataacctggaaggaatagaagctgttgtagcggccgcagaggaagaaaatagtcctgctatattgcaggttagtgttctgaccaaaagtggatttctgatatacaatagcaaccaaagattaacattctgttctgagttgttcaaagatgtccgacacaaagagatttgataactgaactttttttggctaccttttttaggtccatccaggtgcctttaaacaaggaggcattcctttggtttcatgttgcatctctgcagctgaacaagccagggtaagtggctttgtaactgtacgttgattctgcattagatacataccaaaattttaggcaatcatgtacttttgaactcgctctctagctttcatctgtggtttttcggaatagacattgaaatcaaaacttaatagctgatcctaaatacccagtacatgggtctgactctgagccccctgattaatacgcacaatgtggcaggttccaatatccgtacactttgatcatggaactacaaagcatgagctattagaagctcttgagctagtaagtttgagatctctatcacttatgtgcaatctctgtgtcatcttttacttattcttatattgaaaattcataccaaatcgatttcttgcagggactagattcagtgatggtagatggttctcatctttccttcacagaaaatttatcctacacgaaatccataacagagttggcccgttccaaaaacattatggtggaagctgaactaggccgactctcaggaacagaggatggcttgactgttgaagactatgaagcaaagctcaccaacgttaaccaggtccttgttggttttaagccccgataaatccaatctctcacctaacaaatttatgttgctaaaccaaactacaatttattattatgagttttcaggctcaggaatttatggaaactggtatagatgctttggctgtgtgtataggaaatgtccatggaaagtaccccaagtccggtccaaacctcaagcttgatttacttaaggtgaattatattcttgtgctgactgaagtaagttctatgagtttgtgtcattcttattctaactgatcaccatgtatgtaggaactgcacgccttaagctcgaagaaaggcgtttttcttgttcttcacggagcttctggtttgtctgagaaccttatcaaggtatgagtcgatcatgtttgaaagtttcttgtttggtaatagaaaactaataaaatcggcgggaaattttttcttttgatggagatcttgatatgaatttaactgaattaacgtctttgtgggctatgaaaattgttgactgaatgagatcaggaatgcattgagaatggagtgaggaagttcaacgtgaacacagaagtaagaacggcttacatggaagctcttagctctgggaagaagaccgacattgttgatgtcatgtccgcaacaaaagcagccatgaaagctgtgatcgcagataagatccgtctctttggctctgccggaaaagcttgagttgttgataaaaaaatgtccgatcaattagttaagtacaattgtacatcacatccaaagaataaaaaaacaacaaatattacatcacatccaaagaagatgaatgcattgtatgcaatgcagatgcagtgttgttggaaataaagaaatcatttttagtactgtttaactgttttttttttctttttctcagtcaaatatataaatagaaactaaatgggcaaatatttaattgttgttatcggataaaactactaattattcatggctataaaatcctcgcaatcttcgccgtttatcttcccgttccccgatcaaaaatatcccaaactctcacacacattctcttcattgggactcatattcttctttcttttctttttctttcttttttcgtgtttttattttgctatctccaagtatttatctttatgacttgctttgttcctatccatggatgtatacttctttgtaatggagattacttcatttctgaagcttttgagtcaaactgatggttttggatttgggatcttcgttattggttgctcctctcagtttttcaatctcgtctttctctgttgtttgcttcttttgggactaaagtttctatctttcaaaggtacttcattgtttttgcagtatttagagaagatcaatcgaatttctccgaacattgagtttttcaattccttcaatcgagaacacaaggattgcaacaacaacaacaacaacaacaacaacaacaatgggttcatttcaaaatctcatttggctgatggattggatcagaagaaaccaatcattttacactggagttctgattctactaatagattgagctgggagaactgtgatcttctccttctacgtgatgggcttgatcacatccagaacagagaaaataccgtggcgttatcggagacagagctcgacgagaagaatcatcatggcgaagaagaggaaagcgaggacgaagaagaatcacagtctcagaatgatgaagaccaattgttagacgttattactctgagaacaatggtgaagagagagagaaaacgtggagattacatgaagaaagagctggagaaggagagaagagcagctgaatcagctgctgaagaagccatggctatgcttctgaagctacggatggagaaaagcgttgtggagatggagacaaaacaatacaagagagtcgccgaacagaagcaagtgtacgatcaagaagtgattcaatcattacagtggatgttgatgaagcttgatgatgacgaagacaagattcaaatgtaaactgtttgatcctctgtttttttgtatttatgcgtataaaactataaataagcaaaatataacatgtatgtatccaatttcgattaaaccgaattaataatcaacaaaccaaaccgaaattggatctaatgtttattaagacaagtctagttacgtggccggttactattggatatgtgacaacgattcaacgtggcaatttatggactattgaaagacgttattgcccctttcatcttcattctttctttggtcatccatctgaaaattcgatctgatcactgagaaactacggcgacgacgaagaatacggtggaggaggaagtacaatgagaatattaagctacggaatcgttattctctctttactcgttttctctttcattgaatttggcgttcacgctcgtcccgtcgttctcgtcctctcaaatgacgatctcaatagcggcggcgatgataacggagtcggagagtcctctgacttcgatgagtttggagaatccgaacctaagtccgaagaggagcttgatcccggttcatggcgatcgatcttcgagccagatgactcaacagtccaagcagcctcgccgcagtactactccggcctcaaaaagattctatcggcggcgagtgagggaaatttcaggttgatggaagaagcagtggatgagatagaggctgcttcttcagctggagatccacacgcacagtcgataatggggttcgtttacgggataggaatgatgcgagagaagagcaaaagcaagtcgtttcttcaccataatttcgcagctgctggtgggaatatgcagtcgaagatggcacttgcgttcacgtatcttcgtcaagatgtaagtaaagatggaacttttgattttctttatgaatagatgaagttgcatctgagtgtttgttattgatttgcgattctgttacagatgcatgataaagctgttcaattatatgctgaattagcagagacagctgtcaatagttttctgatctcaaaggattctccggtggttgaaccaactagaattc

SEQ ID NO: 989 - DNA, 108767 bp, Arabidopsis thaliana
gaattcccatcagttacacttgttctcgatccattcagaaaaaaggatcttgctgtacttgaaaggttactaatatgcttagcgcgtatcattctgcaaaattacaaatgaaaaatcacagattcagacaacctcacagcaattgattatcaaacatactctaaaactgacggtttccaagcatagaaccaaccaatgaattagaagatacattagaaaaacatacccaattagctcttctccaaactttgaacattactataaaaactagcttcctcccaacaatttaaattctccaactttcttgcatacactcacaagtaaagcatcatacacttcgaaataagagcaaatgtttatactttctctgcttcccacattagaacattcaattctaaccaaatgctcaaaatttcgattttgtcaccataagaatcctttttcgacatctgattcacattagaatctacttgatcacattcgaatctcactaccggtcatcaaaagttttttaatttacaaagttgagctaaagtctcgagaaacgcgttaaacccagaaacccatctcggcattattcccatcgtaatggaaacgcaaaaaacgaaaaacagaaatcgtcgtgcactgattaagattagtaacaaaggtgagattttaagcaggatcaatagaacacaaaagtcacctgaaaaacggtggcgttaacttgttaggttatgattattgatgtccctgcagaattctccaggtgatattgaaaataaatagagagagagacgagttcgtcttcttcctcacgttgtcgtcgaaattgagagaagaagcgttcttctactctcctccaagcatatttggtcacacacacggaggctgctgccaattcaaggtctcaacttttttttttgctctccttttatattttcacttcatttctcttacctaaactttcaaatatacccctcatctttaattagtttccaaataacacctaatagtcttattcttacaagaattctccccattcttaatagttttttttattcccctttcataacttctttctctcaattagccagtaaatatttctattttgtttgatacatgataaattcgaagtattttttgtggttttaaaaaggattatgtgttttatggagttatagaagaatatatggctttgactaaaaagaagaagaaattgagcttctttttgttattttccactttggttagttcttaattgcaacgtagaagccttgccctccccaagtttcgcaagtcttcaacaaaaatgttccgcaagtcttcgctattacacgtggcgttgctttcatgtcttgcccgtgactgtcctgttactctagtggtcagagaaagtttctttttcagttgtattttgactattcagattttggtggtaagttgagaaacgagaacttttagcggaataagcattatatgattaaaaaaactctataatcaaagaagaataattgtcttgtagagtttgctaatcctcttctccaagcaaggtgcaaagtctcctctgcatactaggcttagttcaatacatctttcaatctagttaggcccattagcccgttatgtttacaaagttaaaagcccacttacttgagaaaattcacagatgcacacatgcattagattatgtactgcaatctgaaaatgcatgatgagaggtctcatacacaaaacaaaatcaaaaacaatttagaaaaatattagagtaacttataaagactgttacagctgaaactaaaatactaataaattcgacttctggcaataattaaggattacatctcttttgtttagagtataattgaacttttggagctgtaatataatttgtatgtatgatttatgaaaagtgattgaacttatacatagatggaaaagttggcgtaacaacatgcatgatacatacagaacacatgcagccacagcatttgaatagaacacatcatcacaattcccaaacataatcattctcttcagcaaaaagacacactctttccaaatataattgtcacttttactgttttaaattttaagttatgccagctttaaagttgccgacgacaaaagcatgtccatcgtttctttcttcttcggaagattaatcagaggatttaaaataatctaaattcgagattatgttgtataaatatccattttgaaacttgaatgaacaaaaaaccgataaagttttccacgaataagttgttggtgtttttagtaggttcatagataggagggtggaaggtctctagttgggcaataaattgaaaccgcttttttctgacctaccaaatattaatttgatcgaatcattgaaaaaaatacatatataaaattatccatataaaaactatgtagtttgctttaaaatatttcatcgtatgcaatgatatatgcatacttaatccaccacatgtcccttgaaacaaaagcacttaagctctgtgtggttgacattaaatcacacatttcattttgttaaaattaaagtctaaaattttattcatggtagtacatccatcatcaaagaccattttcattgaacaaaataaagtttcaatctctaatcctttgtgaaaattcttactactatatattaattaggtcttttggaatatagacgcgcaacacacattttcttatatatggattgaatggtatccaaatccccaaggtaatgtaatgtaaaaccaagataaagaaaacgagtatgacattgacaattgaacttgtagcgaagtcaggataggacgacttgcggtttctactttctaagccaaagaaacatagttttcattgatttttagtgtttttaaatttgttgttgacttccattaatggaatatttcgtactttgcttcttcttttcgaattttatttacctatataactttgctttattttctacaacacaataagtattgctcataattgaggaagtctatacacacaatattttcctatcctttctttttttctgtcgggaatttcttcatatcctagcatctagattatgattgtacacatacaaaaacagaaaagaactagacttcaaaataatgcaaattagaaacaaaaaattgctccaaaaaaaatatattcaaaactataaataaaatattattatgatttttcttctattttacgtacattgtatatctctagagaagaaaataatttttaaaaaatagtttgggatcaacgtcgcacttattgttttgtcttacaatctcagagtctcaccgtatccaccacgctggtcaacaacttcaacaaaactctcttcctcgaacttcaatcttatcccttcatttcattaccattaattcacaccaacggctaacattgtcctcctcgctaaactgttaattatacgtttggccgtaatgttttgaagtctgcctatatttcttttcaataaatgctcttttaattaggttttaatttggtgaaatccaacctttaaattttctgatgctgttaaatctaagagtttgaattttctaaaatcattgttgtcggttatcatttgtacatcttgatagaactataatatgatcaatataaacttataataataataactgaaaatacaaatgattttgtttgtttgtttataaaaccactgaaaaatgcaagagttaatccactgagttcaaccaaaaaataaagaagtgaattctattagtcataagcttggaccaaaaaatccatctagaagaaaaaaaaaattgaaaaaaaattacaagtttctaagaagatggtgcaatggttagaaaaatctctcaagttattaaatgcatcataaactaatactgtatattactatacacaaaaatcaaagactcccttttttttaattgaatcaaacaaaatccgaaatttcgaaaggtccgacttttcctcacctgaacccgcgttttctctccccctcccaacccaactctccaattcgccggaaaatcaccgccaccgtcacttccggcgtccatatgaactaaagagataagcttttttcttctataatccttcttcttcttcttccttgatctcctttctctgagtttgctgagtttcttaactcagccatgggtaactgtaacgcctgtgtaaggccagactcaaaagaatcaaaaccatcttcaaagccgaaaaaacccaatcgagatcggaaattaaacccattcgccggagatttcaccagatccccagctccaatacgtgttctcaaagatgtaatccctatgagcaatcaaactcagatcagcgacaaatacatcttaggtcgtgaattaggtcgaggcgaattcggaatcacttacctctgtactgatcgtgaaacccacgaagctttagcttgcaaatcgatttcaaagcgaaagcttcgaacagctgtcgatatcgaagacgttcgtcgtgaggtagcgattatgtctactttacctgagcatccaaacgtagttaagcttaaggctagttatgaggataacgagaacgtgcatctggttatggagctttgtgaaggaggtgagctttttgatcggattgttgctagaggacattacacggagcgtgctgctgcagctgttgcgagaacgattgctgaggttgtgatgatgtgtcactctaatggagttatgcatcgagatttgaaacctgagaatttcttgtttgctaataaaaaggagaattctccactaaaggctattgattttggcttgtctgtgttcttcaaacctggtaaagattcaatttttagtgtttcttaactcagtggatggttctatttttagactatcctgccatatcttcatgtttatggaagtttgtgtagatatctgagattgggtaaataacgttttctttattgtaggagataagtttacagagattgtaggaagtccgtattatatggctccagaagtgttgaagagagattatggaccaggggttgatgtgtggagtgccggagttattatctatatcttgctctgtggtgttcctccgttttgggctggttagcttcttcttttaattattttagcagctgtgtaattgttcacctatgttgattagataaaccgataagattgtggtttctattgacagagactgaacaaggtgttgctcttgcgatcttgcggggagttcttgattttaagagagacccttggcctcagatatcagagagtgccaagagccttgtgaagcagatgttggatcctgatccgactaagcggttaactgctcagcaagtgttaggtgaagttcttgtgtttctgttttctttaatggtcgtagttaccttaatccactctattactaatgattttctttttctcacctttcagctcacccatggatacagaatgcaaagaaagctcccaatgttcctttaggagatatagtcagatctaggttgaagcagttctctatgatgaacagattcaaaaagaaagttcttcgtgtaagtgttttttttttgccttttacttttctgctgaagtttgtagagagtctgttgtgtgtgtctatatttggttttgatcattatcatccctgttaatgcttccaggtaattgcggagcacttgtctattcaagaggttgaagtgataaagaacatgttctcactgatggatgatgacaaggatggtaaaataacttacccggaactcaaagctgggcttcagaaggtcggttcacaacttggtgaaccagagatcaaaatgttgatggaagtggtaatttaagcattgcccttatctgattaaagaccaattcagtgttcttctctgataaacatagctgaaatctgtatggctttgacgcgcaggcggatgtcgatggaaatgggtttctggattatggagagtttgtagctgtgataattcacttgcagaagatagagaatgatgaacttttcaaactagcttttatgtttttcgacaaagatggaagtacatacattgaacttgatgagctacgggaagctttagcggatgagttaggcgagccagacgccagtgttctaagcgacatcatgcgtgaagttgacactgacaaggttctttcaaatatccaaaaaaatcctcctttaaggcctaacaataaagcttgtcaagagaaaagatatatccctctgcttctgagtcggattgttgggcttgtttgctttttacaggacggacgtataaactatgatgagtttgtgacgatgatgaaagctggaactgactggagaaaggcatcgagacaatattcaagagagaggttcaaaagcttaagcattaacttgatgaaagatgggtcattgcatctccatgacgctctcactggacaaactgttcctgtttaaatttattcgttatcaccaaaaacagagcaatgctccgttttttccccatttcataaattgggaattttccgggcttgttctttgagggatgggaattttacggaagctatggttctttacatatataaacattttacattgtattttgtatgtaatgttttgttcaaaggttgtatttttattgtctcaaagcccctaaaccaaagagtcaaaggaaagatctttattacactgacaccttatcaaactcagcagaagtcttgtccatgtccttgtccttggccacaacatctttgtaacggtaccaatgtgagaccaacaagaaataggccaagtttagagtcatcataccagcaaccaagaagtagaaatactccaatcttcccttgtttaaatcttccggaagccaacttcctcctgaaaatccctctgtggtatcgtgtaccgccgataacaaaaaggtgctgaggtaactcgccaatccgattccacaataatacagagaaccagcaaaacttcgcatgttctctggaaactgtttgtagtaaaactccatttgtccaactccagcgagggcgtccgcgatacccattagcactagctgaggaatcaaccacataccggacatcgaagagattgcgccttttcttggggccaaccctagcgtcggttttgtgagagctacctttcttctgtattgttctacaattgcagacaccatcatacttgtgatgcatagaaacagtcctgctccaactctctgcagttgtgtgataccgccgtctctgcctgtatactttctaaggaaaggtacaaggacgcggtcatagataggtatgaatatcgtcattccaagcattaggaagacggtataagaaccggccgggatctggaaacttcctggaccaaggcgtctatcggattgaagagactgaaagattgtgtaggttgtttgttgaatgtaagctaggtagaataaggcggccgagagccaaaccggaagcacccggatcacgcatttaacttcctccacttgttgcatactgcagagtttccatgcatccaccggcgacccatctttgttcagcttgtcgtcttgtgtttggattgccgatttgtcaagaaacctgcaaattaagaaaaccctaaaatgtttctaagttgttccacaagaaactaagagaagtagtgaggttattagtacctgaactgctctgtatggcccaatttcgagttcttgaaatcactggcgatgtagttgtaaagctcgttaggcccaacgggctttaaccgcctcttcttgatcgcgacaacaatgacacgagttatgctgtgaatgggactgccactagctttaaccttgacatagagcttagaaccagcgaagaatatgatgcaaccaagtagcattagaatagctgggatggctaaaccaatgctccagctcacgtttgactgaacatagacgatgagggttaacgacaccatctgagcaaacgtgaaggtgaagaaataccaattgaagaaactctcaatccctcgtttcccttcttttgtcttcggatcgaactgatcagcaccaaatggaagattgcatggcctaatcccaccggctccgatcaccagcaaaaccattgctccggcgagaaacatgatttgtccgatggatggcccattgcacacgcttcctatttccttagcgcattgagctggatgcaggggatgaatcacagccgttagatccattgccaccgaaccctttgcatcaaacacaacaaacgattgaaactttcagacataatcagctagttttttttcaaactgaaaattgtgatgaataggttttagaatttacgagaaagcaagcgatcatggcgaaagatagggtcttgtagcggccaaagtaggagtcacagaggaaagcagcgacgatggtgccaaagttgcttgtgccaccgtagatgttgacgactttcgcagccgtgatgctcttcatgttgaaaaccgtcgttaagtatataaccagattcgatgaacttccaacaatccccaatttttcaaatgtctcatttcctaccaaattaagaaacagagcattaagttactctgttcataaaatcctctgttttctctatcagtttcttgttcgtttcaagaccaaaaatgttataataaataaaaataaaaaacatgaaagaaacagatccataaaaaaagtcctatgttttaattttatgaatcaaatgttttttttgtcaatgaatcaaatgtttcataaataataataaaaacatactaaaagagcacgaaattaataaatattcttatatttttgtttatttatttctaataaatatttttatttatttacaagtataaagtcctcatgtttttccatcagttttttgttcgtttcaagattatgagtgtaagtaaacaaaaatcataattttgaaacgaacaagaaactgatgaaaaaaacatgatggctttatacttgtaagcaaacaaaagtatttatcaaaaaaaaaaaatatatatatatatatataagaaagaatatggatgaataaataccaatgatgaagggcatgactttccatcctctgtagatgatcttagactcatcatcctctgcaatgttcttctctgtcttctcaacctccattgttatgtttttctctatgctctgctctgctttctctaagtgtgtgtaatgtgttagtatatgtgtgtgtgtatatatatattagtgggaagtgagaaggatctcattatgagaccaaaaaagctatttggagattataccaaaacaaaagtgttggattagaatatagatttgagtaaaaagagtcggctttatcgaaaggagaggactggagttggtattcctcacttcattgttttgatttgtcaactaacacactaacgttcggataacttattagtttatttgttgccatgacttatgtaatattcttaactcgttatttaaacattaagtagcagtcaagagttcatctttaatatctgtaatatcgacaacgaatctatccttttacttttcatctagtaggtattcttaaacaatatgaaaaaatgataaaagaagaagaagaaagctaagaagagttgtttaagaatcatatattgtgccaatacgaacatatttctgtaatgttgacaattggctttttagttgaatgcaataaactttcaaaaatgcaaaaggaatcttctcgctaccgttactttttttcttctcaaaactttaattatgtaaaagaaacatttaagcatgcaaaagagaaataaggagacgaccattgcattcaaaaatcatgttgattcgttttgataaatatgaccctcaagaggggtaaattgtattattggcggtcaactaatatccatattcttttttattttaccgattatagttcatgtacatttctaggttttttaaaatatatctatataagtaatgaatgaatgaattagacatttatttcgaaattttctatactatcaaaaatagaaacccaccgaattacgatttaatttggagaacaagagtatatgttaactaaaagtcttatctaaaaaagatgtacatttgcttcttctttttcaagtgatgggtaaaagaatatttatattaatttcataataaatagaaagttgtctttgaaattattgctacagaaataaagcatttcaattttatagtgagatatgattgtgagaacaattagaagagaatatgagtgatggagaagacagttttgattatcaagggaacaaaaaagtatcttttcctaaatgatataacccaaaaaaatcaaatcccttttgattggattagtccaaaagaaaccacccatcacttttctgaaaccccattagcacactatcggtaatctaattacgttcgttcgttaataagtagtaataaagatttgtttttggagccttaattattatgttttgttattgtcacataatattcctaaataatttgtcattttttcgtgaaggtggaaatatacgtcagctttggatcacaacgtgcgtaagtgtttcatttgatggacctcatagagtcatagtcgcttcaaaggcttctagtctggtcagaaattggacaacaagtagctaaaagaagatttaaagtgtaccatgcagcatcatcattagtgttgcttctatttacaatatacacaccaatgaccaaacacacaaatgatacaaaccaatttagttattaaacaatctcaattcccgcctttctttagttgattggttgcaaagctgactcatgttcaagtgacttagtgaactgcagaaaacacatatcaatctgatttgagatttcataaaagacatggaaattgcagtgagagtgtttaacaacattcttgaagactttttcacctgagagatcttaagctcaagctcgttccactccgaggaaggattgcttcctgaaacgattcctgttcctgcatagatcaatgctccaagaccctgggagacacaaaaggaccaagataaatgcactgtatttaacagtgaatgacccgtttgctacactaaggggagttgtcaccttttcgactaaagcagatcgtatgcctacagaaaattcactctccccaccaccaaagaacccaataggtccagcatacattcctctatcaaatgactctggaaaaagaagaagaatatgtatctcggtataagcatatattagtagatagctacttctacagagaaattcttttttccgaaaagacagtgaaagaaaatttgaaaagcatcggaatcaaattatgttataccaatttgtttaatcaaaagcctagcttcttctactggacatccgcaaacagctggcgtcggatgcaaagcagttaagatgttaaactgaaacatagacaaacatattttgaggtaagagagaaaacgtagcttttttcactcaatggaaagaggactgtagtatgagactacaacagattataagttaaaggaaactcatatctgtctattttagataacctgcagaacaagtcaagtgatttagatgatcatgagaggttaaaatcatgtaagaaatgtcatgtaacctcatcatcttctctttttagctgtcctgccaattgagaatatagatgctgtactcttgcaagctttctcactgatttatggggtttaactactaccctgtcacatatggtctgcaaagcagaagagaggattacaagaaaaataaaatcagaaggttatatataaaaaagacattcaagataaatatgttttagcattcacaaagattctgctaaataaatgttcttctacttgaagccaggaattgaggttgatgagtaaaaatattgaacttactttaagtttttctcttatattctctcggacaatagaaaactcaagatcgtctttgggactacagtagtatttgcaaataatatcagtacacatatctggaagtttctaaacatgcatcttgtaagtgtacaaagcacaaaacaaacagttgacctggttagtaagtcgcgctctatctccatttcacgaacctttgaatcacctctaggccttgttgcagccaaagcctcactgcagacacctagatgttttctgtggaagagtctctcaggctgctccattaagatgtatgtcaacattatcatagcagctaaaaaacagagtttggcaacaacttatctaccacgtaagaagaataagtaacctaccgtgttccctatgaatgctggtgcaccgggtggttgaagacagaattggtacgcgtcttgtccttcacactgtcatattaataattagactcagatttcaacacttcaaaattgatataaccggaagaaagtgattagtctaacaaatgagtgaggaagaaaaagacacctgcaaccgtgctaaccaagcgataggatcaatgtcggtatccgtaatgattctgctactgcgtgcaagcacaacctgatccccaaaccaaaatttcgtcactgaaacccataaaatgtatacaaaaaaggaagataaggttccttaagtaccttgcttaggggtgaatgtttgtccttgataatctctagagcattattcacagcagggtaataggctccttcacttggaacatggttcttgctaacaacaataactcctaaagattctcgccgtaatctcattataacagaagaaacctgataaaaccagacagttttagctttgattatatcaagtaactaataagttaaggagcagatttagaaaatggctaacctgaagcatagtttcctgaagtgcttcaatagcattttcaagcgtccatgagagctcattgtcccaagcaacagttgcagccagcattgagcttcctccaaactcatcaaactcgacctatgtgtatatcaacaaaacaaagtcattattagtccatggtaacaacaattatcttaaagaaatcaaattctagtacctggggcactgtaaagtaaaacgagccaaaatgttcccattccacagcgatcttccctgtaggatcaaatcgaagacctccataggcacgaatcagaggagactttgaagacaagaaccttcaaaacaggggaaatgaacataagaagcgaagagataaacagcagaaagaatcaaacttcatgaagataaaaaactttcggtgctggtaccttcggattgatctccagtcatcatgagaaaacgggtcgagatcgcggaaaaagacagcagacccgattccagcgacactaactggattatgatcagatgatccattgtcacttgagaagtcttgaagaagatctggacggccagaatcgctacgacgggaaaagaaactgcgaggaagaatttcgttctgtgcatgaagccaatcgattgctccaattttctgctcaattggtaccttcaatcacaagattaacgtctatgaaaatagggctttatttttatttttgcgcgggagagaatataagtcgctaatgtttcgatttttgattttttaccactatttattttcttttatcttaaaagtcaaatatttttcttccagataaacccatgaaattaaaatcttactttcttacatcatgaaataactatttaccttaattattttcataaacagataaatccattataatagtattgataacattcataaaaagagactacttgcttgatatttttctaaaaatctaacaataatttatttatttgcagaaatacaaaaatattgaaccaatgatgcaaaatagttcaaacctgacccccatactatttgggtagatagattttaaatctaacaataaagttgagtcaatctatgtttatgcaaccgacagtccgacagcaagaaatggaacaatatcacacataccaatgtaagagctccacgtggcttaagctcatttgttttttaatcattgtttgccttacgaatttttggaatggcacaaagccacaaactaatgaagaaattattacgaatttacgtacctgtaatcggacaatgccggaggagaatggaggcggttgagatttgaggtcagagacggcggttatcagcctctccgtcgcggctgccggagatggcaccgttgatagagtccttgtttctaccgtgccaagtggtgctttgtggtcagcctcacatccgttcatagacagtgtacagcgtaggaacctctgtttcacaaagagggtttcaaatactgtgacgtaaaagacaaagaaaaacagagtggttttgctgaaacctgaaaatgattgaaaacaaaaaacgaaaaaaaaaaaacctggcgagagacacgagaggataatttggtgaatgaggttcgagagtagctttggaagatcgaactgggattgtattttttagggtttgtgcccagaaaatggaatgaacactgaagcgacgccattagagagactacgaagatgttgatattattgtatggcactgagacttcaacttgtacgatatgtcttgcctgaatatatatacatatatatagatgtgatcctgaaattggtcccacattatgttaaatttcgttttgagtttcatgaaaactgctcaagaaattcggtctataactagattttaacccgacaactcatttttaacaattaatatatataaaaatttgtaaattattttatagtttgcaattgttactaagtaacgtcctgccaaacccgtctacaataaaaactatttattttattaatattgatcttatttataatatctttatgaatcattgtcaaaatattttagtcgttacgggacattgaacccacacatttttcgcctattggttaatatatgttcattcttaaaatttcgaatcacaaaataggacgaaattgttttgagattttttaaactctatatgttatataatgatgttaatttttttgatataataaactttttataaatttaaatattaataatgttttatgaagtttaaatatatatataataatatttaaaaaattaatattttttgcctctttaaataatgatataataactctaaaagcaagaatttagaagatttaaatctttaattaaatattttcatgcctaaataattaatgtcagtagcatgacattgtaaataagttcaaatacatgatttgtttatttaaacaaaaaacgtttagtaagaacaatatttatttaaacaaaaaactttattttaaaatattgttaacaaaatacgtttatgctaattttaagggattgatgtgaagtttgtctggattaaattttattgataatgtaattgacaatttaaattaagaatttaaagtaaaattaattattttgaaaaaaagatttaatgctaatggcattggattgtaaataagttcaactctaagatttatttgctaaaatggctgcaaaaatgtatatatagatagatttgtaatgtaatttaatatcgactgtgtgattgtttaataattaacaaaatgaagattttatttggtaatcaggatctatcatgaaacgaatctcagactaatttttcaaatatttatctaaaatttagcattcttgtcccatgttcatgtaccattcgaacgttgcgcctctacagtacaccaccatttcgttaccaaaatagccttagcgggcaaatcatatgtagttatagaataccgttcttaacatttagatcatgttcttcgttaatataatggcacatctgattaattaggttaaacacagttagccatgtatcatagatttctatggacatttaaatagacgtttatcaaatgaatgaatcaaaatagcttttaatttatctaatggatgttcagcaaaattaaactaaaccataaatctatattattatttttaacaaaccataaaatctaaatttaaaccctaatctttatttaataaaatagatcgacatatacggtataaaatatgctcgggataaataaataaaaaactaatcgtctcgtaacaattaaggtaaaattgtcctatctttgtaaataatatattttctgttagcacttagccacttagtagtggaaatgtggaattaatctgctccaaactctagagattagtgaaaagaaaaacccttgagatttggaagagagttagactcttcttatatattcttaaacaaatatctgtctcttacaaacttttacatattcagtttctataaacctttaaaagtcaagttatattaactattgaaaataacaataaatgtcgaagctttgatggtcaaacaaaacaattgataacaaatcaatccccttcaggccacgtgtggggaggtaacgatacgtccatatcaaattaatcatttacgttacagaggcgtttcgtatctgaattcgtatgagcctgcactgctttttttcctttttaatagttctgttgtctttgtcatctactttactatatacagagcaaaaagaaagagtacgtctatgaccaacatttgacggagatgttattaattgcgtatcgtagattcgtataggtttgttcaatatttcattttgaatttttgtttgccagtttaaaaaaagataaagttaagagaagatttgatttatttttgttaacaagacaatattgtgttaaagaaacaagtgagctggaagaaacacgacattcaacacgaaaacccaagtatatcgtgttgttgaaacacgagtatatcgtgttaatggtatggcttgtgatgtttcgatcacaaccactaatcattgacgttactcataagtttgtttttcgtcttctttttctcttttcgtttttttaaaaaagtttttcttcttctttagttggttaattttttctttttccgacgatttaaaggttatattatcagaaaagtaaactgaacgaagaaaaattcaattgtttgagactttaaacaaaactgagtgtcggattaatgaacacaaagaagtgggggaatcttctatatcttcttgtcagaaaatccaaatgattcacatgaaacatgtattatctagaaaggaaacattcatttctaatttctttctctttttggtgacctgtgaccaaatcagaggtcaactactattcagaaatttgtttgtacattaaggatgaatttaggttgctgtggctaaaggtataggaaaccacatgagaacaaatagcgttccagtcaatattttaaactcttctctcctctactatcacaatgacacgttacactggatggagtggaccactgttttttcttagttcctctacgatacacatgatatttacataattgaatcagtaatatacaaactgggagaggatggaccacttttagattatgactatttgctttttgtttggaaagagaataatgataatcaaatgtattattgtacatgatatttttggacttgattttggtgacataatcaagaaatacacacttgtcttgtcttgtcttgtatgtggatacgattgtgatccggattcattgatcacctagacacctaccaagtgaatgattatactatattctaatatttggaagacactagagagattgttagttttttctgtttttctgtttttctagaattgctagtcttttaacaaaaaaaaattaaattaaacaaataaagccaaatggttaaataatcaaggcttaataaaattcactttgtccgatcagtgccataaaaaaaaaatcatctatatctcttctttttttttttcctttttttttttatctatatctcttcatcaacacatatatagggtttccattacaagaaacaaagaaaaataggttataatcaatcatcatattaatttgggccaaaaagctttaaagtaaccatataaagatcaagttttaagactcataaaactaatcacgcagaaaaaaaaatatgatgagaaaaataatgatgtcaaaaaaaaaaaaaaaagaagaagagaaaaaacaataattggacgaaaaaaagaacaataattgatcgattcaaaaacaaaataaatcgaagaagaaaagaaggattgggacatctcccgctagttttccacgtcattacgcttcaaatagtaacgccaaatttttttatacattgggcctaataagcccattaatagctctaagtttatgggccatgtacatagcatggaagaaaaactctataaagttgggttccaaaagtcagtgaaaaatgctccacacgaagttgttaatatacactcttatcagattttgttgttgaaccactaaattacttgtttaagaagatataaaaatcttattataaacgatctactatatagtatagcttgactcaacatatgatcacgaattcacgatagattattcaattttaaggattgaaaaccttttgaatccaccttttgttttgatatatatgttggagtattaaccttacacataacttcgagactcgtgattttttttaatcaatccttgaacccaatgatgctttcacgtacattctaaaaaggaattccaagttttatttattcgttctaaagtttcatatgtacacattagttccataaactccaacaacaaaataaacttgtgattaaacaaccaatatatagatgaactaggaaactagtgaaagtctaaacccatttaccaatgtactgagtatataagaacatatatataacaattctctttaagggctcttctcagcttcatttctagtcacattgtgatcaatctttaaatcgccgcccatgatggaagatagagctgtcgccaaagccgattggaaacttggatctgtcgtgattgccttgattgtttcagccggtaaagatggcacttggtgactgatgatgttcttgattccgatatgatcaagatttatttgtggagaatgtgatgaagatgatcttccaaacggatcgaaagatgacccggcggttcgggtttgaatgattttgtggtaaggtgattgctgatgggtgttaatgttgccgtaagctgcacggtattgatcactgggattaccaccaccaccccaattcatcaatgtgttggtgttgtttgaaaagttgagattggttgaaggataactattagatcgtgagacattacttggaggagagctgaatctattgagcattgataagaacggttgctgcgacgaggaggaggttgtgaggtcgagagtgacggtcggatggccagaagaagaaggggattggaggaaatgagttttaggttttggagtgatgttgttgccggaaagagagaagttaaggccatgaagatcagctgcggcggatgaggaggaggaggcgccggagagaagcatggaggcggcagcggaagtggcagaggccatggcagttgctgacatgggaagtggatggttatgtgttccttcgtacgttgagataagtatagacatatcttctgaacatctttgcacctaaataaaagagttgatatgatatatatatggttctttaataacataggactatttagaatataattatcagtttagtacttttacctgttttcttactggacaagaagctgcaatggtgcaacgatagtaagctcggggacatggattgcctttagctattttctggccatatttcctccattgacatccgtcgttcatctacagagacaatatatagcccaagaaattaaaacacaaactttgattctgttcttgtggaatatactctttgagaagtttttttttcttataaaaatagaagtgagaaaaaaggaaggattatactgttagcattcatagatgtatatactaattaaattaaagatatgaataaaatgtactaaccgttggtgtctcacatcttgatctcaccgaaaccctagttttcttaacaaggttttgaggcaaaatctcatcttcatcttcatgatcatctccatcattcttaaacccaaaactattttgtgatctgatcttattattgttactaatctccaacgacatggtttcttgattatgatcaatctctaacttctcattaggattactcaaagccttgtattcaatccccatactcaacccttgaatactgcttttttcattatcatcataatttctgtcaccttccgcttcttcaacatctttatttttttcttctttattcgaaccacttggaacctctgaatttaaccgtctgcctaggctcaacgagacaagttcttcacgttcgttaactttttctctgtcttcatcttcgcctttgtcttgatgatgcccttttgattggaacttggttggttcgttatgtttggccattaattggttgtattgtgtttgaaggatgtcaaaatctttcttgattttactcaatgatgactttagtcttcgattttcctctttagcctcatccatttcgactttagttgagtccaactgatctcatcatacgtttataagatatggttaatcacgatatgcttaacaaatatacaaatatctatcgtttggttgatctttcctcaaattatatatgcatgcctcaaaaatccaatacatatttttttctttctttctcataattattgtacttgtgatatatagatgagcaaattcttcgtaaaaacctccgcaaagacagaaaattatgaaactgacaagagatttgaagatctaatttagtatgattttagaattcaaattaagattcattgattaagactaatcaatcaattaataaaaatggattttggataaaacaaaccatctatgtgataagattatgaaagatacatgtatgtaattccaaggattgatttatgcgatttataaatgacgtctaaatatttgaaaactatacaaaaggaaatttatgataccttggatcttataatatggtcgtgttcttgatgagaatcatcgtgagatgaatcaagttttctcatctcatcatggctttcttctcttccatgaccactcctcaagaaatcgtccttctccatattagtcttctttgataaattttttattagctctcatgttttctcttgggaactgttgatttctatatatgcaacctatacatcctttgactatgccaattaaacaattcacaaaaacatgcaagtctcctatattaataatgttcagagaacatgacatatttctataatttacaaaattaccaaatatctatcttaaatagaatgaaacatatagtgcacatataatattaaattaagatttaaaattcaattatagtcttgtaattagatagtctcgctgttttgttttacggtaggttgaaattccaaaatcagaaattaaatactagtttataaagagtttttgtagactataaaatgtaaaaacattgaaccaagtggttgtacaattattctatttactcattttatgcagcaatgtttcaaaccatgagaaaaacaagcacgcaacaatgaaatcttgaaaggtcaacagccaatccaattgaacaaaacaaataagttaaaaataacaatgtatacgaccaaatatgaatgggatattataatatactattaattggtttttctgccctttaaactaataccaacacacgtacataataaaaacaaccattgtgcatccgatttattcggaaaaaagaaagaagaatattgttcgtggatcgatagtgtcgactaattggaaaagaaatattgaacttcaacgcttaatgttataataaaatagctatgtctcaacaacaaacactgttataaggtttggagccgaaattatggacccaccggccaacgttgctgctaaagaacaacgttgaaatttcttgatcacatcgttacaattttatctctcttatcttttcattttcaaaatgataaacttctagtggtagcgacagaacaaatgtctagatacaggccaatccgcaaatggattactatggttaattaacaagagaatgaaccaaaataggtaatagaaagatcattccaagagatttcttgctaatttaaatagtctaatataattaatattataatttagctaatttattcgtagtatttttcgatagctgttactatattaccttttaagtcaatatagcttatcaatacatcgttttttttttggaaaaccaaacgtgtttcgtcttagagctgatgtgtttgttttgccactcgcgtaccgacgtacgtatcaatgttaacttattaacaacaaatgagacgactggttgtttttcaaatggcaaagaatgaccaaattcggttttagttgctccatcgatcgttctaattaaagcatcaaatgaattgtattggatcggaattattattttatctactactggatctgaatctaaacgcagaataaagtttggtatacaatataattaatgtattgtggagcagtggaattttgatattattaatcagcggttagaaaagaccttgactatagatcgaaaatactaattaccaagaaaaatatatatgactccagctatgatatacatgcgtttacaaaaacgagcactccaatatatgaacttaaagtcatacattggtgacattacacaaataaaatatctttataattaataaaaggtcaatttttgttgaagatttatatttctgcagatttaattattggtgagtgcaaaacgtaataaatatttacacaaaccactcaaatatatgccatgatgtatgagcaaaactataaatctagaacacaaaataaatggtcatatctaatcaatcagcttacaatttttaaattttttgtggcttccctacaaacaaaattccataggaaagtttaatcaatttcaagttgtatattttatttaggtttagcgcagtttgtctctttgtttaactaagtctttttttttttttttgccaaatgaatggtacttggtacgtagacttggcatcaaactagtaatatatgatatatgtgttaatcataaatataacactagagttgtaattaaatttaccaacataatcttacgttatatgagttttaaactagaaactaattgaccatatatcatgatatatttgatgaattatcatggacatatcacatgtgattgataatttgatattaacaagtacatatttaaatggaccacgatctaaggccttttgctggttgcgtagagttatgtatatgccattgacattttagaataaatagtcagcttgttgacttggtgttttattatagcacatcatgtcttaactactttaacttttctcttaaaattgtttagaaacattttctacaattagcaaaagaaaaaaaaaaggccagaaaaaaaaaaaattcagctaaattcgtcgatgcccaaaatccgataacaccgtaataagtaagagaatacaggggtatatttggaaacagattaaaacgcagaaagtagtgttccatttacaaaaccctaaaccctaattgctctcgccttcttttagcttttcatctttacctgtctctgcccttaacctcacacagatatcgagtctcggcgattgaagtgaactctcatccttataatttcatccgaaaggtaaaattttgacagctctagtcgctaaaccattgttgtttaggtctccttggaactcttctgaatttgcttttagattagtttactctttttgagcctttgtttgtgtaatcttcgaatggattcatggttttgcgttaatgggttctgtttgttattacagattttggataaagttttgatttttttggttcgcaatgacgctgctcgaagctatctccaacgccgtagcgaatcaggacaaggtcgactcgcaatccgattatccaatccctcttagccacgatggtatctttgcgaatctgaaaccaaagctagaaaaccctaatcttggtacccttgtcaatccaatttccgggtggggaatctctgaaagtgatgttgaagtcatcgatttgggtaaaaagttttcatctaagctgaaaaggaagcttaaggatactaacgggtttgtcaaagatgagtttgtcaagatgttaaagcagtttcttgagaaaattggtgagaaagttgggatttcagaggctgagtctgagatggttttgggagatcaagctggttctgagatacagatactggtggagaaaaatgggtttttgatgggtagagatgtatctggtttagtgttgaaaggttgtattagtctagagatgtgggagctagtggaaattttgatttcaaactccttggttgatcattcttcatactcttatttagttagcaatcttgttgagaagcaaaggtcagatttgctttgcgtagtgatcaaagaagcttcagatcttggggcaactgagctactttcaatcttgaagtattttttatgcccatcaaaggaagcaattagcactatggctaaggtaagagaagaatgggagagtcaggctatgttggctattgaaaaggtgagcaacacagagctatcaaagaagtctaaagttgcagaagaggcttctatcttgttaatggttgctcatgacgggttttcaacctcagagctttgcctgcattacttgttagcttcacggaatgttgacgaagtcatgtttgcatctgcagtcagtaagttgaatggcaatgagatgggtagctttattcgatacctctctaaatggatgaagaagtatgagatgttcccacaagctggtccatgccctaaagccgcctccaagcttggtttgaaactatgcaactgggttcctgaactcacagacattaccaaatgtttgggacttcttatcgatgagaacttctccactctggttctgtactcggatttgcatgaagagctaaagtctattgcaagagtagccgatgggttagcttcagaatcaaaactttcctgttttgtggctaatgtggttgaaagtttgaagcttggagctgcccgaaactagattttcacaattgttggagcttaatgcaaccctgttttcactttttattatggtctccagtgacatttgtattttctagtttcagttcatctcttaactaaagtataattttgttcgctatctttgagagtttgtctccaacctctgcacattgccaatctcatttaggatgcaccacatggtttaaaattgttttcttttccaagaattctttatcagttacaacaggaagagtaaaaggtttatctttgcaatacaacagcttactttgttgaagaatgagcacaagttgttgctcaacgaagtgtctcacagagccggataataaaaaccgttcctttatgaacactcacgagaccttgccgcaaaatcaaacggctaatgtatcatcaccacgaaagtgaggtactctcgctgaggttgaagaagaagaaggggcaagaatgtaattacatccagaaatgcttcatagttacgcagctgagttattacacttgttcacaaagtaagctgcagtctggggactacccaactcctaactttcttcaccttcttaaattacctatctgtcaattatcatcatttcccaattgtgttgatacttaattggtagtagcaattttttccattaaagttttcatttttttggttttttgttgatggaaaaagtattgatccaacggctgtagaagaacggtgcaacaagattttgaattcggagatgcgtttgttttagttttaaaatagaaataaataaagttgttctctctctctcttcgtggacactggaactaacaccaccgatgcactacactctgtagagactgcaaatggaaagcatcttttggtaatcacgggtactgttgtcttcgtcttagtttttgtcggaaatcagacattagatccgaccagattctctatttggagacagacattactcggatctttatttcattttgtatgattctttattgtagattttgagatcaggtagtgtggatttgagatcaggtacatttacttgcaaggtgagttccagatctggttttggttatttcatttctggagttttatacgtttttgcaattttggagattttgttgattttagattaggatgatcattgcattttctttctctttcttgtttgatttcattggttaatgattgtggattactactatttaatctttttataaaaaaatccaaatccttagctcatgtacttataaaagaatgattttatgtttgatagtgatctatacatagttataaacaaatggctgatccattgaacttagtatgatgaatcctgttacaaagagcttatgtatctctttaatgtctaaaagctctagatagaaccaaaatatgaaaattgcaatctttagtaatgaaagtgttgtgttatagtcttgtgttattgcttgaccataatattttgtgattgttcggactaatgcaggtgttttgaattttggttgtggacataatgggaaagcctgcaaggtggttaaaaagtgtactacttggaaagaaaccatctaaatctagtggttctaaagataaggaggtaacacacttccgcacaatgttgtatgataaaacaaatgaatttcaagcttgcatagttaaatttctcaggttgattacagtagtggttctcgtagaggaccttgactgcttgacatctcttttactagttttttcactttagacattgcaaatttcccactaattttgtgtcgtctactattgtctatggtgtcactttctgatttcatttccctttgttgtctgtttctaattgttcctgacaacaattctctatggtttatcacgtgcagagaattgtgaatggaaaagaagtagtggttatatcaaagattgaagaatccgatgttgtttcggatctttcatcaattggaaatgcagcagtctataccagtggtattgtagagacgcagaatctaaaacatgaagatgtttcggacgacgagatacaagtttctgaggtccaaccaacagattctcaagatgttgcttctgttcctgatgattcgctatccgaatcagagaaaattcaacaagagatcgcagcagttaccgtgcaggctgcgtatagaggatacttggtaatattcttaagcttctggactagatatagacatggctcttgatttgcagctattggtgtttttctttttctacttttctttttttctattctgatatgagctctctatgtgaaggcacgacgtgctttcaagatattaaaaggtataataaggctacaagcacttatccgtggtcacatggttagaaggcaagctgtttcgactctgtgctgtgttatgggaattgtcagattgcaagcacttgctcgtgggagagagatcagacattcagacattggagttgaagttcagaggaaatgtcatttgcatcatcagcctttagtaaatgctcttcaagcacttctctgtgatttcggtttcttggctgaatagctcttaactttgattaatgtttttgtcttatcaggagaataaagccaactcggttgttgatacacattcttacttgggaatcaataagctaacaggaaatgcttttgctcagaaggtatacttgtttctactattactatgtttgaaaagttgagaagaccatggtggatgattctgttgccttattcttatcagcttctagcttcatcgccaaacgtgctgcctttgtccctcgacaatgattcttccaattcaatctggttagagaactggtcagcatcttgcttctggaaaccagttcctcagccaaagaaagcatcactcagaaaatctcagaagaagtttgccagtaatcctcagatagtcgaggctgagtttgcgagaccaaagaagagtgttcgcaaagtcccttcttcaaatctcgacaattcctcggtggcacaaacatcatctgagcttgagaaacccaaacgcagcttccgcaaggtttcaacaagccaatctgtagaaccactaccgtctatggacaatcctcaagttgatctagagaaagtgaaacgtggcttgagaaaagtacataatcccgtagttgagaactctatccaacctcaactggttccacagattgcagttgaaaagccaaatggtagtttagaagaatctgtgaatgcctttgatgaagagaaagaagatgaagtggctgagacagtggtgcaacaacctgaagagttgatacaaactcatacaccattggggaccaatgaatctcttgattccacattggtcaaccaaatcgaagagagtgaagaaaatgtaatggccgaggaaaaggaggatgtaaaagaagagaggactcccaaacaaaaccataaggagaattcagctgggaaggagaatcagaaatccgggaaaaaggcttcttcggttactgctactcaaaccgccgagtttcaagagagtggtaatggtaatcagactagtagcccgggaataccgagctatatgcaggcgactaaatccgctaaagcaaagctgaggctacaaggctcttcttcacctaggcaattagggacaactgagaaagccagtagacgttactctctaccatcttcaggtaatagtgcaaaaatcacttctcattctcctaaaacaagagtctcaaactcgagtggcaaaagcgggaacaagacagagaaaactcttctttcgtcccgagaaggaaacggttagtctcctaagcaaaacaatctttcccacaatgatcattttatggaattttctcgtctaactttgcttggattggttttgggttttgcaggtaaggcaactccggtagagtggaagagatgactgatcatctgataaagaaaagctgaggcctttgatgtttctaaactacatcattttactatctatatagctaatgtgtatgtctgtctttgtccttgtgtttgtttttctctttgtgtttgtgtaatgagttgagaatgtacatcataggttttccttttctttttttgtgtgtgtgagggatcttcattttccgtttaatcttacattacttctcatatattatcttcaaaataaaataaatcaactttagatggttatgtcatgtataatgaactaattatccttaagctcctcatatgttgtgacttgtgatataggaatcttcaaatgtcctagggtcctaagtttgaatgaatgattagggagggaaaggatcatatttcataagtaaataaaggaaaaaaaatgcaaataaagaaaagcataaaggatattagattgagctcaaagaagcaagactgaatttcattgcatggaaaaaagagcttaaaattacaaaagttgaaattaacacaagcttttgaaccaggcttcctattcattttattattcttcttcatcattttcaatttattctttttgaataaacactttttttttatattcattttatatgtaacggcagtccatgtcaggagaaagggaatgttccaaagatatctctatgctctttggtgattctatttgaaagcagacattgtggtagtgtatgacgtacaatgctcaaaaagcaacacaagaatgcacctttgaaactatatatttatatgtatgtgtcagtatcaccattcaccttatctaaacagaaaaactacacttatatatctgtatgttagaagaaaagaaagtatggaaatgaaaggaaaaaaaaaagggagagggagatatgcttagcttccctagaagagagttccaagtgtaaacccttttttggttcaaacttgtcagaagagagttcttctaaaaccagcctttatatatgcttctttcttaccaatcttctctccattccaaaaacaaagagatagagagggagatacaaaattctctcttgttctttaacctttttccatttatatataatctctcaagttgtactttcagaaacaaaacgctgtagtatctacatattagttaacatgggtgtttcaattggtcatataggaatgattcttcttcttctcatcgcgttttcggtacttcaaactgattacgtttcgggtcttagatgggacagagacatgaggatgcagcttatgtttgttcatcctttgcgtgttcttgaagagtctgagcctgagtcctcttcatcatcaaaaggaaacttggcgccttctcctttcgttatgtctgatcctaatcaatctgtgaaaagaatgattggaagaggatctgatcctattcacaacaaatacaacaaatgctgacatttttactataatataaaatgaaacaatgttttgtttctgaaagtaaagctaaggctatactctgtttctgtaatgtcagtaactctattttctttcagtactctgttttataaagaaggttaatatttgtctcttaatccttcatcggcttaagtttctatatcattgttctttaaaacatgtcttgcattacctatttggttgatgcattattatattatatgagtatgcaagacttcatttgttctctgtgtgatttctcgctgtttcgtatttaattggttctgattaaccagattattaccagtataaacatcatgcataacagaatcttctgagattgccggaacaaaaaatatggatcttctgaaatctttttcgataatacataaattcttctagagttttggttattgagcccaaatccagacaactcagaaagccagcaacaaaaggtcgtcaaatatactgggctttatctttgaaataagcccattaaataattcgcaatcgtaggtgtacgtagttgattgatttttttcatgcatgtttaaaatcctgagaaatctgtacgtttctggtttctcggagagattttctactctaaaaacaacattgatgttaaacgataatgacgattatattgtcaattattttggtagtaatgataattgataagaagaagaaaaaaaaactctatgaacaagtttaataatatttgccaatatggcatgctggattttctcgaatcatcatgttttcgatttcattcatcaaactataatgaaaatggattaaatatgatatttggagggaaggaaacatacataaacaaataaataaattaaagtagttggaaaaaagtggagtagattcaaaccttccaactataataatttatgcaagtcatagtttgacaatcattttgggccctttctcttgttggttccttaatttgtttttgtatctctgccagtgtcagacgcagtttttacagactttttgtttaaatatatcacaaaccttattcacgattatattttatactcttgaagtaaaattttcatcagtgtgactcggtctcgaatccctagttttacaatattgtatatacatgtaaatccagtatgatgattgatcagtgtatgaaatatatatataaactattcaaatgatttggggttgtatagattttaggttggcaacttcacgagtagggcacggttggtgagaaacaaagagtcttttacacaaatatttaagaacatcccatctctcgctgactctctctatattccaaattgttttaaatgcggtcttaactactttatagtttatagtattctgcagtagatgtttggacgaatatctgctatataatgtgattgttaattagcacaatatggttctgaaaggtatcattattaacttaattacctccttattggcttattggaggtggcaaaaaatttgaactcgccaagagaaattgaacagaagaactcatgccgtgtcttcattttctattcgacaaaacagacttcttgacattcgcccgtgattttcggctttttattttcctaatgatcaaagaaattgttttgtaaattttatgtttcagtttacaagtaccattttttctgaattgataggatatataaagttaataccattgtagttatagccaaaataaacttacgtactattacagtgagtagtaaaagtcgagatcaaaacttgtcaataatttgttggtatagttttgtgtgtcaagatgttcatatatggttttgatatttgtttattttgtttttctttctctaatcgaagattttttttttttttttttttttttttttttggctgtcaaaaaaatatatttgatttgttaattatgctgatatatttcataaaattgtaccgaacattcgaatctccataattcaaaaatcagtctagattattaagcactgtcgatgacttgatgtagtagtctacacgttaataatttatatacagaaaataattttgatcatctttagggcaaaactaatttataatcaaatcgcatggggcatttgacgttgtcttttgtgtacaactgggatccacatttgttgcttcgcgttataagtaagtagtcaaagtattactgaatttctaaataaaaatccgaattgaaacctcattatcttttgtgcattaatatatataattttactgaaatggaatttataattctatacttttatatatagttgccaagaaaacaacattatctatatatataatgatatatacaatgatatatatttatttatagttgtatataagacttaaatggaagtccataatgataataaaaaatgtgattgataatgcgattatactccaacaatctgtcagtgtctattgcttgtgggagcatgtcccttggagtgactcggatacgcatttattttgtttattcaattatttatttatttcatgagccactagtggctagcatttaattggttttattactaaattatttttccaatgaattaaaagatttatgcgaagcaattgcacgtgaaaacaacggtacaaataaggctcattgctgagttttatgtttgcaattttggaagacaccgttggaaataaaatgaacgtaaatttgaattctagtattaaattaaaaagtaggttccctcgtatcaaatttaagaattttgttgttgttcatataatatatacagataaatagtatatctattatttaaaagtcggttaaaaatatcttcaacattttcaaaaatattatactcgattctaactatcaaagaaaatggtttaaatatactagatgtcaagatcactagctagctagtaatcttatattctacatcatttgttgcacttcttccatgttacgtaacatatttttacccttataaacctaattacatgtcgaagtctttgtcttaccaaatatagatatatttcatttcacaatgacttctttttctgatgcgactttttcaaatacttagtcatataataatttaacaaatgcttcagcaaatccgtctatagtgtagagatatatagtcaacactcaacaaccctatttatatattaagggctacaaaggggcatttcattggcaagtaccattttacttagtatccaaaaagagtgtttgatcatttccccacaaaacaaggtaatcggaattttcttttagggtttttcgggagatcagtttacgaagaagatgaagaagaggcaagtggtgataaaacagagaaaaagctcttacactatgacttcttcttcaagcaacgtccgttacgttgagtgtcagaagaatcatgccgctaatattggcggctacgctgttgacggttgccgggagtttatggcaagcggcggagatgatgctttgacgtgtgctgcctgtggctgtcaccggaattttcaccggagggaagttgacacggaggttgtttgtgagtattctcctccgaatgcaaacaactgatgaacgaagatggaaaaaagaagaaaagccaagaaaggtaactgaaaacaaagaaaaaaggaacctgctttggatttgatctattgatttatattagatcgagatgtattttatatgtatatgtatatggttaatgttgtatattcaactacttacattaacgccgatctatatgatgaatgatttttcaatcttgatgtgatacatacttcaaatctatgtgtacctatatttaagattacaatatgtggaacaatttttttgtttttcctttttttggcggatcttgcttttgattattttaaaaacccagaagtcttaaagcgtttaagaagttgtcgatttagaatagaatgagccgtagataattttggtgacgagttctaaagacgtacataaaccattaacattccgtataacacaaaagtatccaatcgaaactaatctttcttcattgagctaatcacatttgtacgtctatatatatgtgtatgctaatgttttaagcaggatacataataaactatatttcttatttgaaagagatgaatctttaagagcacttagcttgcgctgaaagagatgaatccttatgagcacttgcgatctctttcaaattccaatgcttgttttgatgtattaatatatttcgatgtatatctatatcgcacatgtagagtatacgaagcatatggtcaatgacagcaacagaaaatggggatatacagacttataaatggaattcaaaacacaaattaataagcaagttaaatctttgttcttattcttatattgacttatagctagataggtgagttttgttgaaaataagtagttaaaatgattattttattgtaaaataaaatttggatcttagcttttattacgtaaaaaaaaaaatataagtaatgcatacaagtaccaataatcatatgtttcttccctttgtctctttctgttgaatattcgacccaccactttacatacaaaagattccgataaaatgttcaacacatattaaaaatataaagtttgatgtccatatgaaatttaaatcaaagtaaatttagtgttatgaagaaaatattattaaacttgatgactttattcgattaagtcgagttcatgtacatattaaacaaataaagccagaagtcaagtgtcaaagcattacttatatatctaattaatagacggtctggtcgttatcattctttttggttgctagaaaagatcatgatggagtttttttgttatgtttatgttaatgtaatttaatttaaaacacagcggcccacatttcaaatcatgttatcaaatcgtttaggttcatgtttttcaattcgcttccatatataacaaagattttaagccattatcataaagcaatataataccaccaaaaacatattggccacttttgctctcatcaaagtggccactcgaatttgttggaaaagaccactgtagtatttcttaatgtaattaaaaaaagtcaagatactcttttggagcatacatattctgattttgtgaacctctagacagtacgtagacaatttcttttaacgtaaaagtaactaaaataggccaataactaaacacagagttggaccacatattttccaccttcggcataacaaaatttgtattcgatccacgacccttaacaccattctcatgaacccaggcttcttttacattgcttggctctaaagttttcaaggcaaatgcttatttttttctccaggttccaaagacacttaaaagataagagaaaaaaaagaagaagagacattatgaaaatagagtgttaaatttagaactgatttgctttatttctcaccaagtacataacctagtcccaaacagataaatttcaccatttcaccgcacattttgccttcccgtgacgatcattttcttaagtgttggaagccaagaactgcactcatcccattcggtgcttgtcataagcccctgttcaccaaaattaacaaataacaaaccaaactctattctttattcaacatttataaatacgataatgcaagattactaaagattcacaaatacaccactttttacctgtatttttaacgctgcaccaaaatcacgtttgtccagagcttgacagagctgagtgagtttttcagcagcgttcttcgagatgtccccattatttagttttgaaaacagagctcctagctttcttgagcaattatcttctgcctcacgcttcttggcaggagtatctcttgaataacctcttaatggttcaaatgtctctttaaatagccttgtcaatgaagccacaataggtttctggtgggctggatcattccataacatcatgaagaaaacaatttgattttagtaaaaaacttatatataacaaataaaccacatgtaatgatgctgacaaaaagtgcgttttctgctttaatgttttacaatgtcaatacctggtacattggaagtatctgcagtctgaacagttggtggtggagctacaggttctggttgcaccgctacctggtgtgttggagtcataggtcggactggaggagcaacagtttggggaatcttggagtttatatatggaccaacttgtgaatggatggatcgatatgaaccaggaccgggtggagcattgtaagctgggccagcggatcgctggagacagaggttttttggttagtcaaaagctaaaatgtggacaatgtaaactaaatacaatggagatggaagtgaatcatatacattaaatgaatgataatccatggttggttgctgatattggtccgcgttctttagttctcgaggaggattcaaaggaaaaaaagtaatacttcttgatggctgagcattgcttaatggagctggagtaaaagatttctgcaggaaaataagacgaataaatgtttaagtaaaaaccaagtagataacagagtttgttccaagccaaacaacatacctcttgatatggattggaaattttaggctgagtgtttgttgaagcagaagtgttagcagcttctgcaagaaacaatattatcaaaaaatttagctaatatcagaatgatagctttcttcgatagcagattaatcacaacacagctgaacacataccaggttctgcatacagagaaatccgatcacgcaagattgaaagttcaggtgagaaatcaccagactccagaagttttaagaacttcatagctgttgcaataagtccttgactagccaatatctcagcataactttcaaagagtttacgtagagacgcactgactctcttgttgcaagttgtcaaagcaaggacaagagttttctccataagatcctatttcacagaaaaagaaatgcaaaaaaaagtttaagcagagaagtactatttaatatttatgcaagatatagaattctatactcacttgaacacactcagcataagatttcccagcactttgtttttcaaggctcattgaccaaatgtctactgttttgtcgacattgcctgcgcaaatgtaacacagagttgcagccaaagtaaaaccagcagccatcaaatttgaggcaagagcatcgcagaggcttatccattcatctccttctgcaaactgtttgtcaataaataagaaaaaaacattccattagtgtagttattagtgacatcaaaccatctaggagcaagtattttaacttcatcaagaaaatagtacttacagtgcagatgagagcaagagtttctttccaggatttaggttgtcttgtatgaaggtaggtcattagatcattgttcatcattgcagaaacaacctgtaacagattaacatagtaatataagatgacacttatacttatcaacatatcaagtaaagttgaaaaaacgtctaataatatctataccttcatgtaaggagcattgctcatccttatatatttatcacgagtactctcccacaattctgtaccaccaacatgagcaataactaaagcatcagccatcttatttgcagaaaaacactgagccactgcttccttgtaatctcccacaatcaatgaacgttggatggcatcatcaaatgttggatcagagctctcttcttcttctccttctggttctggcactttctgagtttcttccacgtttgtagaagaacatgtagcatgaggctcattagcagtttgatcattttcctcagatggtaaactaaagccaagatggctacgcaacttcgtctttgcgttcccatcttcttcaagcataattttcagcagtccccatgtttccttctcttcctcagatcttcagaaacaatgtacacaaagaggaaaattgtaagtttctgttacttatataaggatgattatttgatcattttcagtcactgcaagacttactcggcctcttctgttttcttctcgcataaacccctaagggaagtcttctctccattttctaatgcagcttcaaatttagaaattcgattcaccaaacttttttctgtggccaagctatgcagaaagacctgacacgcacacataagagtcaatgaactgaagaaatataaaaacagcaaaacagaataaaacaatgtcctctctaaaacaagacctcagatgcctcaggaagatttttgttaaacgaaataagctttcctccaaatccaaaagatgcaccagccgggcgcttccaccattttggtgctgttaaaggatctgcatcgagaagatggaataagaagtgctgttggttctaatgctcccaacaaagcaatgattcaagcatattgttcaacaagagggatcttgaaggacattacctgaatataaattgttcacctcggtaccatagctgctacaaccctacatagatacatactttcattttattttatttatgggtgggaaacaaacaagtattcttcagaactaagcagtaccatgacagaacaggaacctaactcctaaaataacaatgaagaggaaaaatgaacttgtgctgaatttactggttcattatttgtatacaatcatatattattgatcttgatctagaacacaaatttcaaacaccaaaacgaaactgcaaagagctacctcaaggttatagatgccaattttcccatcaactgaagatgctgatataactccaggcatctttggataccaatgaacatcaaaattccagttttgaccagtaggtaactcagccacaatctgacataattggaccaaaaattccattaatttagataaagtactagttaactgacaagcatatgcaagctaacaacaaggctatatcaaatctattgtctcttcacctttcctgtctttgtgttccaacaaatagttcggttgtctttcccacaggtaagtagatacaagctgtcacttggacaccactccattgcaatcacacctgttgtataacaagtatcaccactctgtttcaaccaatgcaagggtacattctatatagtaaaagagatggagatacctctttggtgaccaacaaatgtgcgaacaggtgattgtagataccttatgtccaaaagctgacagaaaacatctttagagaccaatgaaaagagccaaatttgattgaacttgaaaaaataaaaattaatatgatctgattaccttcacattcggtgaactatcttcatctgaagcaaccaaaatctgattaaaatgatcaggatcccattgcaaaactgagcacctaacggtagttttcaagctgttgattgataatggctagatcaggttttgataagagatcacagaggatttctaatataacaaactaaaaataaatcaggatctcaaaacttactctgttataatcttctcgttattcacatcccatatcactaagtaaaaacaatattcatcatatacacgattagcacaagttgaaaaattgtagttaacctatgtgaaccagatcatagaactctaatgctcacctgtagtcccgttgtgtgaggtagatgctaaaacatgttgaaaccctttattccatgataaagaagagatttcactttgcatataagaaccagtaccctgcaacgagacattgtatatatcttaaagatatatacaccagaaaagataaaattgcagagatcttgaactgtatagtacctttagataatgagaaggctttgaaggatttgctaaatcccaaatacaaactgtaccatcatcagccccagaagcaagttgatttggagacttaacattaaattcaagaccacgaacctatattacaaaacaatgcatgtacacatcaaataacgatgtatatatatcgggaaaaaaaacaaaacagaagatacaaactcacaggtcctttgtgttttgacaaatctctaacgtgcgcaatttcaccagactcagaactgataaatacaaagtaaaatactttacataatcagtataaattgaagagaggctaatagatttcaattagggtttagggaaaatcacctaattggattccataaaccgatgttcccgtcaactagaccaccggctatgagaccatcggatccagagccataacttccccaagcgagtcgattaaaccgctcggaactttggcattgacctactagttttagctcacgatcgttggactgaaaatcgagttcaaagatctcgagattggcggatgaactaaacgaaagatctactgctccggccattgttccggctgctatgaacggagattccggcgcgatggcaacgaaagcggatctaccaatactctttatgcaatccattgtgagagtgactcgaagaaagcgatttctcaagagtgcggagggaaacagagagaattttgtaatgagttttcgaatgttgtagacaaaaacttaggtgtatatatatagtaaacgagtaagggtagtttcgtaatgttggactttggtggtccgtgatcactaccattcacaatccgacacgtcatttgtgtgttgtcccaaagaccaaaatatccattatttccatttggataatagcacaaaagctttattataaaggtgacaactaaaatatattttttcatttttattaaattgaatgattgtttaaaattaatacattgggctagttatcaaatttagacgtatgatatactcatattttttaagttaatatgtaaactcatatttttaaatttgaaaagaaaaattaaaaacaatttgggctagttcacaaaatttgatattggaaaagaacggtttgtagagcccagtggatcgtctagggcatctaggccttatatctacaagtccttttttcagttttgtgtcaaactattgatgtcaaaaaaaaaatcagaaaatcaatagtgtcaagagtgggatttgaacccacgccctttcggaccagtacctgaaactggcgccttagaccaactcggccatcttgactttttgatttataacatacccaaatattatattatcctttgctaatttttaaatgttttgccaaaacccatggatccccctagttcagaacctattcagttctttgctgatcaaacaagtttaagagacaatgtgaacttgaaacaaccagaaccctgcatagcgatttaaaatctaatcattttgatccacatgtactttgatgaaaaaacaaaaaaagaaaatttccacagttatatatttggagttttattattctaaagggacaataatgatactgaaaagatatttgacgttgccactgccaaacttttcagcagacgtcaaggcaatttatacttaaatgtgtgtggatatgtatttgttggaaatgcaaaatccattacgcaccaatctttctacctagctatttatgaagtactgaacaataggcataccaacaataaataccaagccagttcgatttctctcttctctttgttgttcaatttccacataccacttgtcgtaacattgtccacatgttatttttttatcatggataataaatccacaaactaacgagaaaaaggaaaataataatttgatgattgagataattcgaatcaatctttgataaggaaaaaagatactgtataacgttgaaaggtccaactcataatgttcatttggcttgcatgtaaaattactgtaccatcaggaataatatggtgatactacagtgtttaagtgagatgaatagattagtggggatacctaagttagcaaacaaaaacaaaatatttacactaaaaaatctcaagacactagaaattttagccttcgtaaatacatattgactactttcagttataattcaaaactgtatcactttaaaaaatgtgaaaatataaaaattgatgaatgttgtgaaatgtatatagaaaaaaaacagaatcacattttcaaaacatatattattaatttactattcatcaccatattggcatattctattgattgctttagaacttacatgtaacagagagtaaatatgagttgatatattaagaaaaagttgttgcaaattttttgaatagtcaaatatatactaatattttatagcttataactaaaatacaatttctaagccggaatccatttttcaactgatgttttgtaacgcgaatgaaccaaaatatctatataaagttaagctagattcttcctttatcaaacggtaataataactttactcactttttgttttcgagaccaaacaaaattaaaatctatatatttttgaatcaacgtattgtgtttgattatggaaattgagagattagggttcaagtttttcagctgtaatttggatcggtgaatatattttaaatagcaatttttttttgtacatgcctcaaatagtaattgaaattacatagatatatacacacatataatgtacttatcctaatatttcttttgaaggaaaaccataaatcaatttgacaaaatacaaaagccgtaatcaatttttaaaaattgaggggtttgcaaactgtgtagctaactatgacttgtcaccatttcctccaccaagattcattttctctatataatagtgaaatttcctcctcatgaacatatccaccattcaaagctctttctctctgcaaatcttccatcatttccatagctttcttcttcttgtcatttcctttaaatctttttggttggatattttgtattttaacacttcataaagtagtcatcactaaacaacatatatacacatacaaagagatggatgctgaaaagaagagtgcccattttcgccaaatctcatcttataaaccacaattacttgtcctctcctcaatccaagaaaacccttcttcaaaaatctcagaaaaagccaatatcaaagctgacaatgacgccgagattggagttttcggagcagaaaagtacttcagcatgaagctagatcatgttgattccacggcggatatcaccaagcaacatgaaaaggaaaacacacatgatcatcctaatgctaatcctaatcctaatcctaatcctcatcctcatcctcatccccagttgacgaaaacgacgtcgtcaagatcaaaaacaagccgacatggaacgccaagtgtaagatccgagtcaagttgcaacagtcaaacctttctcatgaggattaacaaccacaatgaaaataagcaacggaaaatgaacgatacgagcatctcttttggtgggtttagatgttacggtccctgctctggggtcaaaaccgtccataccgacccaaaaaactcctgtaaaagtagaaattccgatcgggattttgttgcttacgacgcaagaaagcacaacgacaaaccaagactccattttgaagccaagaaagcggattttcatgcgcaagagaagatttcattacctattcaaaggtccgatatcgccatgaacctcgagagaaagctctctctgcttacatgggacgcaataccaaaccaactctctaccaagaacaacaatcacaacaataatggtaataactcttcaatgagtagcaacacgcaagaggaagagacagcaagtgtagcaagttctgatttgttcgagattgagaacataacgagcagtgtctatgagccgagtgaggccagcattggatggagtgtggtaacgggaagtatggcagatcaatcggtgatttcggatttcgatatgatgaagagggtcacgagaaatggtccggtggttaaaaccaaaccggtgattggtgagaaagtccggtcggctgggtttttgtcgggttgtaagagtcacaaagctgtctcggttgttgatagttctagaaaagtgaaagaaacagccaaggttgatcatcacgagatgtctcatcagaagaagtttaaaactgagattaggattcaagacttgagctttctttaataaacaatgtttgtgtatgtgtgtgttcttaattagttttcatcaaatatttttgtaatatttcttcgtgagtatgctaatgattttgataattttagtcacttggtttatataataaaccctacaattatggttatcgttgaaaaaaaatagtggataataaaacaaagctatgataatggtgattttcggggaatttacataagatccaaccaagattgacgtccaaattaagtttgatcagacactagctaaccagtcacactatattttacgatgaattctataataattttgaaattcaattcagaaacccaaattatccaggaacaaaattgatacaaagtaaccactgaacatatatatattcactccagttttttagtcttcgaccatcgtacaataatacatgttgcttattagatttactatcttctttggaatatgatttaagttcttaactatgtttctgcatgttataccatatttgcaacttttaagaaatgacactaaaatataaggattatcatttccacaccacatgtttcaccatatcacatccatggacgttacgcattaattggaatggattatataataaaacatcgtaattatatagatccctcccgtgagtcacgaccctacaaattatgcatatcagcatgtggataataagagacgacgatgagaacttgacgtcgagacaaggaaatatcaattagtctctatgagactacacaaaactggcattaacgtcggatatatatttgtagccatgcaattgcaaacttagggttggttagtagtaaatgtgaaggggaatgttctcaaattgggaccaattcaataactcgaaacgagctaatttgttcaaataacgaataaacagagtatgggcattggatgcaaaatatataattaattggaccgccttagacagcactatatttattgaataaagttttaatacatatcggtaacatcttaataaatctacatattaagatgttactgtataaacattttaactaatacacatatgaacaaaacttgacattctttttttctttacagaacaaaacttaaaaaaactaatattaagcgaaataattcattgctgattcgtttctaatggttcgacagaatataacgaaattaatgtactaccatatttgtttacaattagtggaagccgaaaattatgtctatactaatattttctatgtatttaaatcaagtattgtggtaccaccagctgtgaagaatgttttcaacaatattaattactttgtgaccaccttacccaattccattcgatattaaataggaaaaagaagtatacctattattatgttttgtctgatatacatacacataaatacccaactagagccaaacaactccaataaatcaaccgttgaatatgaataatatgacacctttttattcataaatgtgatccttttaaacgtataaaaatggagtagttaataacttaataacttaacttaataacattggttcctttacaccaaaaaaaacaaacattttatttgggtctcaagaggtttattaatagtggcccatgtatagactgttgcaattacattatttcagtagcccgtaaagttccctgggaagcccattttgagcccatggataagaaatttaatttaatccacacagaaaattatataaagggtgggttgatcagataagttattaagaaatcatcatgattgtattgtttgatttgttacctaatattgtttttgtcaccaattacatgaattttttgttgttgtcaatacatgacttttgttgttgtcaacacatgactttttctttaatcataaaaaaacttaaacaacatcacatcatttaagctagatatatttttgttaatcacttaatcaccattaatctatatatggatgggtagattctattatttttaaatcacaaaaccaattatataaaaataaaataaaaaacctaaacaaaagaaacatatgaaattcccggctctaaatgacaaaaatacccttcttctgtaacgtgacgtaatctaattggttaacaaaacccccaaaaccctaaatcagtttgcccagattcacgcatcacacaatcgagtttttagggttttagcggttgctctctcggaagccagagagaagagggaagaggaagtctaattcctctgcgttttttgcaattagggttttctcaattggaatcgaaaatggtgacagacaagagcaagaaggcgaaaaccgaagaagaaaacgtcgagcaaatcgatgcagagcttgtcctctcaatcgaaaagcttcaagagatccaagacgacctcgagaaggtaaattccaaaaatttttaacaatccccatgtttaaattttctcgtgaattttcctttagtcgatgttcatttattgctttgatcaatgagaattgttgtgttggactctctctcgattcagatttctagtggacaaattataaagaaaagtcagtatctttattagtaattatgttgttgttgtgtctttcgagtgaaatgtggtcgctttcaaattgactttgtcaataaaactgtttgaggattgaattgttgtgttgagtccaatctctcagtgacctctctggttttggttttgatagataaatgaaaaggctagtgatgaagtgttggaagtggagcagaaatataatgtgataaggaaacctgtttatgacaagcgtaacgagatcatcaaaaccatccctgatttctggttaactgctgtaagccagactctctgttctgttttttttttcaattcagagttttaaacaatgttttctctaattggaattttggaaatttacatttgttgtagttcttgagtcaccctgctttaggtgaacttttgactgaagaagaccaaaaggtttgtgttttccttattagattttgattgattgattcacagttttcattctttgtcctgttgattcgatatttctgtttttgaacagattttcaaatatcttagctctcttgatgttgaggatgccaaagatgtgaaatctggatactctatcacttttgtaagtttcttttgttattatgcgactttatcataatttgattgatatatctctgattgatctaagaaagccaagttgtttagtttattcgtttactgattgttgttacattgtgaattgcagtccttcaatcccaatccattttttgaagatggaaaactgacaaagacttttacctttctcgaagaagggacaaccaaaatcacagccacgcctatcaaatggaaagagggcaaagtaaaatggatctttattgcataaaataagtttatttcttaagctgtcactgtttttgagattattcttaactatatttctcaattatcaagggcctggcgaatggagtgaatcatgagaagaatggaaacaaacgtgcactacctgaagagaggtatttctcatctcccccatttcactgaaacccatcatagatccaagttaaaactcttggcaccattcttattagccattacacgtctaaggactctctatcttttacctgtcttttttcagcttctttacctggtttagtgatgctcaacacaaggaggatgttgaggatgagatgcaagacgaggtaatgatcctatattttttttatgacttgattgtaagagtaactccatgtatggcccaacttgaactcggaaattcgtcttgtagcaggttgcagatatcatcaaggaagatttgtggcccaaccctctcacctacttcaacaatgtaagctactcaccatatcatttttcagtctttacttggtttagagcgcttaagttgcttggagattttggtaaattgttaaatgtaactttgtaggacgctgatgaagaggactttgatggagacgatgatggagatgaagaggtaaaagcctcatcttatttcctttgtttggttgagttttctacttaaaaattactgcatctatgatatgctaattaatgtgcataatgagatgaaagattagatagagatatcttaagacagaacattgtgttattattaatgcctgaaaccatttaaattctggagattccattataagttgtgcctgataagtttttcaaaaccatatctgtctctaggagaaagaaggtgactctgatgaagatgatgacgaagaagacgaagttggtgaggaatgatggcagggatacccagaaaccacatttgcttacatgtcttctctataacagagtgtgtaaagttttgtgtgttgaaaggtttttaattttaagcaaaagtggattatgacgacaacagacaagcttttaattttattttaccgtaatagttatatcttgttgtaagaaaccattttcagccttttgttggaaaatcctgcttaaatggtttttgagtcttacataatagcttcttcatcttttgtcttcttaaagagaattatatttgtaatttcatgtctgttgtgtttctttgactttactgaatagagaatttgtgtgtttatggtgaaaatatagccgatctgcttgacagatgaacggagtttattttgtctggtgacatgactctgttctcttatatcaggatttttgagaaaccctttggtatctttattgtttggtctgaaggtatgtatatactttttgtctttgattaacctagtaatatgattactaactcctgtaagttcctctttcagatcactagaacaaagcaagaagttgtaatatctattgtatagtataaagatgctcgaaaaatttcagattctggttagctctagttgtacagaagaacaaaaaagtctctaaagactcaaatgtttcagaacgacctacgcctatgagtgtctaaaccggttaaatccgaaccgaaacgaatggaaacagtcttgagaaacaaaagagtaaaaaactgatcatagaatcacctagttttactaaaaagtggtatttaataaaattgctctctaaacaactttattaataacctacaacaagatttaatttctcatttcttaagaggccattaactacaagaatcacctgaaaagtattaactactcgcagccattatctccaattaattgaaaccgttttttttttggtgggaaatgtattattaatttcttaaccgttactcgcagctccaactataagtttataactatttttcgttaacaattaaaatattaattggcaccatacgttacaagttaactgattacaaatactaaggagtatataatacttaggaaaaactgtaattatatgaaatcaactagctacttcacaaaagagcaaattaactacgattggcttataaattatatccatagatcagagagatgctaagagagacgtctatccattacctaatccttaaaaaaaacgtccctcttattagcattagttaccattaatcatttatatctctctcgtaactccaaagtttttacagggcaatcaattagccgtcatacccactttcccgtacattttataacttcacttctatatctaccactacatgcatgtatatatatatacacaccgttctctctctcccgttgattagtgatcacaaacccattaataatgatgaaatcgttttgcaagttggagtatgatcaagtgtttggcaaagaaaataattcattctcatttctaaaccactcatcactttactctcatcaaaggtaaattaattgatcatgcatgacttttttttagttttacatgtttatataatagttcttgatccatgttttgttgttgtgtgttcttaatgcagcgagttagcaaatcctttcttcgagttggaagacgagatgcttccttctgctacctctagtaattgttttacttctgcctcaagctttctggctttacctgatcttgaacccatctccattgtgtctcatgaaggtatgtatattgtagttgtttgatctcatggattttatgtgtgcacttctcattcttgtcgttctgtttaagcagatatacttagtgtgtatggttctgcttcatggaccgcagaagagacgatgttcgtttctgattttgcgaaaaagagtgaaaccacaactaccaagaagaggagatgcagagaagaatgtttttctagttgttctgtttcaaagacattgtcgaaggaaaccatctcattgtacttttacatgccgataactcaagcggctagagagcttaacattggtttaactcttttgaagaagagatgccgcgaattgggtattaaacgttggcctcatcgtaagctcatgagcctacaaaaactcatcagcaatgtcaaggtataaacaactataaacataagacaactaagttataacaagttaaattcctctattgtgtatcattaggaattattttttgcattttttagttcgccaaattttcttgaaaatttgatttttgttgttttggaaatgaaaacgctatataaagccttaatgctatggtctaccgatttagtgaatttgatgtgactatttttataattgtaacaggagctagagaagatggaaggggaagaaaatgaagataagctaagaaacgctttggaaaagctcgagaaggagaagaaaacgattgagaagttaccagatttgaagtttgaggataagacaaagagattgagacaagcttgtttcaaggctaaccataagaggaagagaagaagtggcatgtccacgcccatcacatcatcatcttcttctgcttctgcttcttcttcttcttactcttctgtttcgggttttgagagataataggtgctcgatggtctttgatgaagaggtatgagaagatgatgataaagaggtgaaggatctcttatgaagtttctctagtgtgggttcttctatttgtttgtgaatgtgttgtgtatggtttattgtattcgactctaaattacaaaacgtttttgactcattaatattaaaattactactaatatagtaaacgatctctctctcttttttgtttgtctcaataacttgttagctagcttttcaatctacttctttaaaaacaccttcttcatattttgacccgaatgcataacttatgttggttaatatctatgttcacgtagcttcgtaattcgtatagtaaatttgtatcaaaattttggtgtcaatggcagtaatttagtacaacaagaacaacaagaattttgcttccaattctagaatataagaagattgcttaacaacaacaaaaacaataaagaatcactctctttatttatgctttagagatctcaaaactaaaactctcaagttctctcaatcccataaactctcttaaggttatgtctaaactcgacatctattaggaatacaattatatttagataactgctaaatatataaatcataatcctactttgaatagcttatgattccagctaattcaagcttatccaacaatttattattcgagttgctaaaataaatattttaatttttttatattttgtgaaataccgcaagtttgagaaaattagaacgactatgaatgtaaatttgatttaggaattatgattacttattttttattttgcattcgatttttttttttctttatttttgggacctaatttggataatgttgggtaacataataaaactgatataaatcaaaagagttttgaaaagataaaattaagaagaggaagaaaaaaaattacagttaattagccgatatctataaaataaaatatattgactaattatatactatatcattcttataaaatatatgattcctagacaacatttcttacaaaaaaaaaaatgcataaaaggctaaaactcccatgcatgagtactatgtacattatagcgcaatagctctgtgcctctgtcctgagttagttcggttgctgcagtcaccaaatatacagagacttattcagtttggtggattatatagctaaatagtttcaatggagatatgaattacaaacctggttgtaagaagtttgactaaactttaaatctggaacccaattactttgatgatgatgatgtaagaaagtgtgaccaacttttaagtactaatttttttaatcaactatatatttttttgtcttaatttataaagtttttcaagcttaaaaggaaattgagtttaaacgtcaataatcagattaacaaaaacaattaattaattaattgtttgctaaattatacccaaagaaaaaaaaaggaaagtaaaagcttaggaaaaaaacatacaccgtttgtaaattaggaaaaaaacaattacaaatgtaaactgatatcaaatcccaatagtattagattttctactaaagatatatatatatatatatatatatatatatataccatcgatctaggcctctgttataaatacatgaatgaattacttcaagagaaccctaaacggctaaacataatcgataaaatttatttattcttgatcgttctcgccatcatgatttcatccttcgcacatgaaattgagcacaatcctgtacctgaagatgttggcataatcaatatcagtgttgctacgaccaaaatatatcaaagtatcatcagtaattatgatctctatgatgaactaacatcagaattctcttgtatcccggtttctttacgcgactgtgttgctgtagagcttactgaattcttgacgggatcaggaaaaatcactcccatcgatgcttaccatgtgttactagagttgtttcgattcgtcgatgaaataacttcctctgatgattatactccaggttgtgctttaagagtgttgatgactcttacaatcgctattcctcctgaacatattgaagaagacgttctaggtttagaggatgagcaagacgtttacggagaagcatcttcatctcagtttgaagaagttgttccattctacgggttgccatacttcagggatgactacaatgattactttccttacgaagaagcatcttcatctcagcttggagaagttgttctattccacgggttgccacacttaagggatgagcaccatgctagctttggcttcgatcatcaaattgaagaagcgtctcattctcagattgaagaagtttttcaagtttcgttcaatgagaccaacactgtcaggttaaaacctgcgagcaagctcactgtcggggctttgaataggaaaacatacaagaaagctagtggtgttgtatgtgagaatgacgtgtgcactatttgtttggaagagtttgacgatggaagaagtattgtgactttaccgtgtgggcacgagtttgacgaggagtgtgttttagagtggtttgtgagaagtcatgtatgtccattgtgtcgtctcgagttgccatgtgaaagataagggtgaagaagacgaaaaggtcaccaaattttgtttaaagctttacgatttccaaaatcatagtttagttttctgcaaactcttttctattgttcttgctcttgattcagtttatagtattggactctcattcaagaattataatcaggttgatactaaatttttattaaatgatttcacgattttacagatttttgttaatctgtaaacattttgctctcgattggatacatctcaaatggtgagaaccacgtgagggctctaaccattttttaagtttaaattttgcttttatcaaacttgagaacttgaattgatgtcatgaagttttgtcttctccaatggtggggttcttaaacaaatttaaattttgtaaaacaatgcatatatgtttgcttttactcagtacaaaacattgaaaatgtacaatcaatcaagagagtactagagacattacaaccaatgaacaacattgcacagagataggctattaaagtcgttgcacaagcttgaagttacttacaaggggaacactgattcgacgcccactccagctggctctcctccacactttctattggagaatcatgttcatcaccttcttcagccttcttctacatactcttctcttaatctcaacaagtccttcatataacaaaaaggcacttgttaaaatgcatatgcagaacatagtaaggaacacattatccaactagctccaactcttggctttctgctttcaacagccagtgaaagagaaacacattgcagttatcaaagtcttaaatgcaatttgtctctgtaggatacagtccacaaagaagcagaggacacaactccgggacagacattctctagctcaggacacaactccaaactgtaacattagcaaatctgaggacagatcaaacacatgacttttgcatatccgtaaatgattcacaaagtatgctaataacatcaaatctgaggatcagtatctgaattctctgctctgttatattatcaaacatgagtatttgatttgataactatttcataccttgaattcataagtcaaaccagcttgttgaagaaaaggaagagctgcttgaccagcttcgaatagtacagccttttcatcaatgccatgagaccacaagactggtgtctgcatatgcaaaatatggagaatcagagacccgaaatgattctgcttattgactgcaaacaaatacgaaatttaaagattgactaacatgttccatagcagcctgagcggcgagactgagcttgaacggcgagagaagtgatatggccgtggcactcattgctctcttcaacgattactctccgactcggagtcgtaaatctccgagtaggttaacctcggttcgcacgatggagcggctgtggagacagaaatctccggtttgatagccatcgccagagagagagagagtcgagagatagacacagcgtttttttcttctttcgtcaataatattcagccaatcacgacatgacacgtcatcacttttctctggttgcaacccacgtcaatgcttttttatttaattttattctacccagagtttttctttcccaatccaatattgtgattaaaaaaaaagaaaggcaaatcagatttatgtattttaaaaatgaaaaataaataagataataacaaaaaaaaatggaatctttccaaaagaaaatcttctcatttaaatttcttccatcaaaattctcatttaatttgatttattgggatcattggagaatgttagtggaagaaacgtttacagagatcagagaaatgagtctatattaataaagcaagagcaaaaatgtgcctattcataaaaccttccaaatagtatagaaattgaagtattagacactaaggacaaaatagtctttttagataccactggtgttacttacttcttttgtcagattatgatgttaaaaatttaataactttattgtacttatttcttttgtcagattatgatgttaaaaatttaataactttttccacaatggttacttttgcaaaagaccctataataaataatatgattccaaatcccaccaatataacaaacgtagtagaatcctctacaaataacgtctgtgacaacaacataaacacacaagaaccattttagaagtttgagttcttacttcttcttttttcatcatcatcttcattcttcaatcaatcatgaaaatatattttagccacagtatcatacgcaatcctcaaccagaaaacgagggcacaatcacagtaaatgcaaagatcgacggttacaatcccacgtttactggttcatcttttgccgaacaattccttgacgaagataacgatgagtgtcgatgcaaagaatacttcaattacttcttaatggaatcaggaatcggcgacgacgataccatatttgcactaataaagttcaggaatcggcgacgacgataccatatttgcactaataatgctaagtgaatatgctattgcagtatgtgatcgtagtaactattctacgggagatgagttgctagtgtccttgcgtcttattcctacctttcagattggagacgcgattccaattggagaagagtatcagatggaagaagcggttcgagcctcgttggaggagaccaataatattagtttgaggcccgcaagcaagctcgtggtcaagtctttagccaggaagatatacaagatgaccactagttctactggtgaaatgtgcataatttgtttggaagagtttagtgaaggaagaagagttgttactttaccttgtggacatgactttgacgatgagtgtgtcctaaagtggtttgagaccaatcacagttgccccctctgtcgtttcaagttgccatatcaatgaactagtttgatgccgtcgcatgagtctttttccgttttgtatccgtgtattttccgatgtaacctcgttcctaacgctctttgttaacaatatcgggtcaaaccttctttgtaatgcttttttaaagttaattaatataattaattaaattttagaaaaaataaattagtttagcaacaaaatctgtagattggatttaggtcaattattctaattttcggattttctatactattactttccttttttcttaaattttggaaaactacaacatattcgtttctcattttgtattgcgtatttaccgatgtaaccttgttcgtaacgctcttaaggattttttggtcaaaaacccaaaaatgggtcaaatgagttaggaatacctttataaattgattaatataattaattaactttttctaattaactattttggcatactaatcggaagtctcataatgttgcaagcagaatcgtccgtcttaggtaagaataagatcgttcatcgtaggtatgatccaccataaagaatcgttaggtaggagatcactatgttagagagagagttgcacatcgtggagttgtttgtggattcgtacatcataatcgcatgagttgcgtatagttaaatctgatagtttgatcataatgtgtaatttaagattagattaaaaaaaatctatgtacatatttaaaaacaaaaacaaaaagactgtaaattggatttagggtttgtcacaaaagtagaaattattaaccacaaccaaatcttacatgggctatacataaagccccagaaacattaaaggcccaaaaagagctcaatatatcaccgcttgttgttgaagaaattttcgtcggactccatcttagccacatgtcaataaccgtttgagcgtcgattctggtgaaaaaatcatcaccgagatgaatcgatcaatggttcatgtgtttaccaccatcacgatggaggaatctttgttagacagtatcatataaactcttttttaatcttaaaattcaattcttttggctcaaacaatattttggccaacacctataaaaacattaacatattgatatatttatcattcttgtaacgtcgtaatatatggtagacatgactttgacgatgaatgtgtcctaaactggtttgagaccaatcacgattgtcccctgtgtcgtttcaagttgccatgtgaagatcaatgaactagtgcgtggtgttgtcgccggggtctttttccgttttgtatttgccgatgcaaaacacctttttccggttttgtcaacaattgtatgtgtcaaacaagcgtagtaacgccgttagttagtataattatttaattaaaagttaaatcagatttctagtatttaaaaatggaaaataataaatatgttgccgaccccatcaaaaaaataaaatgcatgcagaatcctctataaataacgttgtgacaacaacataaacgccagacacaaattccatcaacattttgatttcttattttatttttcatcatcttcttttttcttcaatcaatcatgagaatagatttctaccacaatatcatacgcaatcatcaaccagaaaacgctggcacactctcagtgaatgcaaatatcgacggttacgactacacatttactgatacatcgtttatcgaagaattcctcaacgaagaaaacaatcagtttcccaccaaacaaaaattacattatttcttggaggattcagagctaattaacgattacgatatggaatggggtactgcgatatttgagctaattttctatgttgttgcagtaactaatcccgcaagaggtgactattctccgggggatgatttgcttgtgtccttgcttatttttcctaatgatgaaccgatcgaagaagagtatgagattgaagaagaggatttgagtgaagaagaggatcaaattgaagaagcggttcgagcctccttggaggagaccaataatatcagtttgagacccgcaaacaagctcgtggtcaattctttagccaggaaaatatacaagaagaccactagttctactgaaaggtgcacaatttgtttggaagagtttaacgatggaacaaaagttatgactttaccttgcggacatgaatttgacgatgagtgtgtcctaacgtggtttgagactaatcatgactgtccactgtgtcgtttcaagttgccatgtgaagatcaatgaactagtttgatgctgtcgccggagtctttttccgttttatacccgtgtattttccgatgtaacctcattcgtaaagctctttgttaacaattttaaattaaatatcgggtcaaaccttctttgtaatgcctttttaaaattagttaatataattaattaaattttagaaaaaatgaaatagtttagaaacaaaatctgtagattgaatttagggataattattctaattttcgtattttctatagtattcttttccttttctcttaaattttggaaaactacaaatatattcttttccagtcttgtattgcatatttgccgatgtattctcattcgtaacgctcttttaagatttttttttttgtcaacaatccaaaacatggatcaaatgagctaataacgtcattttgggttggttaatataattaattaactttttcaataaactagtttggcatactaatcaaaagtcccagaatgctgcaagcagaaccgttcgttttagtcttccctatagagataagattgtccatcgtaggtaaaacatatataagtaagaatcgttaggtaagagatgacaatgttacggagagagttgcacatcgtggagttgttcatgggttcgttcatcacaatcgcataaattgcgtataattaaatctgatagtttctggagtttacatgctcttgtttcgggcctggaggattaagagcttcggcccagaatctcttgatattcaaaaaaaaaaaatgtcgattaatttaattattatgtgtaaattaggattagattaaaaaaaattatgtacatactaaaaaaaaaaaaaaaaaaaggacagtagattggatttagggtttgtcacaagaatagatattattaagttattaaccataaccaaatcttacatgggctatacataaagccccagaaacattaaaggctcaaaaagagcccaatatatcaccgcttgttgttatagaaatttttgttggactccatcctagccacatgtcaataaccgttcgagcgtcgattctggtgaaaaaatcatcaccgagatcaatctatcaatggttcatgtgtttatcaccgtcacaatggaggcacctttgttatacagtattatataaattcctttttttaatcttaaaattcaatccatttggtctcaaacaatatattggccaacacctataaaaacattaatatattgatatacttatcattcttgttaaaggtaatatacggttcctagacaacatctcttatacacaaatgcctaaaactcccctgagtatatgacacaagctcacacatacaaaaacatgtacacacactctctcgctgtctacatatatatatttatcttagacattgtaggcaatggctcaaactagtccttggtcagacataagtccagtcatcatacatacatgagccatgtcttgagttagttcggttgctgcaatcaccaaagatacagagacatattcagtttggtgtatcatctacctagatagttccaatggaggtgtgaacacacaaacctggttgtaagaagtctgaccaaacattgaatctggaacccaattttgatgatggtggtgatgatgatgatgatgatcattgacaaacatggactgatcatgaggaatctgaaagcagccaccattattattagccatgggatcatacattgaaggatcttgttgttgttgttgttgttgttgctgttgctgttgttgcaagttgttcaattccatttcagattttatctttttctcttgatcttcttccattcccaaagtagtaccaaacggtgtaggatatgaatattcctctccaagttgttgtaaccccaaacaaccgtttccttgttgttctaactgctcaaactgttgtcccgggttgctgcatatctgatcttctggtttcgtagactcaaagaagcagcttgagtaaacgggaatcgaaccatccatctctctgtttgaaaccagtacttgagtgagcatttttataatgaaaaggtttttgaaactgtgactttattatactcttacctatggggaagaaaactggaatcaccaggtaagattgtttgctggtgatcattatcaggaagccaagacatggagtgagcttcttgcatactactattacctcccatcgccataggcaactgtatcccgctgtgaaactgcagtaaaaggctttggcctggttaagaatatgtcctgaggagagacaaagagaaagagaggggaaaggcgacaaaatggttataacctgtgttgttgcacattctattggcaagagttggttctttctgtaatgttcctgcaaaatgaatggaaacatcttttgtaaacaaaatttatatgggttcaggaaactgaaatgaatcctgagtcttaggtctgtatgatcgagaaaaagaaaatatgataacgcaccttgtgaatctggattctttcaatggatttcctcaatgattcttccaataaatcgaggtgctcagtgttttctattctatcgatgttcgtccaacaactgaaaacagccattagaagaaaaagactcaaatatgattgaaactatatttcaaaaagcaaaaactttataactcaagatactataaattttcacacctcaacctcctatgacactccattagctgagcttggtaaatggctacttggttacttagaccctgtcgtgtggtaatgttaacacagactttagcaatttgactcaaagagattaaaaagtatccaagaaaattcatgaaccgaagatggtcgatccatacctcaatagtttgattcctgcaggataaagaagacaacatctcagatatgtgagaggcttacaatgacaaaatatggttattaatagtaagaactcacggcaagtaccttgctcctaaaaagtcatgtatatttacatcatgatccagtttcttaaaagttttcttcaatgcctgcaattgagcaaaacaaatcagctcaaatttgtgtttcaaaaaaaaacaaaagttgatgatatacacagtgagtttttatgtctttacttcaaggctctccagtttcctgtaatattaaaagaaagagacttcaatttaggttcataacacaaaattacatcaggattgatagtaatttaaattttcaacataatgcttaccatacctttttgtcctttcttgtggagttaattgcgcaaacttggaaataacctcttcaatgcaactacacaaaagccaagttaagactaaaatcagtatattgctaaaaacttgaatacagaacctcaatctctcatccctctgagagattcaggaagccaaatcactcacgaagaacattatctaagaactgataacagaaaggaaactataaaaaaaaaactaggctctgttttagagtctctaatctctcccaaagccaaaagctcccaactaaaccaactggtcaaaataccccttatctgtgatcttctaaatacactcaccattcaaactaaatccttataaaaactttcagttcctaaaccaaaatcagtgaaaccttttttgtgatagaagagcaatgagaagattacacaatgcatcaaaaatggagatatgatgcatttaaacacagaactaaagatgataaaagaacaacaaaacataagaatgattttgataattatacctgtgttctccatggaaagcagtagctcttccggtaggggaaaacataagaaggacaatatcaatatcacacaaaatcgataactctttggctttcttcaaaatcccattttttctcttcgtgtatgtaacttgcctgttgcttgtgctctcaagtcttttaatcttcaacttaacccttcccatcccctgttcaaaaccaatacagcatcaaaatcccataaccaacaatgaaaatattctaaagactaaacattttcttcgaatactcacttcaatcacctgataaaattctacttattggaaggaattgattgtatatttctccctattgagaaaatgatgaaacttgttttaaaagaagaagaagagcaccaatctttgaagatgggggacgtctaaattcggacacagagtctatctctagacaacaaaattcactgtaacggaagatgttttttttttaaaaaggggtctttcgcagcagaaacagaggaaacaaaaatgggtgtttgcgtcgaaacaagagaagaattcatgaaaatgagcacagaggaggcgaaagtcacaaagaagagaaagatcatggaggaggaaagaaagaaaaaaaggcaccaaaaagatttgtcccgaggaagaagaaggaggaagaaaagtttgaataagagaaaaaggggaaagattaatggtggaacagagagaaagctcacagaagcagacgaagggacaaccttttatttcgctgggaaacttaagacgtcgaccaacggaattgtgtgcttctgtgctagagagagacaaaggtttaaccaaaccggttttgttaattcaattgccttaaaaaccgacaaaaccaaaccgttttttgttaattgattaacatgtgtattcgttgggccaaagtagaaagcccattaatatctttgacttgtctctgccctaattagctccgcctctcttcttaaatacgtctatttatcacttcttgataaaccctagaattgacccatgttaatgttttgagatttgatctttttgcaagttttttggttgtttttgttatgtatattttgattttgatgcctgtgatggtgttaaatatactttgagagatgcgtctctacgaaaaaaaaatcaactctgaggcattttttctctctctttacacatctggtttctcttattttactgtgatctttgagcttattaatgatttggttttggtagctcttctagcttctgatttgatttggttgcctgatttatgcaagtgatgatgaaaagacagggacatcagaatctccttgttaggagatgagaatgatgactaatgtctagatgggaatctctctgatgcatatctcacagactgtttatcaactttgatctagtattttctgttttgcttcgttttgatactcttttggtgtcttttgactagtgcaagtgacgatgaatagacagggacatcagaagttctataatgatgactaatgtctagatgggaatctctctgatgcacataactaagaatcctttgctcattatttaacatttttttgcttgggtatttagttggttttgccaatgatgtgcctaaacaattgcacgtattatcagatttttcagtgatgaatatcacttatgtctgaggcaaaccgtgaatactgtctacaacaaatgtttgttctgttctaatccctaatcatttatttggatttcatttgagctctatttgcaggaagaatcacttgcaagaaataaagtaggacgtcacaaacatgaagctggactcaagccagcagaagattgtgaagattagatgagaaatttaaggttatgtctagattttgtatgtgcttcatttgaattgtaaaacagaccctttagttgaacctcttctctaaataaagattcatttgtttcttgaatgtaatctttcaaattcaatgaagtatttgatacaactgttcattgaaaaaataacttcaatctaagcaagtagctacacaaagaagaacagaatcactatcagcatcacaaagagaagatgacacttctacactctttgagtttcttttttacaagtgatcaaaaaggataaatagagaaaaacaaaaacaaaacaaaaaatccaaacatgaatcattcatcatattcagacaaacatgtgcaagatcaaagagaatcaagactctcagttctgcttctcacaatccgatggaaaacttctcttactttcctctcaaacggatccaaaccatttctcaaagcttcacgaacttgaacaagctcatcaactctctgtttcacctcaacttccttgtcatcattcaacgggaaatgaatcgaatcgatcaattcattcatcaacctcgaactcttctcaatcctatcaatctccttaagcaaaccacaacaattcttcctatctcttctcttagattcctcaacaatcttatcgtgcaacgacataaccggagctgcccattggaaatgcctaggcacaaagaagttaacttgcaatccacggtcttgacaaggaatcgcagctaccaaaacccacatcacaaaaagcaaaaccgaagtcattgtgtaaaccggtacagctaaaccattgctagcaacgacatcgtttggtcgaggcgttgccaagttactcgctaaagcttgtaactgcttagaagctgaccatgatcttgaaacactccaagaaagagatctgaaatgaccaatcgaacggtggtgactgtctttgactcttccgaatgaacggttacgatgagctagattggttccagaaggatgatctttctcgtcaagcattccgattgctaaatcaatcagagctttcttagctcgccggagctgaccttctccgatcggacggtgactatctaaagcagagatcacaatatcggcaagtttctcccattgacggatctgttcgataccgtcgcggatggcgttacagacatctagagctttgatgctccgttcgaagtaatctgaaatcaaacggtccatcggagatttagagatctgagatcggtggttgaatacgatagctcgaaactcttcttgacaacagaggaaagaatcaagaagctttccgatccattcgagagagagaaggtcgtttgaagaagcgttgagatcgatgaatttctcagcgacttgtctttgaaacgaatctagctcaacctccatggtgcttggctcgtggtggctactacttccggagacgactgttgatgagtcaacttggtctcgccgtaaacttagcaacgaccttccaaatgatccttgaaaatccgtagctggcatcctcaaaacagatgcaaagtgggaaaaacaatcagatttttgtttctgtagaaaattctcagacttgtaaaaaaagaagaagactttttttttctttgttggattgagagagagtgatgatgatgattgatgaaagctagaagaagaagagatgtgtttataaagcgagaattttgaccgcgtattttaatatctgctttagaaacattcaatattggataattttctcattttccttaactaaataaaaagaaaggtgtgacgaaataaaagctataatttgatttgttgtgtgttctcattccttttttattttctctttttgttactcggtacagtacacgcagtggacacgtctagtggtaataaaataaaagtacacagatctgtctgtaataaaatctcagtttgaggaaattcattggtcacggggctgtggtatatgaagtcgagaatgagacattaatgggtgccacgtggagaaaatgggagctgtgacagagacttggtcaatgcaatgcacatgtggataaaaagccagctaagtcttcgttggcgtgtattgaagagagagattggtaagtaaagggactcggtcctggttgattctttctcgtcgttctagaatgctcaaggacacaaaaatgttgacatgtaattttgtctatatcctttttttttttggtttaatgttaaactttacaccaaataaaaaaaaaggtgtacattgtacaatgaaaatctcaaaaacacaccaaaaaaggctaatataacattttattaaaagagataactatgagttgtatcacaactaatgaggtgaattgatagaaccaaagtaaaactcaaggagagaaatgctgatagtgatatcctccagcgagaaggagatgagacgactgcgtatagtgcgtaacaagagactcagtagcatggatggtactagattcatttgagaaaatcgttttattacgctcattattaatcagatagatcgaggtttgaagaaggagtttcaagatcttacttacaaaatgtggaggtgtggattgaacattcaagatccacaaggaggctgacggaaacgagattgtctatataatcgtatgatagtataaattttgtgttgaaatgtgtaatggtgttttttggtaaccgaaaattgaaatgtattattatgaaactgtataatgaaaaaaaataattataatggaatatggtaaatatgtgtcattaacaagtcatcaatcatgtttgggccagaattaaaattgtacaactataagaattaattgacacacgacaaaatacactacatgcagtgatgcagatcttttttttgtttaaataaaaatgttacatcatatctcctgtcatgtgttcctaacacacacacaaaaaaaagaaatatctgaaaattaaacttaaatttgaaaagaaaacaaaaacaataaaccacacgtgtggtttacaattacaagctcgaagaggctttgaaacatggaagcacgaaggttactgacaaagacatgacaagctctccttcttcacctctgctaacttattttttgtttttaaagattgattagttttggtttttgtcaggtagaatcgtgcagaagcgtatttcccgctaattgttcctcatcagactcactttccagtctatacgaccaattaatttagccccaattgactaaattttttatacttaaaaataataaatattcactctgaccaacttgcgaccgaagaaatcaagaaaagcaaattaagatagtttaccaaacataattatttatatttttaagacatcggatgtcgtcaacaataaatttctgaaggagacaattgctcctaacatgatcgttcaatgattcagaacacaagacaacaaagaagtacataacatatattatatatatggaagctagagagtatatataatgttgcatgactgatataagaaaatatataatgtgtatgtaaagtggtttatgattcacaagttagttttctacttagtaacagcttcttcaagctctcttaagccaccaaccttctgttcaatttcttcgataagttcttcacgccatagctccgctcttgctttctcttctatgtcttcttgctgcatcatataacccaaaacacaataacaactctatccaatcttataatagttgtacacattgtgaatctgtgatgatataccaaaggtcaatggcccgagcaagcccagcccgacccaacttaggatcaatgttacctaccatcagatctgttaacgtttgaattattatatcaagcccaacccggctcaaacttactaagcatgattgatctatcaataggatggatcaatgttacctaccatctatcagattgtgactttcgtttagatgatcaaggttgtggattcatatttttgggtgcatatataccaacggtaaacgctaacctaaaagcacctatttttctttgtttagggaggtttatcgcatgctgagacacatggaggagtactcaaaaccggctctgaacaggtctacatggcctactaagaccaaggtgggatagtctgaggtcaaactagatctgaactggtccacagggtctagtaagaccacagcgggttggtcggtccattgcaacatccctagttataatttgtatgcatttctaagtttttttctttctttcctaatagtattagaaagggagagatacatacagtttcatagacccaatatccagttccatcccctccatctccacggtactcctctgagtcgtagaatggatcctgtattgatccaatatcacaaagtactattaagatcccaatgcagcaaatgtatcaaaagattcagtttgagttgttgttttcatacttttgctgaaccgaagtacaaacatccccaacaagtgaacatgatgtagaacatatctgccatatcaagatcaatatcaaaacataagaaaaagaagaaaaaaaagtctaagaaagaaaataaaatctctcaagaaaccccaagtgtttaacttacaaacattcttgatagctttatcacttagatgccacacgtgtttctctgtaatgatatcacgcattccttctatttgttgaaccatcacagccattaatggcaaatcatgtggcaatgcctttcttacacataagcttcctctcatcaaattcctttccctcttctcattaacattcttctaatttttcaaattctaagacgtaaattcacaagaatatggagattttttttctaattttagtcttagttagagaaaattacttacagatagccaatatccatgattcggtcctgaattctgcttcggctacaacacaatacacaattcttaaactttttttcgtaatgaaatatttttggtaagaatataaaataatatgtaccgagtgattgtaggaagaaggaatatgaagatttgtgaaggtgaaacttgtgaaagcttcagccattgttacttcttgatggtggcaatggagaagaaaaaaaaaaaatgttggtgtaatcttttttattttttcatttattttaatctttaagattagattttttgaggcagaaaatgtgtggataagggaattggtatcgtccactcttcacttttgtgataaacaaaataaaaaaataacgtacgttagcaatcacatcgcataacactttttttgtcttttaaaagcccaatttagacaatcacagtacacattttagccttctaaaacgctcaggttgggaacaactatttgccttaaagagtggtaaagatatttccagcaaaattcaactacaaactttcgtattttacccgtccaacaaactttccattcgcgcaggttagcaatcactaaacacgttcactcctctagacgtgcaagttagtaaccacactaaaattgctaataaatctttggttggtgaaattcaaactttccgcttatgtctcttcccaaatacatcatttgttgaatagcgtacgttggcaactattgccaaacttttaatgatatttccatctaattcaacttcctatgcgcgcatgttagcaatcatcccaaatacatcattcgttgaatagtgtatgttctatttgccaaactttcaatgatgtatatccatctaaaccagcttttattcgcgcatgttagcaatcacaataacacgtctactcttcttagcgactagtattttgtcaaaagtcggaagaaaatctccggccaagtcaacttctatcgctttaaaaagcgcatgttagctattaaaaagcgcacgttagcatcattttcgggaaattgctaatcaaactttccactttcgtcttcttcccgtgtatatctttaatctcctctgtttggtgactattatccaatttccaccgatcttctcctcataaaaacacctcttcctcaacgaattttttatccatgagtcgcataatgggattgttcgatctcgagaaacacttcgccttctacggtgcttaccatagcaatccgatcaacattctaatccacatcatcttcgtttggccaatcttcttctcagttttacttctcctccactcgtcgaccccaattttcgacccctctcaattagggttttctcaatcgttgaccctcgacggcgttttgcgatttaacgttgggtttatattcgccttgatttatgctctgttctatatcggtttggataagaaatctggatttgtagctgctcttatgtgtttctcttgctgggttggttccagttttcttgctgttcgactaggatcttctcttgccttaaaggttagattttttttctctaatttcaatttagggtttttgaaaaaacttcatttttggagaaaataattgcgtagaagcatgtttatgagggtatatgactatgtgtatccatgtgttgctctatgtgtatatttatatgatgtgagtgtggttcatgcatttattgttcattgttttctatgctttgacttgaaagttcgtttatatcattggttatgctcggggaagaagaaatagatttatttatatcattagtcctctctatctgttgtctatgggtcccttcattagctgttaacgttgagacagcagtactaatatcatgtctctagctttgaacattcatgattagtagttattgcagtttgttctgcaattgtccacctttgcacggttctgattctttggtccggagacttgtcatgtttttagtgttgttgactcattggttaagaggatttgatgtgtgcttggacggaaacaagtgttgttcttgaccaccaacatttggatggtctcagataattagaatctacatcacttgtttaactaaagtttggtttttcttccatagtatttgagacatctgtaacttaggagcttttttatgtatcttctgtgttgtgaatcatttgattagtttatatgtatcttcagtctgaatcatttgattagtttgttatatgtattcaacagcaaggggaaaacagttaatactcaccaagacgccaactctctctgttatgtagatactgtaacaatttaattgtctttttactcaggttgggttagcatctcagctgttatgttggaccgggcagttcgttggccatggagtattcgaggtaagttctctggcttttagaaatcattgttttgattctcctttgtgtcttgtcatccgtatacatgagtcctaacacatatgttattgattcttgtctactcacagaaacgggcacctgcgctgttagacaatttactccaagcttttctcatggctcctttcttcgtgttgctcgaggtaaaagttgttggtgttatgttatgttgtgatttgtttgttatctcctgctaccttattatactgctctgtggaaactgtaaccagaatacatgaaaagctaatgtggaaatgtttgaatgaatacaggttcttcaatcggttttcgggtatgaaccatatcccggttttcaagcgcgtgtgaatgccaaggtagaaagtgacatcaaggaatatagggcaaagaagcagaagaagaataagatcacataagcttggattatatataactgaagaacttgaacccattgtcgtgtttctataaccgaaatgataataagaccaccatgatccatggattgatgtatttgtgtgtaaactatgtttcaatatattgaatataatatgtttcagtcactcatgtttcaagaaaaataaacaaaatgcgttgcatgtattacaatcacatattcacaggtcaattgttgttccgctcgacttgttttagtccgttttgaaccaatcaattctttgtgtttaactaatgagtaaaactggtagcttaaatataaacttttatgattctttatgtaatcataaaaacactaatacagtatcacctaaattaaattcatattgattaaatatgtagcttagtgttttatttatactagctagctactaatatcagtgtatcataataattagtatataaattatatataaaaaaatccgcttgaggcacctaaaatgtttggattctaaagataaacatcttctagattggaattcggaggtgggagggaatccaactttctttattgttgatactctaatcaatttattaatagtatcaatcttgaaaaaatccttagaaattagaataataatgcagcgttgaaaaaaagaaagaagaatacatgaatgttgaaagacagaataatagtaatgaagtgactaaatatctagtttccaaaaaaaaaaaaaaaaaaaaaaaaaagtgactaaatatctatcacgtgactaatatgtaaacgcaaagcgataccgaaacgcgttttccatgtgcccatactccataagaccataacgatatcgtcttaaatgttggttgtaacgacattattttaacattctacttggccacgatgtcacataactcatggtgatgtggatatttctcgatttataccgcattttttcttgcaccatatttattatatgcattgactgtctataagcggtcgtgttagtattttcgtatcattaagaaaaaagagaattattatgttaaatgttgttaatatgaaatccaccgttacattggatttgaaacgttttttgttttctttgtaagaatagctagaatgtgttctgggtaacatatgttgctacgtgctcgaaaacatcggaatctaatgcttatcgattttgtctttacaatgtgaaactttataactaaagcataacttttaaggtttttttttttgagttttctcttgtcttttcgtgtctcatcaagccaatgtaacttgaagaattagtaatggttctaccagtaatcctacattacttatttttatttttgtattcccttgattttgtttcacaaattaatcattattgcaaacaataggttaatctgttcataacaaagagtaccataggatattatcaaagttgacaaaaaaaaagaagatattatcaaaataatttgaaaaaacaaaaacatcaacttcgtacattgaatatataacgttgcatgataaaatccaaagcagcgtggaccagaaccaaaagaaaagtactgcaattatcacaatagttttgtcttcttctctttttttttctgcttaactgatcttcctaattaaaaatttaatatacagtatatacttgattgtcaacagacaacatatgattttcttcacgatcaccaaatttatatatgaacacaacctttcatttattttaaaatggtcctcttgaatgagtgaaagtaagaggctagtgtataaaacaatcacaaaaattactgaaatgaaacaaaacactagtgactagccctcaccgatcgcggccgatgtcgatccttcataaattcttctaaaatattattgatttctttaccttgtttatataattcaacatatttataatggaatttatgcagtataattttgatggttaaaattacacctaacatgcatgaatattcacataatatcacaaaaactgttaagaaaaaagcgaattacagaattacatagttgtagttaggggtgttaaaatgggtaactcaactcaactcaagtcataatcaaatgagtttaaggttaaatgagttatgggttaacccaactcattttgttaaatgggttgagtcaactcataactcatttaatttgatgggttgagttgttaaataggttaacccatttaaataataatttaattaattattattataaaacaataataaataattatcattattaatttattatcatcaaacttagaatatttacggattccactttttacgggtttacgtttttggtggaaaaatcacgggtttacgtttttggcgaaaaattataggtttacggttttgacgggaaaattacggatttacgtttctagcgggaaaatgacgggtttacgtttttggcgggaaaatcttgggtttacgtttttggcgggaaaatcacggatttacgtttttggcgagaaaatcacgggtttatgtttttggcgggaaaatcacgggtttacgtttttgacgggaaaatcacgggttttcgttttttggtgggaaaattacgagtttacgtttttggcgggaaaattacggatttacgtttttggcgggaaaatcacgggtttatgtttttggcgggaaattcacgggtttacgtttttgacgggaaaatcacgggtttacgtttttggtgggaaaatcacggatttatgtttttggcgggaaaatcacgggtttacgtttttgacgggaaaatcacgggttttcgttttttggtgggaaaattacgagtttacgtttttggcgggaaaattacggatttacgtttttggcgggaaaatcacgggtttatgtttttggcgggaaattcacgggtttacgtttttgacgggaaaatcacgagtttacgtttttggtgggaaaatcacgggtttacgtttttggcggaaaaatcacgagtttatattttttggtggaaaaatcacgggtttatgttttttggtggaaaatttacgagtttactttttctcaatttcatcgcttgtatgtttaagaaatttggaaaaatattaattttattaaattggtttagatgtgttagttaaacttaaattggcattggtttagagattttagttggtttaattcaattttacaaaacttgatgggttaattgggtaaaccattgaaaccattaaccattacaacctaacttattttattcatcaaaccaattgactcatcaaatcatttgactcatcaactcatttgagtcaaaattttcaactcattacggtttatgggttgagttgaattgagttgaccaatgaattttgacccattttgatacccctaattgtagtatagcattataaactatggcgaatataaaactcaggatacatgttatagtagtatatcacacaatatcagtaagattataaatacatgcatattcacacaattaaaagtatatatatatatatatatattaaaaataaaatcaaaagaagtctagactaatatattaataacaacttacgcttttttacaaattttcatttagttttgagttgaaagcatatgctcacactaaatcattgaaaggaaaaaattattttgaaaaaacattatgataaagttgatgttgttgttagcctatagagagcttaaattcttacttttttatatcgtcaccttgattgcattgactagttgagaagagatgtcacatgtggagcagcatgatgggtcagaaatgtagacaataaaaatttctgaatcaaagtgtcattttgttctttaccaaatatcagttctctatttttaaaaatattattaaaaaaacaaaattatcccaaacatgaagaaaagtagaggagtcaattttgttttagtggaccttcaattttctgtgtttggtaatatatttttttgtcatttccttttttttttttttacgtaaaaagaaacacagagatgacaataaattggacatcaaaaaggaaaacaattgagacaaacacataaaatgaacacaaacttttaaaattgaaactcattgattggtagtttggtaccaattgataccaaaagattttgttatacccatcaaaaacaaaatttcatgagattaaatcaatgttaatatttataattgcgtgggcttaaacatagttatggttttgattgtatagaacgaaattgtaccaattgatctaaagttaacctcaactcggcttgaatttaaatacattttagaaattcattcggttctggctaaatacccaagtttcatgttcggaaaaagaaaataaacacagaaatgtaaataagtcaggatgataggcaaatacctgcagcattaattttgtacagacgtgtccaagtttcatgttcagacgtgtccctaatgacgacatactgtctatttttcacactttcaatcacgtgcaccattaatgagtccttgattcgtagtgatgattacgttgataaaatccaaaaagctttcaaagaaatgtttaacactttacttaaaaaattaaaagtaacagattttttttttaacatttttttttcaatagatcatatacatatttaaatattccataagcattttaaatgtttatctatcttctataatcgtgatcttgcattaaaaatagacttatttttattaggacatacaactgtaataagaattttcaatgaaatattggaaaatatttttatttttattaaatattttggcgtaaaaatatttttattttgattaaatatttcccagtattttattgaaaattcttattacaattgtatgtcctaactgaaccccacatgttaaacgacgatctctctcttttttaattttttttcctttgaaaaaaaaaaagctatacgacgacttgctctttagggaaccattttctctttgtcaaaaaatggtccacgttaatattcattgttgcaacttgcaactttaaaacatatcttagcatatgctaacaacatgcatgcactcacacagtcacactatattaagtcaaaagagatgatcaagtatgtgactactctcgtacatgacagcgtcgtacgaagtcatctcgtacatatccattgcatcaatctccattaaacgcctaacttcctcctcgccccaaatctgaatatcttctccttcactaccgtcaatcttctgacccatcattgaatctctttcttcttcttcttcttctttttcttcttcctcttttgcttgatcactgctttcgattattgaattcgacaagatgtacttgatcctatcgagactatgttgtctagatgagatacctgcggcgagtttgttaagaagacgagacgagccggaggaaggagagctttccgtcgtcgacggggacgtcgtggtggaagagttaccacaatctgcgttagtggtattgacggtgaggtgtttgatgatgggctcgtgggtcatagggtcgattccctttctcgaaagtcttttcttgagacaagagttccaatggttcttgatatcattgtctgttcgattctgcatcttcttcgccatggctgcccacctttattttttcaagaataacaagatttagtatgtcctttatcaaaaaaaaaaaaaaaaaagataaattaatattgtttccgaagatcccaaataaaaaaattcaaattaatctccaaactttgtggaaagatcacttaacatataaattaacgtcagagtggttaatcattactgaagtatatatgtggactctctaccaaagtatataatgttacatatatataacttgataattaacctgtttccgagaacagcatgaagttggatgatttcttcttcttcttgaggagtgaatttgcctcttctaatcccaggctttagatagttaagccaccttaatctgcagctctttccacatctctgcaaacctgtttttcataataaattattcgaagaaataattgtgcttttgtagtggcaaacaaaagaatctgccaagaattaaactttttattaacactggaggatttgaaagcaaggaagttgtaaaagcttcaacttttcgagattgggtcttaaaaaaacaaggaattttccaaccactatgtatatggacaaagcacagggaacacctgtcgctcttgagcaccgttaaaagatggaaatcattttttatagtatcatatggatataattggtatgagtttctttttttgtgaaagaattggtatgagtttctactaaatagaaataagcatctacaaaaattataatcaatcatggactaaaaagtattataaaacatgggtgtatgtgtaagtacgtactttcaatattcattcttgatttggttgcaaaaatcattataagaaaaaaaaatcatcagtgattttgaattcaaagaacatggattatactattcacttcagcatgtagaagagaatctctacatatgtaacaaatttccaatcccgaaaatttcggtgtgtatattaatatacccacttatgatttaactcatagtcctctaataatacaaatgagaactttcagcaacaaataggggaaagaaagtacaaagaaagtatcttcaatattgtcttaatcattttaaaacattttaaagatatatatacgaaccaaaaacaatgttaaatattctatatacttaacacatgctttttagatgttcttaatccaactatgttgctacatacctacgtgcaatatattaataggcagcaattcgaatttatactttctgtaaactcgttgttcccaaattagtttattaagaaaacaaaaaaaaaagtgagaagaagaaaatatgttgtaacacagttttgcaaaaacacaacatatagatgcatacacttctctatatgtttatggaatataaatataaatatcccaagtgttttgctacatatatacacgcatattttcatagggcagcaactagaatttatctagacttcaacaaatcccttgttccaaatacatatctaatgaaaaagagtagaagaagacacaatttcatatgagcacaaactaaaatgcacttttatgaatgacatgtttatattataccagctcttttggggagggaacgccaatcacaaacgccatgctcgttgatgtaagcgccgagcttctggtcttcctctgccgtccactctcctttcttcatcccgtcgacgtcgaaccatgtcgtcctccccattttctccagccaaccaaactaaaaaaccaatctaatattgccacgtttcaccacctcacgagaagacaaattttaaacaagttcaattatttatttgaaagtgtgtctctctctccagaaaaaaaagtgagtctctctctacacgttttactctgtaggatgctctcgagagaatgagtagtgggatgcgttattctaattagggttatacaattatatagcccccccctgttttggtattattatatttccgccgttggattttacttcgaattcctgccgttagatatcgaaagttttatcgagcacaaatttctactattagtctattaccataccaaatacccaaatcttgccaaaatttatgtgtaaagaggtaaaagaagaaaagaaaagatagtatctattactttttttgtttcgtattagttatactcgtgaaaaaactttaaacgacaattaattttaaatggaaggtgtactatctaacacttaaaaacttttcgtaaattattaccccagtatttatttattttttacctatcaaaatatcaaaatctaataagaacatatataaacaaaatggtgaattggtgattatatattttttgtacgtaaccatgaaatttttgataaatttgttttaataaatttcatatttatcaatatatattaatttttatagaacatttattaacaaaattttaaaattaaccacaaattattattattatatcgtatatataattcgttagtcacttagctttaacgtgatataatacaataaaatgtaagtttagccacgtataaaattttaatactatatttttattttatattcgtagacaatctagaaacaaaaaggggttagagctaaagtaagatgatcttgttataaaaaatggtaaatgatactattatttattcatatattcccgcacatgtgtggatactgaatagtgttagtacgttgaacgttttcttctttctcttcctggctattaataaaagtatgatagtctcacacctctttttttgataaacgtatatgataatcttactttatactattaattagtgacgatactagataattttttggaacggttaattagtagaagagcatgtggatgtggtaatcattatttttggggcgacgtggcactacagattgcagatgatagtatgataccattacactaggtcaatgtaaataaatggaaaaacagtaaataaacctaccagtgttcacattaatcattcctcacatattttggactttttgaatgttatagttagaagttagaaattaatatagaaaaaaggatggtccgttgactgcgtaagacctgtgattcgaattcctcacatatttcttggtcgaatgattcgaattccatctgtgatctgtgtgaaatctttttgctctctcatccttttcatatttcctcattcacacactcatgcgcctactcagaggcgtgatgtgcaattgtgcatgattgttgatgccaaacttatcattgatgtgggataccctcttctttagtgaattaaagtcgttagttcacatatcatttcatggtagacattttcatattaacgagaaataatcccaacaatcattcactttttcttgtttttaatttctttttgtatgattaaatatgtaattctctttttcttttcagtatatatatatatatatatatatatatgattctcgtttttgtactttttgtaaatgcttttttttgtgtatttgtttctcattatcaaagtcatctatcaatctctttcggacaaagattatcacttctgaaagtttttttttttttttttttttaagtagttgttttcttcttctacaatagctacaaacaaatcaagaaaaatgtgatagaggggtctcatcacaattgataatataaaaaactatatttaatttttcgaccacatggagattaaatataataagatttggtttaatttgttagtaaatagttgtgccaaacaaaacaaatagacaatcaaatataatgattatggttttgattagttacatatataaactagtagtggtaatgattgtaaggccttgtatgtaaccaatcataggaattatacaaaagtgtgcaaatagaagcattgcatagtttatattaaaagagtagtacaaatacctaatattgggttgtacaaagtgaagtggctatacaaaggtggtgaagtggagctagatttttttttcccaaattattgatacttactctatatcaaaatttttgataaatttttatttctttaaactgtcctacttttatctagtagcatttttatttgtattgctatctttcgaattgcttctatcaaaattttgtacttgtatttatattgtttttgacatgtgctcagcatctgtatagaaccatacaattactatacaagccaacatgtcaccataatatataagtgtgaaaacttcgcctcaaatattttaaaatgtaaaaggaaagaaaaatattttaaagtatgcgacttttaccgaatttaagcacgtgtcaataattggtatagttaaataaaaaaaaaacaaattcgtggatttatacatagcgtacgtgtaaatcagtgagaagttttctttgggggaaacaaaaaaacagtgagaagtgagaacaatgattaacgcggctcaactatattaagtgtgaaaccgaaacaaattataaatgattgtatcttacatatcctttaatatatattctacatgataaatgaagtttgatactttatttttgcatccatggaagtatatccgaactattaatttgatctccggtttatatatatatatatatatatatatatatatatttatttatttttaatcaattcggtcgacaaaaatttgatcaataacccaattcttattacgagtaggtagaatattgacgaaaataaaagtttttttgaaagtatcacatatgagttttttgtatatataataaacaaaagtcacatgaagactttaatttgtagaagtcccaaaacatttgagatatgatcctgaggatctccaataattgtcttaatcttgtaaatctgtggctgaaattgaaaaacaaaaacaaaataaaagatgaaaaaaaacaagataaggttgatgttgttgcgagtctttcttgggatgtcttatggttgtcccatgtggagcaacatgataggcctgaaatatagagattttaattccaaaagccattttttactctaatagatctatctttttttttgttaaactactttaatagatctgtcaatgtttttttccagattaattcgtcccaaaaatcccggacagtcaaacagagatggacaaccaatttgccaagacatgtaaaggatattgaaagtacaaaaataactgtcgtctgtgaagatgggtgagagatcgagatatccatacttgaaaaggatatgtttcaactttgtttagttttattttctttatacattttaggatgtcatgttgtgtatgatatttatattctaattctatatcggttcaagcttctttgtaaatcagtttttttttttttttttttttttttttaccgtatgtggacgcaaacaaagtactatctttgatgtcactttctacatcgtcactcacatgagatttgtaaccagggtatggctcattttcaaactaaatttgggaaaaatattcattatatcagtttttattcgtttatccgctcagaatcattcaaaatatggatctgtttttttttccttgacaacttcaaactttcattaaacgataaacagatagtactttgcacaaccaaagaggtgttgtagtgaaggtttgatacaaattgtctattagagaagctttgtgagagagtgcgtctgcgcggcggcattcttattattttcttaaataaacatatgatgatatgtaatacataaatggcatttttctaaagtcggaacaccttcatatttactagttacgttgaattgggtgacactatctattttagcatgggatatcgtctcgtctacatatatatctattttagcagtccatcacatgtcatcccattggacagtaaagtggaccaccaattccgcaacagtggtagagtttcgattctataacgttttatatatctcactcaatctagaaacaaaaatgaacatttttcttaaacacgtgatgtcagagacattttttggaggcccaaataagtctatacataccctatatgtcttcgttatatatcgtgaaatcataaatgtaacattttgattatttgatgaactttatgttcgtgtgttactttttttttttttttttttttttgtcgaagatgttcgtgagttactaagatatcagaatgcgttggataggggcataaataaagctttaaataaatcatataaatgcgacactacagtaattacataacgatcacgtgactaacgtggagtgaataaagaggcgcgttttacatgtggatcccaacgattccgtttcccatctccatacacgtatatctattatttattagtatttttttttaatgattgtttatattatttttttattttttattaaagtgtgaagtgtttataccatttttaaagttttcacggacgttacaaaaagtacaagtagtagaaaaataacaaaaatttacataaaaaacaaacaataatggataaaaacgtatgtacataacgaaaacaaaagaaaaagtatcgatttcaagatgtcaaactcctaaaatttacgtgagctaacctaagtcagtggctcgaagggccaaattaatctgcaatcaaagccatggaatgttgtcgaacacaaagatatgaattggccaaaagagttttcctttttaaaatcgtcattatattgtttcaaaggagtataaattttattttaaaaatactatgaaagtatgaaagagatgtacattttacaaaataaaaattatatgtctcttttaatcagccaaaattatatatattgccaattgctcttaagaaaaagatatagtaaaaataatctatatcaaagatagaaaagaaaattaaaatctgatgttaaatatataatgatggatacaacatagaattgtttctttgtggtaaaaaagagtgagagagattgattaatgattacttttacgcaaaaaaaaagagagagtaaaaatagtatggaccaatgtaaactacaagaaaacagtgatattagaacacgaaaaattgttaagtcaatatattgtttgcaaacacgagattgcaataaaatttctttttctactttttcttcttcttgttctcaacgttgcttcactcctttctgacaaagataataacttctcaaaagctattgttttgatcttctacgatggctacaaaaaatactggacaaaggtgttaccgttcatccaatgtcttatctcttcaataaaagaaatacaattaatattggaccacattaaaaagaatccaatcatgtggttgtgaccgcatgaaaacagatatgacaaccacgctgcaacgtaacaccttgtggtagaatgtttggatcttgagtaataaacgttggggaccaagtaattataatagaaccaaccatagttgtttattagtcgagacgagtagtctttatgttatcgttgtgtatatcagttttaagaatgattttaaacttttcagaacatcttcttaatcatttgttgttgttgttgaaaattatacgtatagtattttaagaaagcatatattttggtattttagaatatatctccttaattggacgagttactatatagtctgaacaaggaagttatcgtagcaaatattattagaaacaaaaagaaaagatatagtagtatataagagcatcatcattggagggttcttagtgtagttcttaggttaattggatgtaaaaattaatgattaaattgatttatttgctataagaactcaagctaagatcccaccattgcatattactaaaatttcaatctcttaactaaactcttaacatcaaaattttcaaaatcaattatatatatatattcttaagaactaacctaaaactacactaagcaaccatcaataatgatggtctaagacagctcacttatttcttaaaaattcttacaaaaatatcaatttgtcctttttagtttcccacttgttagttgatgatttgatgccgcgttaatcatcattgctcacgcgcttaaattacttgttcgttaaattttaacgtgcttcaaaagaaataaaaagtcttattttaggataacgatagtttgatacgaagtttcacacaaatggacgcgtagagataagccaaagccacatccgttcgttttcttatcaacgttaacaatgttaatgtatatactgtaatgaaaatagtacatgtatctgtacttcctttttttttgttatagtttaacataaaaattcgagaaagattttacacaagaaattatcgaaattttggaaagctatatttctcagcgtttcatacattgaagaaaacataacgaagaagaacataagagatcgtttgttattgctgtcgtcaatcatacgttgcaaaattcgtttcacttttgttagtatttgttgagatgtatacaatgtaccaaaagaaaacaatatatagagtgtaaaatattttttctcttattaatgttaaaaaaatatagactcatttatgcatgccactcaattaagtagatagaagtgaaaaaaaaaaaaaaaagtagatagaagtgacaagatttttttttggagaaatcacgaaataatgtttatatggagacatgatatcctgagaatcgccatcagctaatgggtctgaatctttttcctttatactctgtggttgaagtgaaactgaatcacgagataaggttggtgttgtcatagcctctggaaacctttcatggaccgcactaaagaggttgttgtcccatatggagcagcacggttggtcaggaatatatatagacagttcaatatgttaaattaaaaaaatcaagtttttaagattttaattaccaaaaatcatttaaaagaaattttccaaaaatgttgacgacaaacagatatgggcaataaagttatcaaaaaaagttttaaaaaatgaaggcccacccaaaaagttttgtcatttttcaagaaatagagcacttcatctctaaataaatccgattctggatttacccctatgatatgtcttatgtaaatttcctacttttgatctgggtttctaaattagtttatgattgttttctttaaattagaaatttttctcaaaaattttcacacacacgcatatatataatatattttattttttttggatttgagatgtttctgtagagctttcgtgtctataatcaaataatataaaagtataaacaaagagtgatacaacatatatggaaaatattggcattattgctagttttataagttgtgttttttctttcaatttaggaaatctaaaatgtggtactgtataagcaaaaggggatcgaatattttgaagtgttcaaaatgataaaggtaaattactctatttagtaacttaaaattgaaacctatgactttcacaaagaaaagaaaaaataaaaaacgtaaatgtcaaaaaaaaagaaagtcagaagaatcctaaggcttaatatattagtcagaatcggaacctgaagacagaatttggacagcatctttaggttcgttatcagtgatcgaagcaggaacctcttcttcctttgcattcctccttcgttgttctctctttctctctttcttcttcttctcctccacctgtcaaacaatcatcaatctttcttaattcgggcttatgtcaaaaattaatatttttatatgaatcatttcattgttacgttatcggctggttgatttggtgatggctgatttgtctgagcaggttgttgtgttgatgatcggcttctcatccaccaaacattgcctgcagataacaacgctcctagaagcaatgtaggccccattcttggatcagctaggtagtctttgattctgttccataagctcaacaatttctgagttgcttttacggtctttgggactcctgatctcatcggttcagcgctttctggaacaagttctggagttttagctctctgcaagttaaagtgaaagatcaaatgagatatctgataaaaggaacatgtaaatactgaattaaaacggaagttgcttacatagaaaggtaggtttctgttgtcaccatcatcaaccattttcgatagccacttaatgatctacaaaacagtaaacaagcaatgtaacaaagttaataccagaaaataaatgcagatttgttaaaaaaaggtgttaatactgtacctggggaatttcagctgttccgtcataactaacaacaagctgtgcagcaggatcaacatcgtcagcttcagattgccatacagttttgggccatttacttgatttttgctctgcattagcagtttctgtagcatttctatggtaccgaacgatcaatatcctagggacatcaatcggtgccctcctagttccacacgtgtcatagctggtttccgattgaacatagaagaaacagtatttctggatgaaaaatccagagggagtcaggatggtaggaagtaacagatctcaagacctagacgtgagatcttaagacattctaatggattccggaaacagaacagatttaaatgagataaggtgaatgtaaataatggtgttctggccagtatacttacattctgcgcttctccgtcgagccacgcaaatgagagtcgcttgcttttgtgtgcagaagctgctggcgttattgatggatccttggaagcgtcatctgaatcgtcatactttgacaaagcatcttgtaccctgcacatggtctacaaacttgtaagattagacaaaactctaatcaggaaggagacaagaacttcagataaaaatggacgatgttgaaaaaagattttactcacttccctcatcttattgagttcaacgctttgtcttccaacaaggatggcacagtaccacgtcactttatcataaccagctcgagagtatccccgtgcatcacaaccaagttccattgatgttgtgcttcttagttgaggaagcactttaagaaaaatgatcacaaaccaattaaaaaaaaaaaaaacccaattaaaaccattcatctaccagtctaaaaactcagtataaagaaaagcacatgcagaaaccgaatatactgaacatataatgagtgaaagcatagggattacgtaattgcttgttctgctccaaaatgtccaggaaccatgtacggttgccagatcctgcaagatggaatatcttaatcaatcagtttcctaatcatgcattatcagtaattcaaaacactcagttcaaggtggtgaaagaccatgataaacaacaggttttgaaccaggatccttcataatcacaatggcaggtgcagattctacctccaacctgttacaagagaagaaatacaagatgagccaaatatctaactacacggtggcagaatcaaagcgataccatcaaaccacacttattgataagaaatctttccgagaagcaatagacactaatgcagataaacagacttagaaagtgcagtgacatacgcattccaccagaaagatgcatcctcttctctccaaagcacgtgagatagagaggcaaaattccaataatctttggcagcctggcgaacaataggagtagctcgctctcctgtttgtgagaataaaatgactttcacctattgagcaaggggaagataaggaaaaggacaaaaataagggtgtaggtagtagatgtgatgcggaaaactattacatgtctgattagtatttccttaatttcataggataaaagaacgctagataaaggatattctaaagagaaatagaaaaacgctaaacaaaccttattaggtggaactttggagaggaacttagatacctgtatgcgaaaaaatatatttctaattaatacacaaaaataaataaatttagactccagaaaattttgcaacacacagcagctaaacaaatgaaattgaagaaaatatttaagtaaaacagtctcactcttacaaaccatgacatggaaataattcaggtactaaaaggcctgcaaagctctgcagctttgcagtacagctttgcagtaaaccaaatcaaattttcccaataaaaaagttcctaacatggttaaacctagatcactttccccaaaaacatggacggttatgataatcaagtactgaaaggtagtactgaaagataaattaggacatttcaatcagatatgattcctctaaaacttgtgtcatctataagaaaattgtaaattcatcatttagatctctttaaagaatgcataccagtgtttcttttgtgtgatagaatactctaggtaaacccagtacagtggtcgcgaaccaatcggtaattgcatctgctgacagctctccttcaaacctaacaaataaaaagatttgaattattattctggaataagaaaaatgaagcaagaaactcatctaaatgacaattccaagaaaattttcacgacccaataaagagtgcagaatattatgccttttccgttaaactgaagggttcagtcagtgagctacctgatgaggcagtctgcggttttacaatttggggggaaagagaagattgaaggaaggcctgcataatatgagaaaaaatccacacattttaccccaaggtataatcattacacctttctgaaatataaaccatagctataatagaacaagtgtgaaatgtatacacggaactgtattttaatgttcaagtgttcaaacctactggatgtaatatacttcctaagtacaaacacaaaattctagaaccattctgtttaagcatatcctcactacttttttcttccaatggatcctctcaacttacttcagtctacttttgattgacttttgcgtttattcttctcagttttcgtgtaggctcttagcaggatgaggaaagtgataacttaccttttctgaaaaatacttgtcctgttggttttttctcagcaaggtaggtcacaagttgaacatcgccaagctctaacatcgcatggttagcaaccccatccaacaaagcaactgcaattataaaagaaagttaagcatagcaagataattggtaaaatgatttcatacacagcaaaatatgtctatactattattaactattaagttagtgttccctcctaatttttgttaaaacatatctattgacatcaagttgcgaacttacgatcatattgttacacttgctttttacatcatagacaacatatttatttcctgaaaactaactctgtctatttcagatacttcagtttccccttgccaaatgcactgttctagctcttcaattaatcattccattgtctcatactttaacaaaggctggcaagagttttacactttaaacatgctacagaaagcaaatcataccaatccttctccaaaccgtagcgaactgggcagagctgttgctaccagaagaatacacctaaaggtatttagacgttaattaagaagtagcattgaattataccaataaattaatatttcagtacagtccaaaaggaaaatcttctatcgttaacgtgaagcacaacatgcactccctcactttgtagcataaagagattccaagagaaatatggttaaacgtatgccaacatttattaatttaataggaaacaattcgcatcttcaacatgttagattgcttgtatcttttgtaggagaggttttaaacgtacactagatattctatacttgataatccagtatcagttctgcagaaatgtgtctccacaaatttacatatctctgtgtaaacagtctagacagagtttatacctgaatgagccatggcttagaatcttggaacttggacgcaaagtcttgagatgttattgacataaaaccttcacgttcaggctctaaacaggttttatacaccaataagttggcatcggaagaaatataaaaacgaatacaagaaacagaactgaaaatgtcaaagaggtatgttggttaactgaccataagaaacaacttccagtaggggaagttttatttttgcaaaatcttccacagcatattgtttttcaagttcctctataatatgctgcaaccattaaaacaaggggttatatttgaaaaggaaaaaagagagtaaatcttccttctttttcagtttgctgcaacaaaaagagtgaagatacagaactaacaacttactactgattcatcaatggcgtataagtcatagtcccttttccatactagatttgttaacagctcataggcgtattgtatctgcatagtagcaatgatggaattagaagaaacgttacgcacataaaaaggctgaatgatttagcactaataagaagtcgacggccaaccttaacaaaatcagctggaagagaaactcctgaacccgaatccctgtcacgaccagttgttacaatgtgtcagccacacagtttctacttagaacacctaaagtctagttatcaacttcaattagaattacattccattctttacaatgccaagcctacatatactatcatctagcaattagttatatagaaaaaaacaattcatacaatactcgtgattgattgtggaggtagaatcatggggactaaatccaaattcaaggttaagaaaattccccagatcgagaaagttaccacttagaagcaacagtctgatacgcatctttcacgtcatccactgagctgtacatctttacacccaaaactaagaactcaaaaaggaaaaataagaaatcaaatcaaaagaatcaaaaccggaaggtaattgtgtagcacagtacatagtcgagagagaaagcgagcttagagaattgtgtaccgtcgtaatgagaaggaggaaaggaacgaggaagaaggaaaagctggaagaacatagcgaggacgaagaggaagataggaaccgtgtaggctttgagaccagaaggcatcgacgacgacgccggagtttccttcgccatcggggattttgggaaactccgatcaaagagtctcgatgtgataagtgtaaatctccttcggttatttttccgcgtttttcttaataaataaaaaaagggatcgactcttagcattaagtaagtaattatactcttttattatggttaaaatcgtatcttatcagatcacagcatactaaatctctctttttctaaaattaaatataattatggtttaagattaatatgttatttttaacaaaaacaaaaaaaaagattaatatgtgacgactaccaaacaatattagatagtattacgaatttacagataaaattgccaaaacctttataatttttaaataaaatacaaatgatcaactatctatttccatggtaaatacattattactaccattttgttttgtgcaaaagtttatttaatacctgaatggaacacatattgtgaaataaacaaaataaaactctcatcatttctctttacctctctctatatactttacatacaagacacgactccaaacctggtcatgccaatacctcaactggacacattacgttcctggaatgaataaccaaagacacatgcaacctctggatattttgtctaaccttttctccaaagctggttgtctaaaaggaagataccaaaagacgagtaacaagcaaaattgcagtatcaaatttctccatatattgaccaacaatgacaagaaacatctatggaataagaatttgacagttaaaacttatcttcatgagaccaaacaatgaagcacaaggaacaagtgcagggtaaacaaattgcattgtgtttgtgagagtatttgtatatcatctatatgtttcctgtaatcttgccaaactgtgattccgttcactcattgattttcctagctctatggtttggtttccatgtgcattcttcgaatatcaaacttgtctactgactccagaggagagactgtctcatttctgatccttttaatcttgggactcaacagtcccctgtggctaaacccatacagcttcagcacttgattatctgcaaaattaaaagccctctccatgctcttgaagcatctatcgactgcgtaatcagcatagctgccacacggtttgcaccctacaaaatgtgtcacaaagggccatctctcatcgcccaatcctggatgatacttctctatcatctcttcatacctgtcaaccaaaccttcccaaaacccgtgcaagtagtattgattctccacataaaccttctctatccatttttccttctgcgaaagcaagagatatatcaacgccgattgatcatcggcctcaaatgctggcctgcctttcagataagctgtcagtatcttcccagtttcgtcacggatcttcccttttggtcccattggggcccaagcatctaataaatccaatgaccactgacaatttctcaacagaaagatacccgtgttcaatgcaacccatgatttttggttgaacagcaagtctggataaccgtgtatcaccagattatgattttcgtaccgaggcaacgggatctcaaacagtatatcagtgaacaaagcatcactatccatccaccaaatccattctacttctggatgagacagcattaatgtcctaatcataggtaatttcgtccaataccctgagagttcctcatccaaattcgccatgttatacacaatctctatcccgtggagtctacagtaatcaatcttgttcttcacagctttcaatagataatagtttccaattggtttatcacagggtccgggggaagaccctgtgagaagcaatattcgagctttgccattgacaatattaggaaactcagggttctgattcagccataccttgcgttgactatcccagttggtgattttgggccctagagtatatgtcgcattgggactaatatcagctttaggcggctcaagcaagtctgtcaaatgcgaatcagatgggatctccgcgattctggggcctagagtatacgttgcattgggactaatatcagctttaggcagctcaaccaagtccgttgaatgcacatcagatgggatctccgcgattcttggctctagagtatacgttgcattgggactaacatcagctttaggaggctcagccaagtccgtcgaatgcgaatcagaggggatctccgcgagaatcggaatggtttccttgatgaaactctgattaacagagtcggcgttggagcttccaaggttcccaacacggattgtgccaagtaggatgagaatggtcacgaagcagcagagaatcatgaacttgatgttgttaaataaggtattctggatctgccaaccgcgcaaaaacccacgggttctccatccaccatttgatacagccgttgtcgacagtcctctgccacttcctgaggatcttgacccatcctgaaacatttcacttgttgcctcctgtctctagatttcactcacaggggagagacctccagatggcacttgaatccagacacggtctaacttataactataatcggtgaagactgtctttttgttactcacagaatgtgtagatcccacactctctccctctctgaactacaccgctctgaaacttcagatttttggcaggatcctgatggaagactagtagatgatggacttggacaatctgaagagcctcttttaaaaatcattaaagaatattaaattggataatggagaaacctggttgtaattaaatatatttgatgcggagcaatatgttttatatgcatgccaacattaagcatcttattaaatgaaaaataaaaacctttcgcatcttcaacatatgaatattcatgccagattgcttggatattttgccagagaggtatcaaaagcatgatgcttgatatctctacaaacttaagtgactctatgcttacatatcaaagaagagccaaccatgtatacgcaactgtaaacaatctactcagaggcttattatacctatatcagccttggtttggaaatgaaatgcatagtcttacaacgtaaaatggcatcaaacttcacgttgaaacctctacgaaatattatatgtaataacaagttggatccaaaagaaatcatatacccaaattcaggaaatggaattggagatggtaaagagctcgtttagtcaactgaccataagaaacgacttcccagcaggcgaagttatatttgcaaaatcttccacaacattttcgttttcaagctcctctataacatgctgcaaacatggaaccattaaaccaagcaattcgttttcatataaacagaataaatgttcattctttttcagtatgctgcagtaacaacttactgctgtttcatcattgccaggtgtcacagtcccttctctatatacgagatttcttaacagcttaaaggcgtagtctatctgcaaaacatttagtagcactgatgatattaacaacataaagctaacagatttagcacacaacaaactgacagacctctataaaatctgatgagcaagtatatcctgaaacagatagaaattgagagaaacagtatgaagaatgatggtgaagaagaagcatcatggaacgaattcatgtcatggtcgattttgaaaaacgttcttcaagtttgtctgcaatgtacttgaactaagaccacctaaagtatagttctaaaattcaattagcctacttatactaacagaaatagagtacgctgagtttatccaagactcttcacgaaacaccacacacagacgcacacactcacccaacagtagatactaatttcaggactatctatggagtataagttactcgaaggtggaatcatgcgattgaaacaagactcaaatgaaaacagaaagaaattcaaccgaaaatgacaaacccgcagaagagtatatacacggaggtcatggacgaagacgacggagtttctttcgccgtctgatttagcaatctccgatcaaaagatttttcaggcgtcaagagttgccaaaaagagaaggaaaatgcaaaattccggtctaatttaacaagaagccaaaattacccggttcggtctatgtttacttgaaccgaatttaatttaccttcccggttcaaaaacccaaaattctagagagagaggacggcaatgcgatggggtcatctttctccgcctcctttactaactccaccaccgccgccgccgttcctcctccgtcgccaccttcatcgccgtcacgttccaatgtaaaatctaacggagaagagagacctcgtttcttcgatggaaaggcgaagaacaagtgctgggctaatgctgacatcgtacctggtcgacatcccgagaggtggcgtaaagacgtcgccggtaacatagtctgcaaacgcttcggaaattgcaatggttgtctctgtttcgagtatgatcacattgttccttattccaaaggtttgatttttcttatcactgcttccccaaatgtgacattttgaatttaggttttgagtagttaaaattaggatcttgatatttgtttctgtgtatataggtggagagtcgatagcggagaattgtcagattcttcaaacaagagttaacagattcaaatcagctcaagaaaatgttgatgccaccactcttaagagctattcttgtggtctgcaatttacgggtatgttgccaaatgttagcttcttcttcttctaattacatgtgatgatggatcatagatttgctcatctgctataagattcaatctttccttgttgggtttgtttttcagtgttcatttctatgttattatgtagataagatgggacaatcttgattgtgatttgtagtatgttccatattctgtagagattaagatcattaatcgtatagatatagtctttcttacctctgttatgctttcgtaaagtgctgtgttgaatagcatgttcgtttagaagtaatgccaatctcatacatgtgggagatgcttttgctttagatcttctttctcttttctctgttggtttgatcatatcaagaattgctattgagccactaggaatctaaatcttctttaaacccaaaagccatgctgtgagttgtttttaggtgttgctagtttacgttttatataggagtgaagcaaagtgttaaatgctcttgggaaatgcattttcttttcaaaaagactcaaaagattatagagctcttggtacttgcaatgattatacacaagtgaactcaagtgtgtgttgtgtgtctattctctgcatatttgctttgactttcttaagatttcttctattgtaaacattgcagacaaggagttagatgttatcgagatggcggtttatggagacgtgttacgacctggaaaagaatgtcgctgcaaaaccgtagctgagctgcttggtcagtccaagtccaaagatggtaaagccgcatgcgagttaccatcatagaaagtagtaatcaaccatgtctttgtaaagctttgattcatgctcatacattggcagattcatcagaatcttttacatatactggaaaccattgtttgtaagagtagtgatgattctatatctctatatacaaatggaaataaaattcagcttacactgatacctaacttttgaagtcaacaaattgtttgttaatatatcgaccacctaattcactattatatagtcgagaaataaaagttactgttacgatagagattttatggttggtcatggagacatgaaatatcaaaaaacgggaaaggtgcgcaattatgtgtgagctattaaagaaagatgtctgccaaaaagttaaagtcaacataaatttcctttggcttttttttttaaaaaattctctctgatatttaaatgtattttttcccatctatatataaaaaaaatatagtagctttcattcattaatacctaaataaaaatttaaaaattggtagttgtatcaatgggtgttcgaatttcggctttgaacaataaatgtagctcccacgtatacacatatcggctggttgaaaaactttatctatggagagagtcacatgatatatggtatccaacaataattcaacaatttaatgtggaatatgtattgattgccgtaaggttcgaaagctcaaatcccaaagaatttatcttactctaaaaaggggctattctatttaaatctcaatatgcattttgataccactacttcggttattattaaacaaagaatttcgaatcgatcccatattatacgaataagaaaactacaacaatgtttgtgattgtatataaagtacacaaatgacaagtgtgaggttaaaaaatgttggaaacaaacaagtcaacaacaacccaccaccgtttttggccgtattagctcactctcacactggtcgccgctagtcaaactctcgttccattgcataattttttaatcctattaatttcgattttctcaacaatgttactcacttaattagaaaaaaaacactactatatcaaattgaactatacaaagaaaaaaagctgtagaaatacttaacacagaaagtaaaagagagtgatcaatcaagtcatcattattcactgtcgatccaaaaaatcttgccgtagatttcgccttaaacatttctatttttgattacacgacatttacttttgatctatctctgtttaatttttgatttcgtcttccgcaattcacgcagaaatcaaaaactctaaaagaaaaaaacaacattctctaaacttttctctctgtatatatctaacgaaaaccgcaacagcaatagtttcatcattcaccggagatccgaatcacaataaccggcgccggtttaagagatagttccggtacacatgtgttgttgacgcggaggagcgaaattctgggaatgggttgtgtcaactcgaagcagactgtttctgtaacgccagcgatcgatcactctggtgttttcagggacaatgtttgttctggttccggtagaattgtggttgaggatcttcctccggtgacggagacgaagcttttgtcgtggtggagcaagagcgggaagaagagtagtagtaaaaagagcggtagtgagttgggtagcgatttcggtgagttgagtgagtctggtcgagcgagttcgaattgtaggagtgagtcggtgagtttccgcctcggtaatttgagcaagtaccttgaagctgagcaggtcgcagctggttggcctgcgtggcttagcaacgtcgctggtgaagctattcatggttgggttccatttcgatccgacgctttcgaaaaactcgaaaaggttccttttttatatactctctttgtatattatgtaatacttttgaaatgttgttgtctctgaaaatgatttggttttgtttccttgaagattggacaagggacttatagtagtgtgttccgtgcaagagagactgaaacagggaggatagtggctttgaagaaagttagatttgacaattttgagccagagagtgttaggttcatggctagagagattttgatacttaggaaactcaatcatcccaacattatcaaactagaaggtattgttacttcaaagctatcttgcagcatacatctcgtgttcgagtatatggagcatgatctcactggtcttctttctagccctgatatcgacttcactactccacaggtcattttgatttttagtgattaaaaacgactttactcttgtaatgcaagattttgtccgggtttttctaatacaatgaatgttgctctggacttgcagattaagtgttatatgaaacaattgttgtctggacttgatcactgtcacgcacgaggtgtgatgcatcgggacattaagggctcaaatcttttggtgaataatgaaggaatattgaaggttgctgattttgggctagctaatttttgcaatgcttctgggaataagcaacctcttacaagtcgagttgtgactttgtggtaccgtccacctgaacttttgctcggggcaacggaatatggagcatctgttgatttgtggagtgttggctgtgtttttgctgaacttctaattggaaaaccggttctgcaagggagaactgaggtaacccacaaactgttgtcttgtaaatatatgttacatgtagcttcatacctctggatcctgtatattgctctgtttttacttggggaaaaaatataactcaaagagtgctgtttcttgaatgtatattacaggtcgagcagttgcacaagatattcaaactttgtggatctccacctgaagattactggaaaaagtccaaacttcctcatgcaatgcttttcaaaccacagcaacattatgatggttgtctccgagaaaccttgaagttgaaaggtttatccgatgctgacatcaatcttatagaaactcttctttctatacagccccacaaacgtgggactgcgtctactgcccttgtttctcaggtaaccattttatccttcagctattataacagcatcttgtttgaagatttggaactttgattttcaggaagatgttattttgttgtattgccacatcttttaaaacattccctttgttcttttcagtattttacttcaaagccttttgcttgtgatccctcaagtttgcctgtatactcgcctagcaaggagattgatgcaaagcatcgagaagacacaacaaggtcagaatttcattcattaccatcattgtcactatatcttacaagaaacatacagtgaaaacacagtttacccttgggagttacttggttaatctcagcaccataatttttttggacttaatttctgaagtgtcttgtcctgtaagcacttattcattatcctccaacgttattgtggaattccaggaaaaaaatcagcgggaatgggagacgtggtacagaatcgaggaagccaacacgaaagccccctgcatttgctaaactggcaccagctgaggtacaccaacacgaattccctgcatttactatctgcatctctcagaagggaattccttacgccaaaaaaaacaaaaaaaataacaaaaaccctctcctttctctacttgcaggatgtacggcaccactcccagaagtttcagaaacgtaatggtcattcagttcataattcgattgatagtgattccactttatttgagaaaatgcaaaagccatcaaatcatgaaaaggatgaagcttctcatgtgaagaacgcatcacaaggagatgtgcctttctcagggcctttgcaagtctctgtatcaagtggttttgcgtgggcaaagcgacgaaaagatgatatatgtgttagatcacataatagatctctttcaagaggtcatattcctaacctgttgggaccttctcctgctttcagtgagaatactgacgttgactctaaaaacaatgagaaagaaaaggaagaaaaacatggggaaagaacggattctcaagaccgtgaggcgtatgagatgttgaaactttcaatgctaaagaagtggaggcaacttgaacgaccagattcttttggtggttctgacgagtatcattcacaggaactgtcattggaactttatcagcgagaagaaaaggcagcaaagctgggtcatttggtacgtttgtagattatagaagcaacccttttttcagcttattatagaaattccagttgagatactagagaccaagtatacttagttttgcacatctctactgagagaaattaagaacctagctttacctttcttatgcaaatcttaacttatataaatctgaagttatgatttcttgaaatttgtgatatgctagttatgttaagctgtcttgctaatggcagcggttttgggatcacatgtaccccttataaaggagtaagatatgaatttcaaagcttcatattgatgtgtgacactgacatcataaaaatcagtagaaagagatcctgattgctatatgactgagtgtagctttgttgctttatgttttttcccactttgttacttgaggggaaaacgtagaaaatgcatgattgagttaaaatcttagaggatattttgaaaaacatactcaatgaggctaatgagttaagatcttgacagggttacgaagacaatgatgagaaaatcgaattctcagggcccttgttgtctaaatcttatggagttgatgagcttttggaacgccatgaacgccaaattcgccagttagttagaaaatcgtggttccagaaaggtaaaaccatgatgctaataactaacaagaaaaagagaatgttttatgattaactgtgatgagcaacaattgtatggcttcgtgaattgcaggtaagaaacaagggaaatgaatgactctgcataaacctttctgtgtcatgaaacaagctccccaagtggatctagaagagagctcctagaactcaaaagactatatgcattttgatggtttgagaaagacaacgttaacaagatcttcagacagaaactgtgatggtgaagcaaatatggagaaagccatgaagcattattattttctgttaatgtcaatttataatataatcttctctaataaatcaaaattttgagaatatgacaattacagcgcagttttctgatttttcatgtataggcataagcatatctataaaatattcaattgtagtataaataaaagatctggatatttgttatacagaaattattgattataatccaaagttgggacaccatctcgttttgtgatgtgtggtggtcactggtatttaatgatgtctcgtgacgatggtgtatgggagtgatgttggattatgacgtttgttgttatcatcttgtttcattatatcatcaggatgtgacacattatgttcaagttatataatccgtgcactcaccatatgtctactgatcagaatctgagaatctctaaatcttatcaaatctcaatgtaatagtgtacaaacaaagagaaacttgaattttgtaccctttttggcagtttggtttttgagaatttcagccatctcttcctaggggtgggcacaaggcgagtacttgctattttagggatacttgttactcgacttgccttgtacgagtaatcaaaataagtacttgtacttggcttgttgaaaacgagtacttgcaatttcaagtacttgctaaaatatgattgccttgcgagttacttgcctggtcctgttacttgctacttgtgagttacttacacgtacttacgagttattacttgctacttgcgagttatttacaagtatttgcgagttattacttgctacttgcgaattacttacaagttatttacaagtatttgagaaattacttgcaagtaacactttcgagttacttaaaattacttattattttatttatcatattttttacttatttaaaatttactttacttctaatatagttttaaaatgtgtctaacactaaaacaatacaatatatgtatataaaatggtaaaataatgacaagtaacgagtcaaacgagtcaagtattagtttttttttcattacttgttacttgacttgtacttgcaagtatctaaattatattacttgttacttgccttgttaacaacgagtacttgttttttcaaggcgagtacgagtcaagtagcgagtataagacgagtaacgagtacttgtgctcagccctatctcttcctctaagcttccagatttgataaaacagtgccaaaattaactaactgtgtccgaaaagggatattatcttgtcaagaatcttacatatttttgttttgttttttttgtttcttcttgctacagttgcataatgaagaatatggtaattaaataaaatacagtcgcaaacaaaatctacaacaatggatccgacaaaggatgacagcgatcctacaaggatctctatcttatgtattcctttaatcatgaataaatgttttgtcaaccttcttatgaacaggtcccaagtttatctctgtagtttaaccggcaatacaatgccatcatgctgccagttcattgcattctgcatcctctttctactgatcggagatatatcaacccgcgctttattctctgcaacaacaaagtttcaacaatcaaaagaaagggactggtgaaacaatgagatttgtcgagcaatctgtactagccgataatcaagtacctctccagtatcctgaagccgaagtagttccaatctttctgaaggtctcctatctgtcagtgtagcaagctggcgccaaaaataaactcattgagcaataatttaacacaagtggaaatatgccaatagttgtgtgttttacccagaaactgaagcgctcgggatcttgaggcgttggtatcatagattcaacatttagaagtatttcaagtcttcttctgtctgtaaaaacaaagaaaaagggaattactcgatcatgtctaaaataacatgagtatacaagtgccacaactatcaatcaattatgatcataaaacattagctggtaactattagagtatggtctaactgccgtgcatatactcaattctttgctctaaaacaaccataaagacaatagttgattcaaagatcatggccaggaaaagaaacagcacttaactaatgatctaatgaattgtttcaattgctatagcttggatggaaataccagaagtcatgagtaattcaattctctttctcagctaatgaatagttgcttacctccttgtctagctgcttcctttgctctatctagccatgaccgagcaaatgatgctgcgctggtcgtcagttcccgcagctttaagaagtcacaaagaaagatatgaaaataagagaaaggaaataaaatcactttagtaacagcagagaaaaatcgtacatctgctttcccttgctcgctttgtggtggtatatctttcacccattcaacctctgcaacacgatatctgaaaagaaaaaaatggtaataagaagctaagcgtttttgtgtctgaatatgctgaaatggagtaacgtatatgaaacaaagtcagacaatcgtgtttacaagaagacccaaaattaaatatttgatcttcacacatgttgaaaaataaaggaaaaatgtaatttggtataatgtatatcaatcacatctgacacgaaaacagagagattgtttaaaaagacatgtgaataatatcaagtaatcaaaatgacaaagcttacccatcttgatcccaagcttttacaatgcggcaccttctatggctttccagctgcagaagcatatactaagttaatcatttgacaacttacacttgaaaagtaccccaaaaatatgaactctataggttgactatgtcacggtatcagagatttagacaaatagatccaagtaatatggatttaagataaagtagtgaacatgatattcacctccaggacaaaacgtccatccgggagtggatcacacctgtgtagttccaaaacatcagcagactttgtgtgagttaatgtaatttaaaatcatcaactgaagaacaacaaatataatcagaaagaaataagtaacagactctgtgatttcaacttcgcaagcaacatccactggagaacctgtcgccgaatcaagagctacctatgaacattggaacgggcaaaccttactagttaggaaccttttacgaatgtataatgaagaaagaaagaagaaaaaggacacaatacccaccattcccatccgatgatttccttccattattcttctcacctgtttcagtcaacacacattaattaatgtactgagcgcaaacagtactactgctgtggataaagtggtcataaaagttccatctattagtgctcatttagagaccactttctcttttcctcactgcactttcttgggtttttttcttcctaaattgagtctccgtgtctttataaagagttttacaacaacttgtacagtctaagatcatttaagaattttgtgaaattgagataaacaaattttacaataaacgagtattcaatctctgcaaagagtaggctacttaagttcttaaatgtacataaccgaaaaattttgaaagaactcaccattagtcgatatcgtggttcaaatatatgaagagacaacttctgacaggggattatcacatccatgacgaaaaggggcatactttcattgcctaggtggaccagagtgtcttgctctgatttcctttcagcatactcctctggaaagtttttctctatgatgttattcagtgtcacactgccaacacaaagttgctttagtagaagaattttaaacattagctacaattacatatataatagcatggagctacaaggaaactagagagagtgaaatataatttacctgacagcgcatgttcttggagtcataaaaatgacagttcgacatagtggacatttgttgcctatattccacaaagcattaataaacaacacaatagtaaaagaataattttccaggagtaaacaacaatcaaccatataaacccaccgcgatccattgactgaaagaggcatgatcggcagaatgtatgcccacatggagttgtagcaggttcgtacagcaatttcaggcaaacagtgcaatcaaaatcatcagaccgctcagccattccatgggttttacgcatcgaattaggcatcactttctccaattcctgaagattggatcgtagaggaccgcttcatgcgatcagaaagaaaccccaaacttaaaaacgacacattcagttaggcatcaatacataacaaaagaacagtacacataaatgtacctaaagggatcaatctgtagacctgagaggatagtgtcacgggctacctcatatctttctagctgcagaatattaaaaatattgacacatgtgacatgaagtagacagagaaactcttgatagtaccttgacttaaaacaaagaatctagagacagaaggataactcagcacataccaacatgagggcacaagcctttgtaatatatgacttcactaaactgctctgaagactcattagcttatcagcatccttaagagcaagctgcaggaaatatcaagttttccaggatatgagtcgatgaagtttgcaactgctagtaacagtttaagtaagtagaatacatacttcaccaagcatcgacatatcaaaaccattcagaggtttatattcagaaattgatgcagatctctgcttcagatattggccaaatctataatcaaaaaaaggatggagatggagagaaattagaatatgtcaacacggtttaatacttatacagagagtacaaaggcaaaactagctacacaatccaatgtaatcttatatcaaaacaacatgacaactccattggaagtaaaaaggatggcatcggttttgtgaaaccataccttatataagcagcacttctattgccaagaacaatagggtcaagaggtttaatagaattggcctttgaataactgctaatagcctgggaaaaaaatgaagctatgttattagcaagaacaagagatttctccatatcatttgggtttcagcatcaaagctttaaactagcacgaatttgcagaatattctactaaaacaggttgataagcagtttcaaagccagaattaaacatgtttcatatgactaatgcaaccaaaaaactagtccacaagtaaactacaagagagagcccaaatcagttttattgaaggacctaagactatttatcatcatcatgttttgtaagaacctaattttctccctacacatacatctcagggaatccctaaagaaagaaacaaggcaaagaatgatctgaaaagagctctctcacctcttcaaagcgagactctttgaatgattggtttcccttctccacaagttgaaaaacctgattgtgtatatctaaaggtaacgaattgtctgcttcagtgacctggaaatatcaagcaaggaagagaatttagataactgagacaaataaatcaccctaacgaaaatctaaatcaacaatcggaaactagaacatgcattgctactcttcaaatcaaaacgaagtaaatccaaagagaactcaccagaccgtaattttcgacatcatccaaaccaaacaaagtgaaaggcggaagagagtcttcgttagacatgagagtgattcgatcgaagcaagagattccagaaactgaaaaagattgaaactttgggtcaaagaaatttaatgatgagaacaaagaaagaaattgaacaagggaagggagggagagtatcgtgttcacttctgggtccttcgtttgcaaccacggattagaatcctctacgtggttatcctctctccaaagcttcacccttttttttttttttccttcaatctctttctctcactcagtcactaaaggtgaatcctttttgtttgtcaatcttcttcttcttcttcctgatttttcggtcggaacacacaaattcagctcaccagaattc

SEQ ID NO: 990 - DNA, 119942 bp, Arabidopsis thaliana
gaattcattttcagatgtcgattatattcaaagaaaaaaaacaattctactaaaactcaatctctctttttttgttgttttcttttggtttcacagatttgcattcattcatattttgggagaaggtgccgaagagaaggcgttggaacttggaacttagtggaatgatgcgggaagatggaatgtattagctaaggcttcaccgtatgatgggcaattcgctgatcctcgatggtctactgtggaatccttagacttcagtcttccataacacaagtaagttgattttttcggagactggtacagtatgtgttattataagttattgaacacaaacacatattgaagagaccaaagttattataggagtaaaccataaaattttataggttgtattctaatattctttaagaaccagtaagaaataaatgatgatactttgctaaaagataataagcttctatcatcaaacatgtagtaagtagggggaatattataacagcttggtaccaaaaaataaaagattatgtacagcaaaacatatgttcaaaacaaacaaaacgacttaataggaatttggttacaaattaagacttaaatccatttgtcacaagctccttggttttatcattgtagtctccagacgagaaataaagcaatcatatgatatagttacttatctttctttaaaacttcaaggataagcttaaggagtttgtaaccaatgagtttaagtccaatatgttatcacttcatgtaagtcttttggtttgctttaaatagtatgtttagttgtatacaattttatgtgagaagccacagtagagaaggcactggaacttattagaggtgacgtgggaggatggaaatggaatattgtagatgataaggttatgccgccgccatgcacaacaataagatgttgctccccagtcaccatgtacgtaaatttgctcttgatgatttggttcaatcttatttgtaaaaaaattaaacctctcactaattttcgttgagaagtatataagatgactacggagtagattataacaaacttacaaatttgatttttccacataagattatatacagcgaaacatgtattcaaatgaccgaaaaatcttacaggaagtggtaatagattaaactaaacttaaacctatttgtcacaattttccttaaaacttcaaaaataagtttaaagagtttgtaaccaatgggttaaagtccaatctgttatctcttccatgtaagattttttgtttgctttgaatagtatgtttagttaattagttgtatattatcttatgggagaaggcactgaaactcagtatgtgtgacaaaatattatggttgttaatattatgccgccgccaggcacaataataagatgttgctcttgattcttggttctttcgttttttgtgacaaattaaaacctcttactaaactctttggtgtttaacttgtgatacaatgcaacttctatttttttaaaaaatattacttcagtttttctttcgttcttgtctacatgttaaaactaagcacaataatcatcatctgtgttcattattatccaagagtatgagccgcgtacgattcgcataaacaaagtaagctcattaatcatcatctaatcaatttcatcgatttatctggaaaccaatctcactctagaacaaacaataaactctatttggatcaacaaattgtactataatgctatgttaagtattacgaatttgtaattcaaaattaattagcaaaaagtgaacttggaatcttggcacaatttggtgtccaaatttttgtcacgtggcagataattaaaaaaaaactgccttaatgggccgaaattaagtgatctgacccattaaatccgtaactagcccgtgagtttatatgacatcacttatcactcttatcatattgaatttttctttagtcacaatcaaatacaaaatttattttcaaagactatcacaatcctagtatctagtttataatctgaatattggtatatttataggaagtaaatatctgtttcccataacaattaaataaaagacgtggttgttggagttgactaatgaatgattcgtaatgaattttacaggtaagtattacccaaaaaaggattaaacatcaccacaactaccaatagggaccttgtactctccacattgcttccttcccaggcaaggttacttccgtaattacgaaaacaccataaaagaaacagatctcgtcccgcgttggtttgattgatcagtgtcggtgtcctaatcacaatttccttatttagacaaaatctgttacttccctctcttgaatcgtcgtcattctcgaatctctagatctagccaaaacttttgccatctctaaaatgtatctccattgacattttgagatctatctagctctgtttttctttttagaacaaaatggtggcgaaaccaaggtcaagatgttgttgttgtagtgtgttcatcggcgttatcatcttaatcgctataatcatcgctgtcattttcacaatcagacatagatcaaaccactccgatgatgatggctccaatgttaaaaactacgctaatgctctcaagatcgctatgcaattcttcgatatccagaaatgtaaacgattcttcaatgagattatttgtttatgcttttgtcacaaattaatttcatgttttttgatgtagctggtaagcttgaaaacaacgagatatcatggagaggagattcaggtcttaaagatggaagcgaagcaagtatcgatctttcgaaaggtttgtacgatgctggagatcacatgaagtttggtttcccaatggctttcactgctacagttctctcatggtccattcttgaatacggtgatcaaatggcttctctgaacttactggatcatgctaaagactctctcaaatggactactgattttctcatcaatgctcatccttctccaaatgtcctctatattcaggtacacggtagtgatcaaacacacaaatctttcataagttctcaagttatattactgactttaacattgtaggtgggagatccagtgacggatcataaatgttgggatagaccagaaacaatgactagaaagagaactcttactaagattgatacaaagactccagggactgaggttgctgcagagacagcagcagctatggctgcagcatctttagtctttaaagaaagtgataccaagtattcaagcacgcttttgaaacatgcgaagcagttgttcgattttgcggataataacagaggatcttacagtgttaatatacctgaggttcagtcttattataactcaactggttatggagatgagcttctttgggcagcttcatggttgtaccatgcaacagaggatcaaacatatcttgactttgtgtcggaaaatggtgaagagtttggtaattttggaagtccatcatggtttagttgggacaacaagcttccaggaacacatgtataaagaacaagacacttctttacaaatcatgattcatgtttgtttgattataacattttgtgacttatctaatacatttgcagatactattatcaagattaacctttttcaaaaaagggttatcaggaagcaaaggacttcaaggttttaaagaaacagcagaagctgtcatgtgtgggcttataccaagctcaccaactgctacatctagtagaaccgatggtactttccttacatctcacgttacaccattcactgaatcattgttaattatctcatttgattttgttttgatattaaaggtggtctaatatgggtaagtgaatggaatgccctgcaacaccctgtgtcctctgcatttctagctacactctacagtgactatatgctcacctctggtgttaaggaactatcttgcagtgaccaatcctttaaaccttcagatctcagaaaattcgctagatctcaggtccatatgcatattaatttggtttcttatttttcctcttaattaaacgtataatactgtaacttgatatatgcatatataatgtgcaggctgattacatgttagggaaaaatccggagaaaatgagctatttggtgggatatggtgagaaatatccagaatttgtgcatcatagaggagcttcaataccagctgatgcaaccacaggatgcaaagatgggtttaagtggcttaactcggatgaaccaaatccgaatgtagcttatggagcacttgttggtggaccgtttttgaatgacacgtttatagacgcaaggaacaattctatgcaaaatgagccaagcacttataacagtgctcttgttgttggtcttttgtcgagtttggttactacttcttcctcggtagaatctttttaaatgagatttttattaattagaatcacacaccttattcgcttggtcattctattaatgtatgaacctgctttcatgtatatggttttgtattgcatatagtaatatatgttagatgtgctagaaagtttccacatgtatcatactaaagattcaccacattcaagtgtatctcttatgccattcatcaaacgttgacagcaacaacatactcacatacataggccataggaacttgatgcggaagcactgcatcagaccactcgacattcccccaaatctcttcattattgcgtctttcaagagcaataatcgcacaccaaatcatcctattctgattgccacaaccagtaaacttgtcccaaaaaagtgccattttcccaccataatctgccaacctaacattggcataacgagcaaacctaggtagtgttttcaaaccattcaaagttctccaggatcttaccttagtgtcataccatttgatattttcattgtgataataatagtaaatcacgttctctatcacacaagatgaagaccatttcagacccaaattcatctctgatcctaaactatcccatctaccatcattggggttgtaagccacacccttatacccaccacaactgtgtagctttccatcaaccactacgttatcagtttgatcaccacagccatgaaacgtcaacctacctgcacggctcaacacaggctccgaagtttcggtttatagatcgaaaacctccatccagtttgatggattgtagtgtttataacagcctcctgttacgtatatctttccatcaagtaaactggctgatgggtactcccgctccacctgcatgcttggaccttcgagccacgtgtgagaccagcagtctaggattgagacactagatgactgggattgggagatggatccgccaatgttatagatattagaaccaaccgccacgagacttgacctgtgcaaaggaggagaatgtggaattggtattgttgccaaaacatacccacttgacttcctagtgtcactggctaggataggtctccgacaaagcttgaaccagctagggatacggtcagcacgagaggacagtaagcacacataaagacaattctcggtaagacctactagtgaccgggtctggtaaagctccggtaaagtaaggaccgagctgaaacgcttggagactaaggagagaattggataatccaacctcgagacacgggctaagatgttcactaacaaatcatttggaagtgaaaaaatcaattctgttggcaccttattcttcttcattggtggctcaaaaactttagggttttgaattgaactttcccaagttacctttcttccacgaaaagttgtacaaatatcgattgatgggccgaatcaaatgattaaaccttaatggtccctaagggcccatcttgagaaaaacaaagggtgaaaaagacatttcacagaaaaggcaataataatcacatccacaaacaaaaaagttcctgcaactaaaaaagcaaaggagccaaaagtggaataacgtgtggatcttcttcttcctcctccaacatgttcctcctaatctcaccttcactgttcactctctactctccacttctctcgcttttgtcccaaagtagctatcttcaacaagattcatgtctcttatgatcagatcctcttacgtttctcacatcactctcttccaacctagaaactcaaaaccatcctctttcaccaaccaaatctccttcctttcctcttctaataacaacccttttctcaatttggtctataaacgaaacctaacaatgcaatctgtttcgaaaatgactgttaagagctcgttgattgatcccgacggtggtgaattggtggaattgattgtaccggaaactgagattggagtgaagaaagctgaatcagagacgatgcctaaagtgaagctgaatcagattgatcttgagtgggttcatgtgattagtgaaggttgggctagtcctttaaaagggttcatgagagaagatgagtatttgcaaagtttgcattttaattctcttaggttaaaaaatgggacttttgtgaacatgtctcttcctattgttcttgctattgatgatgatactaaggaacagatcggatcatctgagaatgttgctcttgtttgccctcaaggagatatcattggttctctccgaaggtatatgtgtataaaaatttgaactttgttaggtgctttatatgtaatgttgttgatttgtgtagtctttgtttgtaatttgtagtgtggagatttacaaacacaataaggaagaaaggatagctagaacttggggaactacttctccaggattgccttatgtggaagaatatattactccatctggaaactggctgattggtggtgatttagaagtttttgaaccgattaagtataacgatgggcttgatcattacaggctctctcctaaacagcttagggaagagtttgataatcgtcaagcagatgctgtttttgcgtttcagttaaggaatcctgtgcacaatggacatgctctgttgatgaatgatacacggaaaaggcttttggaaatggggtacaagaaccctgttctcttgcttcatcctttaggaggtttcactaaagctgatgatgttcctcttgatgttagaatggaacaacatagcaaggtgcatatttgctgttgtttccgagttcgttttcctcataaagaatttgttgtaaagagagattatgatttgatttgcttatgatgtgtaggttctagaagatggagttcttgacccgaagactactattgtctcgatctttccgtcaccgatgcactatgctggtccaactgaagttcaatggcacgccaaggcaaggattaacgctggtgctaatttctacattgtaggtcgtgatcctgcaggaatgggccaccctactgagaagagagatctatatgatcctgatcatggaaagagagtcttaagcatggcccctggacttgagaaactcaatattcttccatttagggtaacacaaatcgattctgactgcaaaaccaaagtttcttgattatttgattatcggaatatgctgcttcaattcccaatcatgtgttctttgtatctttcaggttgcagcttacgatacaatcgagaagaagatggcgtttttcgatccttctcgtgcaaaagagtttcttttcatttctggaacaaaggtaagagacagttttgagacttaagattcttattgaaggctccaagtttcgaggttctgcttatgtgcgattacacctgagtttttattcggtgttttttgttgtgcttacagatgcgaacttatgcaagaacaggggagaatcctccagatggatttatgtgtccgagtggatggaatgttcttgtcaaatactatgagagcttgcaagagagcgaagcaaaacaacaagccgttgtttcagcctaaagaatccagttgcatctctttcagaattgaaactccttagtgatctatatgaggcttttgtttcacctttcattgttttgtttaaattactacccttggatccatgtttttgtctcatggaaaaaactcagatgtttcgaaactctgaaaccaaataatgttctgattgacgagagaagtttgttaataatgtcaggtacactattcaaatctttttaccatacatccaaaatcatgattcaacaacacaatactcaaatcattgcttctgagaagttacaaaggctacagaatcattgaatcgtcatattttattacttattgatgtatccatatatagtgtgcaaatgaaaaagaaaagaaatgggttttgaaacaaaagtcaaataaatttcacccatgttgcttgttttcatgagaaactcaaaaacataccacaaaagaaaacagagtaaaatataccaaaacattacaaggactgtagccgataagagagagagatactctggatttcactcggctctagactgaccagctcgagaagagaggatgataccaacaatgagaccgtacagggcaagtgcttcagcaaagatgagaatcagaatcattcccacaaacaacttaggttgttgtgcattcgctctgcaacacaaaaacacacaccagaattacaaacacataacacctttcaaaactcgagttccatacaaaaacttacaacaatatcaggagctgcgactatcatataatcgtaatctcacatacagcaacaacaactaacaccaaagtaagagactttaacatagcaaatcaacaacggtatgaaaagaactaagctcgcacatataaagctctgatgatttagaatcaatcatcagttaaacttcatcacatgatcataacaatttgaatcaaagtatgaacaaagaaccgatattttacacagaatcaaaccaagcctaagatattttctgaaaagtttccaacgtattcgaccaattgaattaggttatacatcatatagagaaatttaatcgagaattacctaacaccggcatcgccgacaattccaatagccataccggcggagagaccagcgagaccacaagcaagaccggaagagagatgagcatagccatcgaatagatagtaagacttggccttagggttgattccggtactgatgataacagcaatgatcaaaccataaatacctaaaactccagccataacaacaggaacaatcgatttcatcacaagctctggtctcatcacacccatcgacgctacaccaaccccgctcttcgctgtcccgtacgctgctcccatacctgaaacataatccgatcgaatcggatcagatcagatttggatcaaaatcaattctgggaaaaaaagagataagagatcgggggaatggagaaatcagatggtacaggagaaaacgagagcggcggcagcgccaaggaatccgaagaaaggagcagtttcatcgccgctgaaagttgaagccatggctcgtcgtcgttgagatctgatcgggaatgagacaaaaactgttggcagattttgtgagagaaaccaatttttttgtcaatgatatgattttgattgattagtaattgccggccatgagtcggcgcgtgaatctaaaccgggcttaaaattagctaacccaatctcaatcgaaccggaccaaattagaatgaaatggttttagtgagttacatggttcttaatttgactggatgaaattaattaaaggcactatatagatgaaactaaaactacaagaacattgctctaacttttacacaactttaaaaaaaaaaaaaaaaaaaatcgtggaatgttgattcatttgacctttattctggattgaaagtgatgcaaaaatgactttatctaataaataaaaaaaagaagactttatctgatgtagtgaaattcttgtatttgttgatgcaatgatgctatggattgttttcaaatgtttcaattacgtatcaaattattttatttgtaccaacacatgcaagtatgcaaccatggcctcgtcgtaaagaactttgggcaacatacaaatttgggcaaacatctataacacattggatttttttgatcgatttaatttgattcttggaattactattaccttcttcttttaaaaattcagtaagatatgtgttaccgtgtgaaagtctatatgtgtgggaacgaaaggtttgaagacgagtaagaaagtagaagagcacaatgcgaaactttattggtatacgtaactgtttattgacgacatttgtaggaacaaaaattgcaagataacacattttttagtgtttgctttgcttgtttatagtaaccggtaggcagtggcggaggcagaataattagatacaggggtcactctttttgtaagccaaataccaaaaaaaaaaaattaagaaaaatgataatatcctcataaatgataatttcaaaaaaaaatatatatatgagaaagaaaaaaactgttctagtaaagtaaacattaaatctaaagtaatttatactgtgttaaacaataataatgagattaacttagtttaatagacttatttttttatttataaaattaattgggttaatttgttgtaggtttaatattttttgttagactatatttgaatatatattgatgggggtcaataatattttgggaaagggtcaatttataaaaattaacaaaacctaaagtaattttctaaaatccataggggtcaattgacccccatgattatacactccctccgccactgccggtagggtttgatgtcttggattgttaagttttaaagttttgtctcatgatctatgtaagtgcttaagccggcgctagcataaattgaacctttaatcagaatgtagtagttgacctggatggatgacacttttatgcgagatgggtcgagcgacgctaaccattaggccctcgatcggcagtcggcagatataacttagatacagtggatagtgacatatcctcttaataaatatgttttaaatgttagattaacttatgacctaaagaaaagaagttagattaacattttttagaaattattatttcggataggtttaataagcataagtcagcgaaacttataaggtatttatttacaattataaaatcaacagcttccaaacaaaatcttttttctttttgacttcttaaaacaaaatctcatactaaccgatttaacattatgtttgtgaataatatggtaacgcgaatgattagcaacataaaaaacaaagagtcaactaaccgcattcatgaatggaatggaatgtcacggtcaatcattagatttggtgttacggaatacatatttattaaatgtatatgaagaaaaaagcatggccaataataatgtaaataaattggctcaacatgcgatgtatgtacataatttagagtggaaaatgaaaagatatatacaatgtgtattaatatagatgtacgcagttgtataaaattgatggacatgatttaggtttttttttaaaaaattgatggacatttttcaaatatcaaaatgtttaatttatattttctacatataattgaaattaaacaaaggagatataagttctacataattttactttgtatcgttggaacaaacacgtacagtagtattattttatatatgtgcatgtatgttttgcgttcctttaaaaatcaaatacatgggaagataacatgcaacgaaccagatgatacagcgcctgatgagaggtcaaaaacgtaacgagtttgacttgtataatattaatatgtagttgcatgtttgatgttgacacagcatcgccatcattaattcgttctctgcagtctaccgaactaattaatctcaaataatcgatgagtacatatatgttaagtccgtcgaggctaatgtataattcaataatataaatatgttcattcgaggatatagttcatattattatatatctgtttaaaattattgactccaatcatcctataaactaagagggttgacaccgcagcaaagaaaaaaataaaatataccataattcatatatttgcacaatctgaattataatggaaattaagtttgctcaaacaaaaaaaaagggttggctccatatacgaaattgttaatttgtaattttgtaggacttctaattaaaaaaatatatatcaataaatgattattttatatatgtcaattatatctgatcattaattaattaattgtttcgaaaataattaattaattttgaaatttaaattaaagcaatattaaatgtaaaaattttaaattatattaaactagaaatttattgtgagcatttttgtgtatagatcaagatatgatgaatcttgtgggattttttttattctataacaggtgttgtttcatatgctacgcatttttatatatttaaccaaacataatgacaagttgacaacgactagtatttcttcccatttagatgataagattagtccaaatactccaaaccgtctgttggattaagaatgaccggaatacgattactccaaaacgcatatgggtttactggtcgagaatatacctttggattaagatcatgtagagttatttcattacgattttgatttcttttggttattgtgaatatgttttttactttcttttttctgttagagatcatttgtgaatatgttaagtggtaagtgtacaatttttcatattttgaatcgagtatcataaatatcattgtacacataccagtttatttatttcgtcctgatattaacaagtaacaacgtcaattttgagatcaattatttgaaaatatagaaaactgaaagtattaaccaatttagtttgattctaattagagtcatcgtattgtgctagtaatcggtgacgggaaccacataaaacgacagtttatcaacataaaaaaaaatcacaaacacatagaagactctagttttgttataaacttgtgctaaataattaacacgatacataatactcttcattattatatatacttttcatgtataataatgcatggacattacacaaatggaatgaatagtacaattgtatgtgcatgaatgtttttctaaaaactgacatccgtttgtatgctattttatccttgtttgttatttaatagtagaaaacttgcgaggaccaaaataattagcatgcaaagaaccagaagaaatcgtgagaactaaaacgtaaagaactcttgtgacttgtataatatatagtttgtatgcatgtttgatgttgacacaacatatctccatcattaattcgtcccttgcagtctctcaaacttattaatctcaaataatcgatgtttatagattaagtccctcgagactaataatgtaaatccaatgatacaatgtggttccttcgacgacgaatcatattctgatttctgtatatctgtaatataaagtacgattattattatatttgaatacaatcatacttaataaaatattgtgtcatatatatttatctccataaatgtttctcttgactgaaatgtgaatacccaaacataaaaacatatacagtaaatactttgttcaattcccattaaatttctctttgaatctaaaatcagacatagaaatactgttgtttagagaaagattttgaatatatagaacattaaatcgccgcagaactttgttgtttagagaaagattttaaatatgataagaactcaactaaagaaaaagaaaaaaaattatgacgtctcaatttagagttttattggttcttttgtacagttctgtaatgttaggaatcgttttatacacaaaggtaacttaaatctttcaaacgtctacggtagtggacggtcattaaaatcagagttaagaaaacgaacaaaccaaatttaatcatatcttatacactcgagaccttgattatatattactcttttatatattaacagaactagaaataaaaactatacattattagaatatcgtaacgtatactaatatcccatcgaccagtatataaacgacacaagtcacagtacattctcatcacataccacaaaatatctcataaagatcaaataaacactaaacctgaaagcaaaaaaatggcagcacgagcaacattcatattctatgctctcttcctaaccacactccaattccttctaacacaccatgtgtcatccgccgcccgaggattatggaaatacatcgcccccaacgtcggaatctccgcgatgcatatgcaacttctccataacgaccgtgtcgtaatgtacgaccgaaccaacttcggaccatcaaacatctctctacctaacggtaactgccgtgacaacccccaagacgccgtctccaaaatcgactgcacagctcactcgatcgaatacgacgtcgcaacgaacaccatccgacctttaacggtacaatccaacacatggtgctcatccggttcggttcgaccggacggtgttcttgtccaaaccggtggagaccgagacggagaacttaagacaagaaccttttctccttgtaataacaatcaatgtgattgggtcgaaatgaacaacggtttaaaaaagagaagatggtacgcttccaaccatattcttcccgacggtaaacaaatcgtcatgggaggtcaaggacaattcaactacgagttctttcccaaaacgacaaaccctaacgtagtcgcgttaccgtttttggccgagactcatgatcaaggacaagagaataatctttatccttttgtgtttatgaataccgatgggaatctatttatgttcgctaataacagagcgatattactcgactatgttaagaacacggtggtgaaaacttttccggcgattcccggtggtgatccgagaaactatccgagcactggctcagccgtgttattaccgttaaagaatcttgaagcggataatgtcgagacggaggttctagtgtgtggaggtgcaccaaaaggatcatacaacctcgctagaaagaaaactttcgtgaaagcgcttgacacgtgtgcaaggatcaagattaacgatgccaaacctgaatgggcggttgagaagatgccacatgctagagttatgggagatatgattcctttgccaaacggagatgttttgctaatcaacggtggatcttttggtactgctgcatgggagcttggtcgtacaccggttttagcaccagacctataccatcccgagaatccggttggctctaggtttgaatcgctaaggccgactacaatcccgagaatgtatcactccgcggctattcttctacgtgacggtagggttttagtcggaggaagcaatcctcatgcgttttataactacaccggagtgcttttcccgacggagttgagcttagaagctttctctccggtttacctacaacgggagttttcgaatcttcgtcccaagattatatctcctgaacctcagtcgatgattaaatatgggacgaatttgaagttgaaattttcggtcaccggagaagttacgactccggcgaaagtgactatggtatttccgacgttcacgacgcatagcttcgcgatgaatcagagggttttggttttggacaatgttaagtttacgaggaaaggcaaatcgccgatgtatgaggttcaagtgaggactccgaggtcggcgaatattgcatggcctggttattatatgatttttgtggtgaatcaagacataccaagcgaaggtgtttgggtaaagttagaatgattcattgacttttatttaatatctttatttttgtgtgtaattgtgttatattactgatatcaattgtatatgaatgtaataagaatatgtcttctcaacttgatgataataaattaattaactactctttttctatgtcgatcggttgatcattgataatttgctgtattaagaaaatgcaagactaatgcatgaaggagaccaatcaaggaagtaagcctacgaaaaattacaaaaattaattcatgatttaaaataacaaaaaatattaacttatgtttttgattaaattttatttcatgaattaattaaatgaaacatggtctttatttattatatacaacgacaaagaacgacataagatagaaagcgatttggtactgcttgcatgattaaataaagaggttagctaattaactctttagtgtcaacttggattctaatcatgaagttgattgatactcaaatttgtaaaagtttacaaaagtcgaataatattattcttccttctccagatctgatggtatatattaaggagtactatgtttgtatttggtacgtttattataagggttaatttgcaaactagtcacttttttaaacttcattggaaaagtagtcactttactattcataatttgcaaaatagtcacttttcactgtttgatacttttcactgtttgatacgtacacttagattgtacaccacttttaatgtacaaatatatataaaaatacacagcgtacactttacatttgtataagaaaagtgatgtacaatccaagtgtacgaatcaaacagtgaaaagtgactattttgcaaattatgaatagtaaagtgactactttcctaattaagtttgaaaaagtgactattttgtcaacacacccttattataatttggtacgtttttcttattcttctctggtgcatatcattgtagttgaatgtaaattattttattggcaaaatttagactggtgttcctagcaaaacaaacatgaacgcatgtaacaaatatatgaaatactacatttcacttaacattcacgaaacagattattttacaaacaagacacaaagagatcctaataaataccaaagaaagaaaataaacacacggaagggttttatcagagtaggaatcagaaacctatatacacgattctatctcacccatcaaagaacaaaacgaaaacactaaaaatacataaaatacaaattcacagaaccatcatgatgattcaagcacgttccccacgaatgcgtctggccaactgaatgtccttggacatgatcgtaacccttttggcgtgaatcgcacacaaattcgtgtcttcgaacaaccccaccaagtatgcttcggctgcctcttgaagtgcgagcaccgcatggctttggaaccttaaatccacctatgtaaaatcgaaatcacttaatatctttctccaaattaaacgaactccagtgatcacaacaacaagtaaaatatcacacgaaatcactaaaactagtaaacgaacttgatcgagagaagttagaataaaccttaaaatcttgggcgatttcacgaacaagtcgttggaaaggcaatttgcggatcaacaagtcggtactcttctggtatttgcggatctcactgttatcctccacatcaacaagacagcaaccatttttgagaacatgagagaaaagattattcgggtaaaaaaacagaaagagaaaagagaatctgaccgaagagcgacggttccaggacggaaacggtgagccctcttgactccaccacggtacggtcgtctagttttcctcgccgcctgataaaaacagaatcgtaaaccttagaaacccattctcaaaatattcaacaacgtaacataatcttaatatcactgatacaaaagttagaaaatcaaagatatataaagaaccttggtagcgagttccttccttggaccttttccaccagtagatttcctcgcagtttgcttcgtacgtgccatttcttcgagagaacgatgatgatgatgataaccgtcaataacttgcgacagtttcttttgtttgcgagagtaatgggtacaatgtactagagatttcacttatatagtgtctctcatgttatagcggttttttaattattcaaaagacggttatttggttttggtattcaattttggaatttttgaaatagaaggctgacgtggagatcctcaaagtcaattttaattggttgactaatgcgttggatagatgacgtggttactaatgggtttttgtctcgctctgggccagtgggcctaatatatccatagggtttatcaaattttctcaggtgaattttgtaaaatgataaaaggcctaaaatgtaatattcttgccttaattaggaattaaaactggtcaactctatagtatattggtttattaatttctctattgttttccatacttgtctttttcagtttgaatataacattttctatctcaatctcctgaatttttgcatttatattatgagtaaaatattttatttatttatgcaatgtttattattttttcatgtataaaaacatcaaaaactatttctattcactaacatatagtaaaacaataaactgacaaacaatttcactttaacacattagcaaaaaaaagaaaaaaagaaaacagggagagaaaaatatcttttaattcattttcttaggaagacaaactttgtattttaataacaacaagaaaaaaacacattaagctaaaacaaatttccacgagtgcacaaaacaaaagatagtgacaaaaaaagtagagacaaaacgttacacaaaaaaaaagcaaaagacccaatgaagagccgaagaaattaaaataaaagaaatatgtatattcttggtaatagagaaaatccccaaatctcttcaattaatccctctttttatattttcctctcactttatctctctctcttttttttacttctttcgtagtttttctctgtactattttgttttgtgtttagggtttctgaatttggttttctcccttttcttcaatcaatctttgtcgtctcttccgatctgctcaatcacactactagccgttgttttcccgccactttctagcttcaacacgattcgccgcgtatccgaattcctataatcgtctttggatctgctttttgaaatttgaaattttgaaagtttttggtcggagaagtaatggcggaagcgatgaattcgtcggagaagaaagatgagagctcggaggagaagggaggtgagcttttgttctgtggtgctacggcttgggatatcattggaaaacgaaaaggtgcgatggaaggtaacttggtctctcctactcggctaaggccactcgtcggcgttaacattcgattcgtcgccactggttgcggtaactctcgctaatctctctgtgagtatctttgataatggaggatttaaatactgtttacttacttaacactgtttatcttttatagcttcgtttcattgtgtggcattggacgttgaaggtcgttgttacacttggggacgtaatgaggtatgttttgatttgattacttctatttgtcttctctgaaatggaaactgtgaatgattttggtttatgggaattgtttgatgtttgttcagaaaggtcaattaggtcatggtgatatgattcaacgtgataggccaacagttgtgtcaggactctctaagtgagtttggtggagactgatactaactctttgtttgaacatttacatggctgctaaagctttgaattggttatagttaggcattgagcttctatgtttattgaaggcacaaaattgtgaaagcggcagcaggaaggaaccacacggtagtggttagtgatgatggacagtctcttggttttggctggaataagtatgggcagttgggtttgggttcagccaaaaacggtatgaaatgctttacatacttctgcttgtgtctaactgttctaatggtgtgaaatttgtatcttacaggttttgtttctgtagaagttgaatcgacgcctcttccctgtgttgtgtctgatgaggtcacaaacgttgcctgtggggctgacttcacagtgtggttatcgtctactgaaggagcctctatactgtatggtttcttagtctggtctagtctgttattttgggttttctttcacctttaacgggtctcactttagtaagacttcttgctcaaattcagagtgtttgtttgtttataggactgccggtctcccacagtatggtcaacttggtcatggaactgataatgaggtaacttagttatctgcgcgtagatgtgcaaccaatgcagtcttcaactattatctcttacttgtagttattatcatgattggaggtgtatggagcgtgaattgtttgtgtttatttgaaacttccaaacaagttttgagctcttgtttcttgaattgttatgtaaagtctgctatgcataatttagttactttagtctctctgaattgtacttgatgaatagattaggtaaatatgtctccatcatttactttgaaccaggttacattgtttgtgtattatttcagttcaatatgaaggatagttcagttagactcgcctacgaagctcagccacgtcctaaagccatcgcctctcttgcaggggaaaccattgtcaaagttgcatgtggaacaaatcatactggtagaaaccatatttctttctctctctatcctcaatctttacctttcaggggagctaattactcattctgataattaaaatttctcgtaatcagtggccgtagataagaatggatatgtttacacgtaagtaacttatctgttcaaaattttggttaatttgaactggtccttctatgtgtgttatctctgatgcatcattttttgaaacatatcacaggtggggatttggtggatatggaaggttggtactagctcatgtttaatatttgtaaatggaaactaacttcctcttcctcatgagatgtttggttgccaatttcaggcttggacatagggagcagaaagatgagtgggctccacgccgtattgatgtgtttcagaggaataatgttttgcctcctaatgccattctttctgctggttctgcaaactccgcttgtacagctggcaagtgactttaacctgaactgtctttttgcttcttgtgttagtcttctggtcctatattaaaacgaaatttaacttgtttgggttgtcaggtggtggacagttatatatgtggggaaagataaagaacaatggtgatgattggatgtaccctaaaccgatgatggatttaaggtttgtttaaaacagattccaccgattgatatattgcttttgatttgatgattaatgtaaaattattctttcctcatacagtggttggaacttgcgttggatggattcaggaagcatgcatcattttgttggtgccgacagttcttgcataagttggggtcatgctcagtatggagaacttggttatggccccaacggtcaaaagtatgccacaccataagtaacttttagttttataaccacatacgactatcattataaaccatgcttctttctcgtttcagatcctctgcagcacctaagaaggtggatatgctcgagggaatgcatgtaatggggtgagttctcacttctcaagtgttcgcctcagagaataataattggatgtttttctaaattccctgtgaatgtttttctgtagtgtggcatgcggtttttgccattcaatggtcattgttgacagaacagatatcgctgataggcttgagcaggtaactaaagcaagagagcctttttttattcgagccctcaatagaaagctgaagagatatatttcttcaaggtttggtatctcctcatctgtttccttacactgtttactttgtctgcagctcgaggtctatgacgggaaaggatcattagaaggtacagtatattcgtaataataataatcactacagagtttaaacatttcttgatgtatttgattgttttaagcagagagtgtagaagaagtcaaggaagaaactttggcaccaaagcaacaagcagttaccaaaagaggtgcttctaaaaagaggaaagcatcaaaagcttcctctgattctgaacaagacagtgatgaagataacagcgacaaggagaaggaagttcaaggtagtgacgcagacagtgactacagtgaagatggagaagaggccaatggcaagaaacagagtgctcgtggtagaggacgtggtcgtggagcacgtggacgcggcggccgcaccagtaacggaaaggctccacccgtgaagaccggtggaagaagaggaaggccacgtaagtcttagaactactctgactctaaacctcgatgtggtttctttttaacagtttttgtttcttccttcacacaatgagaggctaaaaatcacttctttttttcttttctattgaacatttgttttaagcataattccctggagaattactatcggcctctgtattttaatgtaaaccacatcgactgatttatttctagtgataacattttcgatattcagaattcagaaattttttcaggaaaagaaagaaggtggtttgtccttgactgatttgtgatgacatgaagcatgtgttatgttgcttttttgtctgaagcatgtgtatttttgtaattattatgtttatgcataagattcataatcctctcctatagttagttacttactgaattaataatgatttatattcagttttgaaattttttgatgtggtgaagttgcaatttctgtcggtgagtgcgatgaaaacagtaaatgagtttgcacgattgataaatttgacttaagatggaagcaattagtgatgcttcttctgatttataatattaatataaccatactttatgtttggtcttgagattaatcatatttggttaaggtcgtgaaaggtttgtttcatcttcacacgcaatctctgagtttatcgctcaaactttctaacattttccacctttggcttttagttgccgactacggcttcgtttgtttgcgtcatcgtctgtatttagtatttgcattaacaaattgcaaaaatatgtatattctaagagcatatgaggcagtggctatatgtgactcaatcacaacgttagaataaaatcattcactatcaatttcgcagagaggtccacagcttttcctttgtaacttttgtcgtaatgctacaaaacaaaacaattacacatgtcgcctacctggcagtactatggataggacacgtggcacaaattgtacaaaagaataggcattgtcaatattacgatgagtagtggttatgactttgatcagtttggtaacagagagataccctacaccttccatttcctctttcgaatccacggcttttcttttttctatcttgggctggcccactatgggcctacaaagcccatctgttccaatatccatttttcttcttcaaatcgaatataaaaagctctagttttctaaaatatggaaattttgtaacctgtaaagacatgaagtagtttacctgccaaattcaggatgaatacgacgaagatgagtaatggaaagaaaagcttaaagaaacaaccatttttttcgttagtcttgatactttttacttacaacacatatcattgtcactattgcttacactgcaacaaaatagatttatcaaacatatttacgtctttagcgaaatgggtttgtgcttgagacaatttaataaataaagttaataaaccccacatataaagaaaaaagctaataaacctcaaagcgatcagagagaaaagaaaaaaaagacatgaagcacatgacagtcacatgcgtcttattatttttataggtgagccaacattatcgactagccataattgaataattccccactaattcataattcattatttcaaccaatccaaccgttattttagtataatcagaaaatacaagtgttaatacggtcgataacatgtagtttatagaatcgttgatgtttcatcatcataagttttacttgttgttgttacatgaacttttttaaccgatgtatatgaattcgaaagcatatacatctatctgaatttgttactttagctatatagtaattaatactcatcggttagtaaaaaaaggaaggaatgaataagaaaatgtgagtcatcacgagagagatctgacagtgacagcgttatttcgcttttaatttggacagaagagaaaggagactggcggattccaaatctcagacttaaccgtattttaatgccttccctttgagttccgctttccccttttgctccattttccaacgacactagttagtactactggtctctctctttgtgtttattttactgatccaataagaagataaaacggtcttcttcttcttcttcttcttcttcttcttgtaagaaccagtcatgggaagatctccagcttcttcttgtctccgtctcatctcttgctccggcggtgatgatacctccgccgatcctaactccaccgccctcgaggttttgacattttctctccctctttgtaatgttctcgcgatcttcaatttctgtttcggatttgtctctgctcgaagtttctattttaagatctgatattagtgtcttgtcggattttggcattacttagtttctaattttgtctaaatcttagggtttttaattgtttggtttggaaattacttagggcttttgttttgtctggtactgtatacgagatctgttaggtttgatggttttgtgtctttaggcctctctattaagaaatgtgaatattttggtggaatcgattttgttttttggatgtagaacaagagctctggggataagcgtggatggagtttcaggaagaaatctgggaaacagcgagggttgattactagtgtagtttctgaaactactcctgcttctaggactagagagactcttgaatctgctctccttaaatctccgtctcctgataataacaatgtttctgaaaaacagcagcagtctttctctgttgatgaaaagaagagtcagttacctgttgttacctatgtggctgagcctgtggatgagaaaaaaacacagtctgttattgaggagaagacggagttgttgtcagtggaggaacagattgaccatagaactgaggtgtcgcctgttattgtggaatcaaaagggactgaaactgaggaagatgatttgattggaactgaattgcaaggaccaagtgctgctgatgcagccaagatagaggaagatgttacttccgaggttgaaatggctagtaaggttgagccggaagaatctgaatccgatgatgtgattatagttagaaaagaaagtgatgaaaaagttgatgagaagctggatgagtctgttatcgttgtcatccaagctgctgttcgtggttttttggtatgttcttctgtctcttcttatatagtaagattatttaggatgtgaagaagctttctttaactctgtgaacttgttaaagatcttaacattttcccaacctgttgctgaggatctgtcttgaaaactattcttactggagtgttgttaaactgcaggcgcgaagagaacttttaaggagcaagaaagttattaaactccaagctgcagttcgtggccacctggttaggagtcaggccatgggatcactgcgttgtgtccaagctattgtcaagatgcaggcgatggttcgtgctcgtcattccacaaaagatggtagccgtgtttcagcaacctcggtaacgtttcgctgaattatgtttcggtatcatcttgtttcccctataaaatctgcggactgaaactgtttcttgtttcaggataagtcggaaccaaatgcagctgcacaaaaacttctagaaaacaagtttgctaagcatgtaagttttcaaacttgtttctagtgcatcactactggctattcaagatatttactgtgacatctaaactcagtttcttgtttatacttattttcttgtatatttggattatagctaatggagtcaactcccaagacaaaacctatcaacattaaatgtgatcctacaaaacctagttctgcttggaactggttggagaggtggatgtctgttccaaaacctgagaagacttctaaagcaaatttgacaacggaagagcaaaatttggaagaaacacagaatgttaaaatatcacctcaagctgactttgtgaattctgactcaacggtagagaacaaaactgaaactgatatgccaagctatgaagcaagtaaggtagaaggtcagaatgtggagctatctgagacagagaaaatgagccaatatgattcaccagaagcatcagcggaggtttattatgactcaatccagtctcagccacttgctgctaaaccagattctttgctcgaagagcctgaatatgtggatggacagattaaacattctttgaagcgtaaggttagcaatccttctttcattgccgcacagtcgaagtttgaggaactaacttcatctactggttcaaacaaagcaatgacgctgtcttctaaagatgatgttttgggtgaagaaggcaaaacagatatagattcaccagacactacaaacactataaaggatcactctttggaagatgttactccagctgagcttagtggatccgagtgtggcaccgaactctctgtaacttcttctcttgacacacttgagaagaagtcagacgctgagggtgcagagcccagggtagaagctaagcttttagaggatgacacttttaaaacagaccaagcagagttgatagaaattgatgttaaagacgcaacgtcaatgggtactgtagaggaccctaaggagaaagttgagaatgctaaggacgaagttgaaatttcagcgacacatcatgaaccggtcattagtacaccagattccaaaaagagacgggctgaagatgaatcagggcctcaagcttacgccttatctgagggagctttaactccgatgacaatcactgaatctcaggcaacaccggcaagccaagcatcttcttcagtgaaagcaagaaagggaaaatccgaaaagagtggttcaagccaaaagaggaaagttagcaagaaaataacatcaagcccgaaacaggaaattggtaccggtgaggctacagaacaagaggaagggaaagaacagaaaagcgggagaagaacttctttcgggtatgatcaagaagcaagagaaagcagcggaggcaagaactctcttcctcggttcatgcagccaacacagtcagcgaaagccaaggttcaagaacataactcaccaagatcaagccctgatcttcaagaaagagatgttgtttcggctaagaagagacattcgttgcctggtgttaccaatgggaaacaagtttctcctagaatccaacggtctgcgtctcaagcacaacagggaacaaagggtaaaaacaatctcctccaaagttttctctgcaatcattcatcgcagttttaaacaactgaacaatgtttgattttggttttacttattacagatagaaaatggcagaggtgaaagtcgacccgattgcgacagaaactgaagaagacaaaaagcttaggagactttcggtgttttcgctaaatttgattattggtatgtttttttcaagacaacaatccttaactctagtttcaaacgaccaaagtgacagaagtgcagaggaagaacgaagagtggaggatagtctctcttgtataggatcgttttttcttctttctttataaaaaaaattgtttgatttttgtgactaaaggattatttgatttggtttggtgttggttttttcggacaaaacctcctcaacttaatatgaagcttgtcgtgaacaatggattatgacttcacttttaaaagtcgtgtaataattaatatctttggttattgttacttttctaccaaaaaattctccttgtggtgtacaattcttcgaacggctcagaaatagaacatggtctacaaaaaaacaagttcgtgggattgttggatgataactaatgagtcaacgaaactggctgctattgactttgttttccaatcagaaatcaaaactttctttaggggtcgttatagaaatagactaaagtaatggattatctgggaaaatatagaaacatgaagggggtacggctgtgaagacacgtgtatataggagaaggaaagaaaaaatctgaggacagataaaatgacgatggtgaccataagaagaagaacccagaggatctagggcttcacaatcgattccttctctctatctcgacggatttagcttgcagatgtttcgtctcctctctggattcattaattcatcatcttctcttcttaaattctctatcttttcctgacaaagttagggtttttcgataactcgggatgagaataattggttcaatctaaagagctggctttgataaattattgagatttaaaagggtaattggaccttcctgaatcaattttcctggaaaaagaattgatttttagattgaaaaagaagtgagagtttctgtaactatgagggcattgcacaaaagggtatcgtggccaccagattttaaactttgtcaggtaaaatgacattgtagttcattagattgaagctttcctggaatatgattgatgtttgttttagtaccatttctatatcttccttaaattggctgattgcaaatgatataatgactgaaactttaggacaatgtcttagtgttgttgaattttttatgctctctatgattgattagtttttgtattctataatgtccgtttagttgtttgatatattcagttatcttgctttgtcatgatttgaggactatgagactttgattgtttactgtttatcatgctctgtttttgaatttatatttacttgcaactttactagttattgggaatccgtgtggaaccatggtgacaaacctgccaatcagttgtctcgagctcttggacttgcttgatatttttttgcatcatagtctaaaattgtttgcccatttttggttctttggataaggggctaatcctgagatacatccagttttatcatggaatggtcagccttaaaccccttactcatgagatcaatgtagtcaagtagtcagtggtgatgcaagagaacgcaccaagaacaatgagtgatgtccagagggttttggctatctccaacaaagtattcgacatggtgaaaccttatacatttacacactcttgaatgctgacattgcaaccattttgctgatggaaaatgctttggtaagatagcttggagatggttcattgtccagctaagttgcttatttggaagggagtggaggaggaggatggtacagagaggagaggaatgtcaccattttcatttgaaaaagtagttgattagttaggctgttctggagtatgaggtcattgtcttatacgttaccacattgattgtttctttctttagttaagctttttcaagcaaccaggattcttgtaatacgttaatgctgacaagcccttgtttactttctttggactgtatgtttgagataactgggccaatggtaaatgttcatgtttgctgtatattcatattttgtgtgtagtgattcctgactcttaactagcgtatttgatcaagatctctaaggattttgtttacatgtcaactgataatgtgtttctcatgttgaacaggtacggctattcatatcagaggattcaccttcacaagttggatcagagtctcaagatcacctgcaagcaaagtcaccattggcttcacatccaagtgatgataatctgccacctggttttggtggacccttttctgcgaatgagtcccagattaagttatcagatatcccactaataaagtggaaatgctccgtccaggtgagttctcgggtcgcactccttaagcctttttagttagaatcatcaactttttaaagtactaattacaattcccccaaaatgccaagatatttacagttatagtttacatatatacatatgttttcctctagtcctttaagttggataagggtatgggtcacatttggtaaatatggtggtaaggtgctcttggttgggttacccatgtaggattgtatttcctgttaatctagttgaggatgttcaacccttacgatagtggcactaatactgtagataacatgtgcttttgcagattctgctagatcgggaatggaaagtggttgcaggggacgaaagcaaagaagtggaggcccaaaatgagagggaattgagagttcttgaagcattttatcctggcgcatcatctattcctccaaagtccgtatctaacccctacatattcttccaacacacatttgcatacccttttacttttttttttgacttgggccttttcttaaactccaatctgcagcccttcggttccagctgatgttgaggactcacatcatgatgatcagcaaaccattgtcatacccatcctacctgtagaagatgatgacatagcgatggattcagcatctgatttcccaacccaatctggcgtggatgtgggaacagagccatcaataaccgatgagaacacatcaacttcttcaaccctccctgcagggccagatataatggctgcgttatctgcaatctcaaacagcaaagaacaaggcagtatgatcgaccaagatctgcttattaaaatcctaagcaaccctaagttggtcgagaatcttgttgcaaatcgtggcagtgcaggttcagtctcctccaacacaagtagcctctactcatcttcaacacatgaagccaacggagtagtaaccacggcacctatttcctcaaatggacaattttacgctcagccacccataactcatattcctcccatggcgtatactcctcacgctcctcaagaccaaccgaactatggagcaccgccagcaagagatgctagttattacaagaacctgattcagcaacatggcggggatagacaagagacgccgccagttcaacatctcggttatcgatacaacctccaacctggaggaggacctaacccggagatggtaaatagcagtaataataaccagaggccaagggattcaaaacccaagataatgaaggcttgcatgtacttcaacagcgcaaggggttgtcgccatggagctaattgtatgtaccagcacgatgctacaccctaccagccgaggaatctaaacaatggtaatatcaacacttctgatatgcagaatgcaaaaagaatgagatttgacagagactgatgcagaattagcataccacacatgctctctgcctcttgctgttagcagcagagcaatttttctattttctcttgcctggctttactgcaatataagttttatatacatttgaaattatttcttggttttatgccacaaatgtagaattaattagcgagtattatttggctcaccatcacagtagtacttatactatccctagtgtttttaagatgattttctacacttttatctttaacattgtgcagaaaaaagagtaaaataatcacaagatttctaagactgtctcaactactgattcattcatcactctactacataatatgaatatagtttcaggtctcaaatcggaacaacacatcaaatgcttacaacaagatggtttctcctctaccagttggagaaaagaacatttcttactctcttttttttcttacaaatcagcatgagatcatttttatattgttacatttatgaaacagaagtcttaagatcgttaatgcctgcgctgttcaaaagcttcatcccttcttcactcatctgctggacctcagttggcgacaatatccttatgcaccttacgcatcccacaaactctctgcaccagtttatgtagttatgtaaggaaaactattgtaagactgatagtcagatgaagttaatggattcacagaacagtgagagagagacttactcccatggatcatctcctacaagcagaacatcactctcataatcaacatatacaagcttccaacccgagctttgtgggtgagttagtagtccttccaatccaaacatgcattcgatagcagattttagctcctcgtagtctttaaagcttgtgacatcaattgatctcccgactgacccggttttttgaacctgccaagtcaaaacattacccaaaccccaaagtttcatgtcagattgtgacacaagaaatttgtggaatgaatgagagataatctttttaccttagtgtaggttcggacgcggggtgtcgcaattttctgccatgatgagcctttactattttgccgcagactacaatcatcaaaatcaacattgcttgaagatgtaccagtgcctccagaattatctggaaaatcttggcgagagaaggcctgtgagtctgcaaagctagctgatgtgatctgcgactggacatcttgagcaaagctagtgttgttgtttccaaccaaacaaccagaagggtggttctggaaatcagtgtctttgatggcacagaagtcatcaaggactgtgtttgagagtggaggatctagaatgttactggttgtgctattactcatacagatattctgactagcataaaggtcctgctgcatcaagggactgaactggtcaaacttgagaccgttcaactgagtgtcccacacatcatgaaacagcggtgagtttgtggaatccggtaacacaacagctgaagaatcctgggaggatagaatgaatggttgcttgtatgatccggcaagagactggaaggaagagacttgtgatgtcagctcatcagtttccaggaaagagaatccatttattggatcagactgtggttggtaaatctgatgagtaatgtcaagacattgatcagcttgtacaggcgacgaagcacccggtttctgaagtagctgattaaccttttcctcattacacactgtggatgtagtaacctggcttgcctgttccattgactgctcaagtccatgttggactctaccagagctgcaaccagagagtgtagagttctcaggtttagcaggagcactcatactctgtgaaagattctgttcttggccactcgtattagaagcagatgggttcactgttagcttgttttgtggctgcaccatctcagatttctggttcatcatcaggggttgctgcatcttcatatctcctagcaaacctccattccccattacaatattctgctgcatctcagacatgaaagatggtacattttggttgttgtgaggcctcatcatcattttcataagctgctccgaagccatactagggaaagatgcatatggcataatcccattcgcggaatcaggaacacgtataagtggccgttttatcaagctaccccattcagtttcaccagctgcatatttcataacaaaactttaaggcagcaaatctcatgtaaagttcacaacaaggcacacttatattttactcaccaaagtaagatggatggagctgacgtttgagtcctgaggtcagagaaggaaaaatgaagagactttcaggtgtttcgatatcccatggactgacccgagtaggtttatcattacatccaggctcatcccattctacctgaaggttacgccacttagaaccaggccatctcaacggatccaaatcgctgattccaacaatagttcccatgtacctaaatacacaaccaaaacgtgtataagtgaacaaccaaatttgataaacaaaaacagaaagattgcagtttacggataacttaccttcgtttcccggaatcttcagtttcaaacatcattccaaatctcataccaactgagagctgagacccgcatatcgccttacggtacttagctagagggatcacgaactctgctggacaagctctgagaacaaacaccataagttacgttacaactaagaaaatagttttatatcattgaggattgaagaagcttttgagctaaccttggattatagaatatcaaaaaaggagtacggttggcggttgcgtgagcagcagcagcaagaacaccgatgtgcatactatccgctgagagaactgatgaaggaagtgctgtttgttggcgattggcacgcctaacaccgaccataagttgtgacttctcatcccttttggcacattttcaaaggacaaatgacagtcagaagataagcaacaccaaaatgagtcagagccaaaatatctcaatagccaaggtttttcacctgatgaacaaaacagaatccccagctctcaatctcttcgatccaacgaacaaactccatcctgtagttaggagatgtctctttggttgccctgagaatgtaagcaggaactgagctcaataccaactcaatctaaacagagaaagagacaaatctagtggttatacctcggtagatatggcgaaatgtccaagtattctcatgaagatctcgaactacaagctcttgcgttggcggctgtgctgagtagtcctgcaatgtatttaacataacattagcaggctagcagcagttaaagcaataggaacatatgaggaaaagagaagctcaccaatggtggaaatagcttctctgcagctctacgtggcactgagaaacctccatgtgtgcttgtgtcacttgcagtaagtgttttgcagaaaaactcagtcgggtgcttacttcctctcagcattccaaagtctggtacagggaacacatctctctcctgatgcacacaaaccattcaaactcattcaacttcaacatgagttcttaaatgaaacaaaaggaagttgcaagaatccaaaacttacagagtgaacaggttgaagactcatctgagcatagatttcgtcactgtctttgtcagcctatcaaaggggaacaaaaccattgtcaagaaatatcaaacttggttgcaatttgtttggatacgaagcaaatgagaaagattggcgtacatgaagagtaacattatggacttgacacatcaactgagatggaaggttcggataattaggaacttgtgttgttgctgatcttctggttgaaacagcaacctaataagtcaaaaagtgaacaaaaaaaatcaaaccttttgaacaggagctaacaagatctagagaagtacaatgtgtttgtttgttctttaagacacacaaagttacctgctcgctatgaccttgtgagaagtaatacactaagctcccaacttgagggagacacaccaaagggcctgcacaagcgtgccatagctccgagtttattaccggctttcttgtacctgaaaaatgttcaaaatcgcatttttaggggaaagtaacaaaatttctaaatgtcattagcataaattatgaaaccttttgttatcacagtttattcttaaaaaggtaacttttttaataaaaatcttgagaaagaagaagatgaaaacctgactggtctttcaacagcttcatctcttcaagcaaggtagattgagatgttgttgttgttatagttcctccaccattaaccaaacaacttgttttcatcttgtcttcaacacaagacaatgaagccatcatacagagagatttttcaatgttctgttttgtctctcccacactcaacactaactaggctttagcaagactcaagagtttttctttttctttactaagtcttcattttattttatttaatacaagaagagacaaaaagagctctattgagcaaagaggctacaagaagataaatccaggacaaaccagaggaattaaagacaaagccatttcatggaatctgtttttttttggttaaagaagactccaaaatcgaaggacaaaacccttacacatgacaaaaacagagtgggagagattaaagaacatacaaaatagggactacacagacaagcatgtctctcttgtggggctcttgcctcttctctttctctctctccactcttcttttctcagaccaaattcgacccttcaatgaagaagagaaaccaaaggtgccatcatgaaaccacacagtttctttctttggttccggatgcaaacaagaacaagaagcaattgagagagagacaaaagcttttaagaaaaaaaaaacttttgctttcttttaattatttctctgaaaaatcccacattttttcttcttctctctctaatgtatatgagtattagtataaatgtgtatgtataggttttattttgcttggaaatgggaaagagtgtgcatgctcttatcctgcgcttaaaactttctgtatatggcgatgccgttgcagctttagactctttaaacgaataatattatattttattgtttcccattaattataaaataaagttttggtatttcaatagatacatctatattattatttaatgttttagaacagtttacgtcaaaaatttaataaagtagagtaagcacacgtaatctctgatacgcacagaaacgtagttgaatgtacaagtactttcaatgcttatgttataaggcagataataaagcttaaaataagtaccatgagtgaatattattttaaaaagtgtcctactttttcaagaactttgtaaaatataaaatgttttttgattatggcaataaattaaaattgattaagaactttatgacaaaggaggaggcttcttttttcgttgcaataatatatacttttctcaaaatgttaatcttttcttgctgagatttcgtaaaagggatgtgagtggtgagactttgggagatctctaatacaaggtgcgtatgataggagagaatgtcaaaatagcgtatattagcacgaagcctaaagaggttacgggaggaagtgtatcttccaatcttttttgcccgggtgttcttttcctttccaagttaaggacttcaaaaatgttttctttctttggttagaaaaagttattttgatatttgcaagatttggtatagagattaaaaaagatttaagtatggtttagttaaaacttaaaagttataaggtggtattgtttatatatacttaagagttaagaccacctccaaataaattgaaaggactgttgtttgtggttcttgcatttgtattgaaattgagctttgtaaaatatatttgtatctacaacaaccaaaagaaaggaatatcttggttctctgcacctgtaaacatagcttgttctgctcattattaatatctaatactctaaaccacatgtgtaattatgtctaattgtgtatagtgtgtaccattacatctttagacctttttagttacatacattttttttttttacgcacacatctctagtttgacctttccattgttttcttgcgacgaaataattgacatgcggtcattgtattatattgtatgatatgaaaccatatcactttccatatcattacttatcaatcatacgtaaataaaaatcgctttccttcatgtaatattactcataaacaaaatacaaatgagcatagttaagttatatataggattagtacacaatccacattatcacatattagagaaaaataatcaaacatattataatttataagtggatatatagtagcatcattatgatagaatatctatataaacataactacttattcggatacgcgtttgtcactaagatatatttgaatcaaaggatctccaatcaagtatataatgtgtggaatttgctgttggcagcacattttaatatacagttcaaatttagcaaggagtgaaacatgcttttgatgataatggaaaaactctcatttccggtgccaagattgtgtgccatcagcaaaatctttggaacaaatagtcattacgtataacgaggaataacatcccacgatgaggtttactagatataattttatcattcttatcaattgttttctcttgtatcgtttttttttttctctactgtatatcatttgtgacaatgccttcaataatcctaaattcataaaaataaaaactcttaccataccaaattttaaccacatgcaaagaaaaggataccaatcaaaatcaagtgtatgcagattatcaatccgaatccttcctaaacgttagtttgtcttatgtagattggaaacttgtaaaaaaacaagaataagaaatgaagaaagaaaaaaagaaagtgaaaagcattatttggtgcttttgcgtctgaaaattttgaccgctaggcacgcgtgaagtggacggcaaatcaatggttgagtaagagaggaagaggaggcgtacattagcatactcgacacgtgtattttaatgttattttgaaaatgatttttggaccgacacggcgccgtttctgcgcttcacagttcacatccttacctacctctctctcctgccaaactaacaaagcaaagaccgattcctattaatcccataagaaaacagtttcattataattttacttactgccactagatttactttcttaaatcatcacaaaaagtatacttccatattggtgtaacataatatagtacaaatcttataaatcgtagtaattgaaaaaaaaacataaaatagtggtggcttttaacagtgacagtggaccaagtaatgtaaaatggagatataacatgtagaataattggaaagaataaaaatgtagtggaacaataagtgattagcaacctaaaaatgtataatacgtagtgaaattttaactaacttttggctaaccaaaaacatttatgttggtttaaaattttacgttaagttgatgaagatactttgaagaaactttttgaaggtaattggtgtcgtacacatgggcaagtgcaacctaatttttggttagaataatgaaagtaataatactgattaacccgggtaagtgtcgattaccgttcaagatgatctgtgcaatagtaatacttagcacgtaatagtatgttatagaacagtgaacgagatattgtaatttacaagtgaaatagaaacgattgaccatatgggatacgaagatcacgaatccgtaataataatacgaaaatcaggtaacgcttggagaaataagtacacgtcacattccaaatttatgaaaattctatttgattctttcgccaagtaacccactccaactataatatcatgccatcttcgtgattatcatattcttaaccgttcaaattcttttctttattttctcattccattttttaaaaaatcacttatatgtgtttgtgaatcttgttattaaaatcgatcaaaaagtaaacaattcaaagaacggatttcgataagaaaaggtcgcaaataactgtttggggtttattaggatttgtgtcctttaaattaattagctttggagtttggactattaaattaagtgcctacctgctattgctaaggcacctttaataacctcattaattaattaataaacaaacgaaataaaaatgtttttattaccaaatagataaaaattaaaaaggttaaattgtctttttgcctcataaaacggagtttgcaataatagccaatccctagaggacacgtgatgttcatcgagaacccttcataacggcatgtgccttcgcgcacgcatctatgtggatcgatgagttttgatccgacggtcaatattcaacgacgtaagaatcgagccgcacgcgctctttcacgtcgttcaacgccttggtaattcacacacgtcctctctctacttccctaggatctctcctgaccgtcgattacgtacacgtgtcattcatgcgaacgattacttttttgcatcacgacgtcgttctaatagtcacggccacgagtcgccacaaaccacccaatgttcatatgctgctctgtgtgattttgatggtccaaatttcatagtagttctaatatattgtactatccagtagtaaaaaaaattaacagtaggattgttgggagcagcatcatacaactgtagaataaaaaattactggtgatagaataattatgccgcatgttttttggcacttgaaattttaaagctgcaaaaaactgttttaggttttacagaagctattgtttcaccagggtgaaattaacgttaataacgtttttacctcacctacttactattcataaatcataacaaaattttaatttaatataaaaatatataaaattgtgatcgttggtatgttctgttcgatccataaatccacaaaatattttggtgtatatgttttactcgatttgttttattcataaattaattaaaaaatgagatatggattattcgagtttatacttgcgcctatattaataaaaaatagattatttacgaagaaaaagacgaaagaataaaaatggaataaaaagatggaccccagaatcataaaagtaaagccaaaataatgggagtgacgggacatctcttacgagctattggtacgtagagagtagaggatacagttatggaccagtgtgtcttattacagaatctattaacattttagattcatgtttagtcaatctatggatcttgacccaccgccaatttttaataataataatctctttaaaaaaaaaaaaaaaatactactactttttctattagctataacaaaaacatagtagattttacattgcaaaaaacggatcctagtttgtgaaatagagtgataaattaactaagctctcaaaccacattcctttcaaagtttcaatctggcattcatattctaaaatgataacgaaattaaaacatgatacacaattatactatgtatcaaaatcaatggttaaccataagtttattagaacaagtatgataaagaaggatcttttagcatgtgtatattatagttctgtatgatttaaaaagtcctgaaaaaagcgatgaagatttttaaaaagaaaataaaagggaccaagaaaggagggcttgtattattacattgagaatgcgtaataatgccatcaggatagaaaaggtaactaaataagtcataataatcagcaggagagactaggaacaatcataacttattatgcacattccatatttccatttacacatacacatacatactcaacacatcgacagatatacacaatcatcatcataacatagtaacatataaaatgtctataatacaaatgccctcttcttcttctttagatattcataaacatcaaatccggttacaatgtataacagtttatgttcgattatcagacgagtggaggcaaaaacgaattaatgatcgtatgttagttgacacatggatgatgagcatgtgaatgtatacaaaatacatttatccgtacgtatacaatatgacgtatacgatcatctatatacgtatgtacgtacaaatgaaagagacaagagagggagagaggcgtggtgtgagggaaacatggaagctgtgggagctttgtagggtttgaagccgacattttttaatgcatttttttttcaatcgagatatgtaaaaaggagggtccttttttcttttgtctgttctgttacttttattccttcttcttcttcttcttcattattgtaattttctttaaaagcaacaatattccttatcatcataggttaatatatggataatgtcgatacgaataatgagactccaagttaaagtatattacatttgaacaatcttaggatttaatatgagaattttaactatcatatagcaatttgaatttatcgtaaactaaatctgtcacaatggttcaattcttgtatcgttttaatgttaaacattgtggagatacttttggtctaatagttggccaaatgattaaaaggctaccctccaagtaataaaattcaagttcaggagaatagacacacagagatatacattatatatatgtatgtcaatatgatggatgttgaatatctgtccactatgattaatagattattatactcaatcatatgggagggtagtagatatatttaattacgtgaataatggtatattaaactttattatttgtttcataaaacttgatgtttcgatagtttttaatgcaaaacatctgcatattattactaaatacacaaatgttttgtttcatacagaatatttttcagagttttattaaaaaatatctttccaacaataaaagtgatatattttcgtataaattcatccaatgtccatcactaaactcaaattgtctgtatactcaacaataaaatctgatggattgtaaatttcacggtatgctttgggtaattagaggctattattggatacatggttagatccggttaacaccggttattgaggtgttggtttaatgttagttattgtgttgtttatataagtttaagatcacattagatcattgattaagttgtaacaaacacttttcagctgttaataagaagtcgttatatctccgttcttcttctccgttacaccggaacttcaccggtgttaatagctattacttaaaacagacagaaacacacatgtaaagaaatcataatcataataatagtaataagtgtacaagatgcattttttgtctgtggtttgagtaaagtaagctagtggtgtgaggggtgaattagttgcaagaaataggcatttttgtagaaattattggtaggctaatttatgtttcttgaccacattattgagtattttagtcaaaatcaaaatcctcaaagatctgtccgattctctttatttccatgcttttactaattataaaacctatatttcattatttcctatgtccactaactattgtcttttcagtttctacattaagcaattacgtagagtcgtaaacttctaaattactagacctagatttggcagtaaaaaacaaaactataggacgtccttcaatgattttgtttgtattaatttttaaaaaaaaaatcttcttggtttaggctatagtatttatttacggtctctaataacttgactgataaaaaagcaaataaaggactggaccaaaaggtaagcccatttatctgttgatggacttaatatacactactagactcatttaaagcccataaagctattatctcttctcttccaattcgttattttcttatcatttttggttctaaagttttcattttcttttctcttgattaaaataattgtttatttccatttttttgtctaaagaaaccttaatattatgccctaagagcaaatctaaatgaatttttcgtttttggggttgtaattaggactcccgtgaagaatgtcacaatgctaattaaattaaatttccgttttttgtattgatgttagtttggaaagcataattgaaacctctaaagatgttcttttataattattagcttatgatgcggagtccataattaagcctcacacaatgttacactaacaactgaaaatatgaaaaagcttcacataaatatcgcttattaagccataacgtagttaagaatctgtaagttcaaaatatttagcctttttttagtgcgtggttcagttacattttcatctgaaatcatttgggggaatcagagatagtaagatacaatgtgatatacttttttaaaataaaaaataaaagtttagaaactttttggtataagtaatctttgtaatagtttattagccagttttgtctcgtgtgtttaacaattctgacatctaacgtgtctatctctttatgcatgttatggcgccggatttagaagatcttttacgcagacatatttgatatgatatgatattaaaattaagactttcgaggtttttttatatgatatcaagattaatctggaagatcttaacattttctaatggtttttttgaatttgcttataacggtatggaatacgaatatatggttagtgagaagtgggtattctcttctattcattgcctaaaatgattcctcaaagaagatctattgacaatgacaaatttatcatcatttgataatctaactctcgcttgagtattctacaagggaaacaaatatatttcaaatctgaaatcaaggaaatagtattgcatggagagacatgtaaaaagatttatttgattacatatatcttgaaacgtgtttgaggtagaacaatttaaagatatgcgacacactgatattagaagctaagtgattttcagtacatgagaacaaatcacggggatacgtaagactagtcaaacgcatgactaattgggctaacaagcttcctataatcgatcggctgaccaaattttgattcatatatttactttgtgccctatattcaaatcatattttgattaagggagaagttgaagagagaagggagggaataaggattagttaatatagttggtgccaaatgccaaaagaaaacttcaacagtcaatcattactaatcattatgatacaatgattgggttaagacttaaaaaccaacatgattaacaagattttaatcaccccctcatacatatacaactttgacttctcatgcacagcatacaaacacagagtaccaaccaaaaatgttagaaaacatatctgtaaatgtgatttggttgtgaaattagattctcatgatttgctcgcccaaattgattcatcattaaaactttccctttgcgatacaaggatatcaaatggggatttctgattctatcttgtttagatcacattcgtacgtacttatgtcaaatcattaatctggtatctatatgttagttatatattttatcaaatgactacaatttttggttaaaccatcgcttgatattaggaaacgaccattcgtacaaataatatgcatttgtactttaatcgtaatctatatatgtatgattgatccttccaatatatgttttacattaaacactttttagtttttaaacgttcctaaaatttaaaatggtttattaaaaaagcccatggatgtatatatatatataaaggtgagagcatagttttgaagtcctgccatgagacggacttgagaagaaggactgtgcatacacaatcatcgcgaagaaatttcctaaagactggccagagttttttttaattgagttgacatagtttacaaaaaagaatcattgatacatacgtagatcgcatgcggaaatgttaactcatttagcttgcatccgcgatttacaaatttattctgtactacgttatactacttcggattgggtcaccagtcccacttgatgttattaatttaaaataaattttcgattgagtaacgtcaaactgctttgcaattgcaatctcaactaagcatttgagcccccaaagaaaaaaacattcaattggtgccaatgtgggtaatatcggtatcattcaattccacaattccaatcatatgagatccaatcatattcgtccacaataaaaacataagtttttttttttttcaaataatcacaatgctacattattttaattaaaaaaaaaaaaactgaaagtgtataattgagggcagaatttgtagttacataaagatggaaagaggtcttaatactatggctcttatgggcgctcacacttttacctttcttggaactcatcatttttctctcctcttcacatttgatatttttaaaaaaaaaattgcatgatgcttaaactacattgtgtcattgttgttatatatttattggttgtatatcttttcgttacttctggtaaatcatatagttcagcttcattgtttggttatcttggaatacgaaactacttttttattattattgagaaattcatataagtataactgtaaaagcacattaatgaattgcatgtctgccggctacgcacccagccgagcacgtatgcgatttttttttttatgtctgtatagtcaatgtcatatacatatatacgtatatatacttgatttatgggataatttttaaaaatccacaaaacacgctttttccttcaaaattaacggctttttgcaaacaaataaaacgaaatcataaatggcaatttgtgtttcgtttgttgtcatttacaatatttacgtgttgtgtatgtatttgattgtatggtatttttttttgtattgcataaattatacgatagttccttttatcgatacatgtaagacatactactcaatcctaattcgtttcttatgataaaaaaattgaccaggtggattacacccttataaaatattaaacgctaagggataatggacagctttattattgattgttgattgaagtctgattcaaatagagcgttgtgaaaactattactattatagttttccatggactaaattttggtgagctggtctatgaactggattggccattgacgtacttcacgactcaatcaaaacctctaatcactcccctgataaaattttgaattctgattatttattctttctaaattttctatttcttcgaatctttgattttttttatagcaagtttgtttcttattattgcggaagtttttttttttttgtcgtttgcggaagttaagtaggcaaaagaaagaaaggcgattattcttacatatgtggccaaaacaaaagatgagtattttacacttgctcgcatttaccaaaagcatcacaagattaaatattagcagagaaactatgtgacaaagtccataattcctggttatatatactataatatagcttatatttattccttcactaagcaatcaattacacctaaacctaattataaacgaaaagtttaaaattatgtgtatattgaaaaccctttatcaaaaaaaaaaaaaaacaagactgattgcattacgaaaacttaaagagatctagtttgctccaccaggcaccaggggaggatccatctagagaaactagagaggcgcttcagcaatagactcaggcagtcagccaacacatttgctgctctaggaatgtaagaaaaagagattgtagagaaagaataagccagggatcataatgtcatgaataagacccactagttcatttactaccgcattagcgttgaggagatcaataaggaatgcaaggctggtcctctgccttttattatttccttcttttacaacgtaaattgtccttttaaactttttggactgttttgtttcctttctatatcccgtgatgtaatcaaatctagtgttacacaaataatgaattaataaaaacaaaaataagttttatattttagacaaataattaggggttgagatgtatacgtggcgaaaccttagaagttgtcagaagacgccgaaaagacatttgcctaaatacaaagcataatcctgattagtgtcttagtgattagtatgcctcctaatgactttaacttaacccaaacatagcatgtgccagctatgaccacacacacgaccacttaattagtactaaataatgacgcttttaatcctgagtaggcattaaggtttaatgaattacagctgcaaactgttaaaagtgaaagtctatctttttctttacataataaagtattaaaactcattagttcttgggctagtcacttttacaaacgtttttctttttcctacaaattctaatatatatcgtattgaaaaagaactagattctatttttataaatgaaactaatcaatggtcaattgaaagctataattagttttcttagcttggaatatatagaggaagactaaacttttaatttggttcatcccctctgtttttggctaatcacctgctcataatgcaaacaaattagaatacttgaggcgataattgtttttaaggaaaaccaaaacataaaaagaatagatattaaaaagtttgccccaagaaaaatagaaaagaatagatattacaaaaaagaatgacgtcgacgttccgtgggttcgtaggtctaagctcagtgtttccttctttgtgcccaaaccctcggacggagtcggagggttctttttaagagatgaaaaatttatgttgaacaaagcaccaatttccggatcctcagtagttgagttacatctccttgcgtacaatcttgaccgtgatttaatatacatcaaagcgcagttggactcattcgagatcagtataatttggtagaaatcaaattagtgataagatgatacatgcaatatatagtgacgaaggggagaaaaagacagtagtacaatgccgatgcatagcatttcgatggttagtctggtcatgcaattattgaaattgttaagtaaataatgaaataccgcgcgagaagcgaagaagatttgattgtaggatggaaaaaatgtaaagaagttggaagatccttaaatccaacaagtggggtatgtacgtaacgcatgagggagatgcaccctaccctccatatcatgcacttattgacccaccaacaaattctttttttttttttaataagacctacaaatatttactactaatttgcctataattgatttccacaaatttaccattatatagatagttaaacccttcaagcatttattttcgttgcaaaatatttactaatgtattcacaaaatatgtaattcctgtacgtaaatcggtaacagcagagtgtatatgtgtattagtcaacagttattaggtttcacgaactagatgaatcatatatgtgtagaactttttctctaaatatagttgtgtcattaagtataatcttgactagactgaatttggagagagatgcacatcatattagaccaagagtaacaattgcatatggaattcactgttttatgtcattcacattaattttttcaagatgtttaatgattaactttttacataatgttttggctgctttatttttgataaaatttctattttggctgcttgttgttgtgagaatattttttcaaaagccagataaaaaatggagatggggcatcgtcgcacatggtggcatggacacatttccaaaactacaaaaaaataagtgttttggtaagtcgaaacatatatttatggaaaataaaatgaagttgttcgggattcaaaagcatcttcggttaacatttaactgctagtggtgagagaagcttatacaatttggttatatgttttgtttatcataaaaagttaatcttactaaagaaaattgatttccatttctctttattatagccacccatgtggtggttactattttaactgaagccaaactttgaaacttactaaaagttataaagttaagaacttaaatttggttttctcttggcattttttttagtaatgactaatccaaatttaaatatcttgttttgtcaacaaatttaaatggctttagttctgtcaacaaatatatcttgtcagttttactgtttaaatttataacatggtgtgtgtagtcaatagaaagtgaatgcaaacgtcaaaatacgaatcttataacctgaggtccaagtttttcttttccataatgcgttcattaacgcaattataaaaaccaagactttaaatacgaaccatgataaataaatataccataatcaaaaaaattcaatcaataataattcatagaaagacagagaaagacaatttcgtaattaactataaaatctggtggcattgttattttctcttcactatataaacttggtctctcccaaacctcacaaatccctcctccacctgaaacattttctctcactttctcgagaaaatataacttcagaacttttcagagttagtttgacttcaaacgtgggaaaaaatggccggaagtcttgtaaaatgcagcaagatccgtcacattgtgagactcagacaaatgctccggcgatggcgtaacaaagcgcggttatcttcggtcagccgttgtgtaccgtcggatgttccatctggacacgtggcagtttgtgtgggtagcggttgcaggagatttgtggtgcgtgcgtcgtacctgaaccatcctatcataagcaatcttctggttcaagctgaggaagagtttggttttgctaaccaaggaccgttggttattccttgcgaagaatcggttttcgaagaagcgatccggtttatatcccggtctgattcttctcggtctagccggtttacttgtcctgatgatcttcagaaatgtaacggagggatcaaaatcaaaagcaagctagatctgatgattgaatctcgaccgttgcttcatggcgtcgctgagaaagctatctggtgatccgacggtgcagattgttgtcagttcgtatgattctgacccggtttgactcggtacgagtttaatcgccatggaaggaagtacagaagaaggcgagtttttgaataaatcgtcattgactcggctgagttttaccaccgagtcgggtgggtactaactttttaatcgggttcgggtctttttaatttttgatttatatatttaattatattgggtactcactgagtcgagtcagacgatcgaaggagatggcggttaaaggtgggtgagtcgtacgtacgtaccaccgagtcatccctggttcgaatccgagtttcaaaatggtaaatgtaaataagacaaatgtactgaaatgggttcatggaaaagaagagagaaagtgattttgattcagtgctttagattcgaatattgtcacttttctctgtaaattttataatcgaaatttatgctaagtacttttcataatctctgttttcttaaagaagttgatgtgctgaatttattacagtcaaaatatttgtaacaaaagtacaaatatttcccattaacttacaacagttaataggatttaaatacttatatattatataataggggattcaaagtacaaatcttttaatacacacaaaaaaagtacaaatatttatttaccaagacaaaaaatgaaagaaagaagtacaaatctttgtccataatagggttatttggtttaacgaatatatttaagatttctaatggttgttcctttgtgatattttttttactcatgcgacttagtttttacttgtggaaaagtcatcatccattgtcaagtgttttagtcacctgattagcagataaataatgcagaaatacgaagaatgaaatatactttttgagttttggaatataagtaagattgataaattttgatgaaataaaaatattcgatccgaccaaggccatgtgatggaaggactattagcccattttatctgtttcgcctgtgtttcgactttttttcctttttgtcttcactttctctatacagtaaaaagtacagtccacggtactcacaatcatttacatttattttaattaatcttgattgttttcttacggattttttggtgtacttttgagatttgtttatataactaaccctaaattattgctacaacttaaaggtagtttacattattgccttgctctctcccgatctctaattctatggtctatagtatattagtaaaactatgccttttagtactaaacacaataaatatgtctacgttgatgcatgtgaagtaaaacgaatgattttatgccgtagactacaacattttcctttacgatatggaattgcatgatattttttataaacaatgacaaatatcaaagataataaataacaactacgaattcgaatatatgcggcggattaagtaatttaatttagttggtgcggaaccaacatatacgggaacaatttaatatggtcaatgcgatatgattgtggtcaaaatgattactagtgagttaaaaagtatattaatataactggcatgtaagcctgtaactattctttaccagagaaaataatgtttttaaaaagttgttaaagttattttatgcaaatctacaatgtaacctcttaaaagttaagttaatcaagttacgtacggtcggttgcggtgacaaagcaaaactcattttcggtgcaacacaaacgtgttgagcgcgatcactaaatgtctatcatcaagggatttggattcaaaatttcatttttcagattctttgcaatcggttttagtttgattgttttttggtagatgtggaagtatcagctacctgttttcagttacacaaaattgtaattatttgaaaaggaaatgcacttagagatggaaaaattgggattatgagttacctgtttacattactttctaaaagttataacaacaccatatatgtatttatgaaaatgaccttgtttccatcctaaaccccacaatatacgatatctggcaatggaactttcatgttcaacaatatattatatatatactggtctctcttcatatatgtacgaacagagtacctccacttgttatatggaatatacgtttttagtggattcgtgtaaaatatactatgtattagatggagaaattaacttaatcacgacaaaaataagattagagacacttaattatattatattttctgctattgatagaaaaatgatgagaagattcttcgaaaagacagcgaagagaggcccattgggagccaacgatccaatcacggaactttttaattttcctttttggcccttaacatctactcattttacactccgttaccttgcgctcattgtttttagtatcttttttttctctcaatccaaatccaaactttgttttccaataaataaaggtattttgaggaaagttaattatttggatgtttagagaaaaatgaaagaattgtcgtggttgcatgtatctatgctatttgtagcgcttcgagaaaagaaagtaaaactatgatcgttgactacttctagttgtgatattcttcacgcatggttcccgttaaaactcattttctttaattttattctcggtctcgttagttatgtttttaccattgattttcattattttataatgcgtcagtgtttagcattaaaggattttttaactttgtttatttcaactatagcaacaagcagagaagttcatgttcacgcaaattatagtgtttgactcgaaattttgaaaatgaaagaaaagaatattactatattaggattagggctaattccggtgggtacgtatgtgtagagagtagagaagagtgaaaccagcggcctttttgtctcttacttcgagtatactcttattcttttccatatgtatttatccatcgaaaaaattgatctgtagcgtttaactttactaacatgtcgagcgattctatgtaaattattggattcaaattaatctgaatatgaagtgatcaaatattgaattcgagcaaatgatcttctacctagttggacaaattactctatatggaataggatatataggttcgatacattttctttcatcagctgacaacactatggctaatctttcccaaaataacaacagtttgtgtaactcttataggattcttgcgtttgtgaaacatagaattaattttacaactataatactttctatataatcttacgaacctattttttaatcttttcatataacacaaaattaggtttgacaattctagagccacatagaaagtctccaatatagatgggtataaagctgatgataaacagttttcggaactctctatttaatttgattatttatatgcatcaagcttttcatttttggatgttaagaaggaagggaaacgtataaatgataaaaccgcccaaaaatgtgaaaagtcatgataatacagaattgggtctgcttcactgattgcatatttgcatgtctttataccaactttaaaggtcagaaaactttcggggaaaaatcaaagattcaggaactgaggaaggtaagatatgtcactttggttggcaactgagaaaatggttgtcaattttttatatctaattatatatctagtatttattcgttactattagagtttatttttggattttttttgtatgtcttgtcgatagaaaatcattgtctagacttttgaaggatgggtctcgttctgtatcttcgtacagtatgtgaccagtaaagggttatgagcaatattggttcttgatcacttaattagtattttgtttagctgttattcatgacatgacatatggaaactgaaacgtaatcaaaattgaaatttattgttcgtttgaaatgttagatatttctgtcacataaaactctttactgtaggatatttttattaaatttgaaccaaaaattaacgtacctaaaattgttttactaggttggtacctaattcaagtagattcgatctaacttctgccatatatgtagtgtttaaatgttataaactatatacatatatagagtgtatgttacagctagtagtcggacacattgattatgttttttttttttttgtgtacttcctatagtatagatcgtaaaccaaatgaaaattgcttcatattcaattaatttttctccaatcggtttaagtgagttacgtccacgcagcactctcgtgtgaaagaaaacgttatcaacaattagtatctggttttagtctataatcaatttctaacgtatgtgattttattctgctttttttttttctgttgcatgaaatgtttgttttttggttttcttttatactgtgatatttactttaacaagagtttttaaacaataagatataaaacaaaattgggctatggctaaatatgggtacaccaaagaagtgtctactactggtggaatgggcattccagggatttatctaccagaaacttatgcaaggtcgtgatagcacttatcgatactttggtaaggcctactatataaagtttatattgaatgtattatgccacttggtgggctgggctttcactattcactccgttttatatccaaaatttgagacccaactagtcaggcacttgcggctgaaaataaccggtacggttcggttggaaaggatggagacaagaagtagtcacgtgattcagttacaaaaacaaaaccgttggttaatcacgtgataaccgattaatatggtttttggttaggttgaaacggtgtgtttggtgaaggacagcgacacaacacaaacgtgcacttcaaaagtgtgtgcagtctacagtacagtacatacctctccataccttctcatcattctctctagctcattttctctttttcacgcacttctttgtatgatttgtatgttattcttatcattacatagaaataaaagataaatcatcaaggacccatctgaactatcttcctccatgtttttttttggtttacaactataaagatcgtaaggagaaaaattgatagaacgagagggtaacatgaatggatggtaaaaggcacaaactactgcaaaatagtgccaattcatacaaaacaaaacaagatttatgtatatgatgaatttgtgggtcttttctcttcataatttgttctcagcaaagtttgaaggtacatatatggttcattctgaaaattggaccacctaagttgccttggcaatatttggtgtacatgaagatgaatctgcatgtagagcaaaacatggaaatgaaaagaaaaacaaatccacaaatcaaagatactatctattttctttaatcaggtaaacttgtccgttgtccagattggttcatatatttattttataaacatttttccctaaataaattgttgaattataaacgacactcagaaggatggttcggacatggagacatggactacgagtggttgtagtgggaacgtacatataacatatgtgtgtatgtatagcctttgtttcgatttcaattactaaaaatgtgcaatacaattaacttctcacctctgtttctctttgttatttgtcttatgaggaattgcaacgtacgagcggactaggtcacacgcacatgttccttaccattttttctgattccccgcatatatttttcgtaatttgtttatttaattgccttgtgaaatcttttagttagacagtaaaatgggttctactgaaaatagatttttacatttctatgtactagtaagagctagaattacgtttaacataatgtttctgtagattacataagggtacgaaatcccatcttgaacaaacaagaaaagttatacaatcaaccgaataagtttttactatacgtataaactggtcacatagtaatgtcggttttgatagaataatgggtttaattagggagtaaaaaaaaatcaattaaattactactaaagatgcatttaactaccatgattataacatgaggaaaagacaagaatttaatctttctccatcttatcactctcactcattatttttcaaagacatgatttgattaaagggggaaatgaatatataatgatcattatagctaactaataatcaaagtaagtacgttgaatttaggcggcctgccacatccaacaaaatacacatttgctatctttttacttttgtattgtcgataagaatgttttacttataaaccctccattaatacccccaaagtatgaaaattattctattgatatatttcccaataatcaaataaaaatcgaattaatggccatgaagatgcttatgaggcatttttgatatattcttcgttcttcttttggttttgagttttgacaacaagaaaaatccataaaaatgattaagacgtaatacttttatctaataaaggagagacaaattttagtaattgagtaattaattagaagaggggtttagtagaaacataatgacaagcgaatggcccaactccatcacttctggtttataatcaaaggccctattcctctacttttaatttcgtcatctaccaaatattttttaaaatataaatttattaaaaagtagtttagatgaaataaatcaaaacaaattttgaacatataaaataatggtatcgggaatgtaaacgtgtcataaattttagaaggaataatatttacataatttgtaggactcttttctacgtgtccactgtaattctgtgagcatgcttgtaaaaaaaaaatgaaagcacaaaaaaagaaaacacagttcctcacgatgataatgattgccaacagaggaagcaaaagatcaaaatgaaagttggatcatgtgacttttacagaacagaatcctaaggaatgtgatataataaataaatttaaagctaaaacaatattcgatgattatgttggtataatattaaaaagataatgcgtacttttttttcctttcaagtagactttttttcctacaaaaaagaagtggagtaaagctgtcttgtgtgctggtgttctttggggacccattttcgttgaaataataaataaaacaaatttaacaaaaaaataatatattttttctccaaatgtctatttattgttaacttttaaaaatctattttattgcccataaaaattgtaacgtacgaacaaagcaaaggctggaaataaaaactggcctatttcgaggtggaaaatcattctcttgtaatcatcgctcgttccaccaccgcaagatcttcactctttatatttgcctagtgtcttgtgttactaattagagtatactagttattaattagataacctttagaaattatatctgttaatcttaagttcttaacaaacattcttttcttgtctcatattcttttttgtttgaaatttatgaaattatggtttttatatataaattgagaatctttatgcgaaaactttacttcgattgtaacttataggaaaaatgataatttaccactttcacaatactacatgtcaatagaaatgatataggtgcataccttatatattgatcatgtagttacgtggattataatttgcgttatttttttcagtattttatacaactacgtttatataaagttaatcaaaattagattactcggaagttttgtaattaattctttttaccaaatgcattaagtattcaatttttatgcatttacagatgtgaattaactcaacgtgcaggaaaatttccacatggtacacactgtaaatatatctacgtggctcacatgtgcattgcacttccaaggagcgaacacttaattgaaattctccttttcgtgtccctttttatatatgctattttttttttttttggaattttcgttcacatgaatattttcacattttttagctgatacattaatatatatcagacagaaaataattggacatactagtttaatgcaatataaatagtaattaatgttatccacacggacatgtataaagttcgaggatatttttgtttaaaataaaaacggaattcttatgaaaggtattgtggatagttgttacattctatataaatcaaatatctacttgtataatttatgtaaataataagtattttgtaaattgtgagtagttgatgaacctctgtcatggttttagctggtaaaggagaattaatttgtattttattgtagttggtaacagacagttaagagcattaggtcagtatctacgtttaatcggttatattattaatacatagaattaaaaaaaccacctacaaaacaaaatataaatagcaaactccagcttttagtgatatttgtaataaatatcacatttaaattattgatgattagtagattatgtattatttattgctacaaatttcggttggataagtcgtctagtcaccgtgctaaattatgtaaatggaacccttaggtacgagagaataaataagaagattattctaagtttagtagtcgagaaaaaaaagtttagtagccgaacagaacctgattgacattatcctagtgataaagacatacttatattagagtaaaatttatagtacattttgtataattatgtacagaaacttaatctgggttgatatagcatataggtcggtaattattatttaaaatcttaatctaagcgtgtttaggttaatagtcaacatctgtaggtttgaacgagtcgatattaatctctttttagtcatatttatttatcttaaactcttacacaaaatgttcaacgaaaaacaaataagtaaaataaaccatgtaccattgatttggattaaatagcaaagtccagtttttagtggcagttgtataataaaagattgatgattagtagtagatctaattattaattaattgctatgattatcggtttgatgggtcgtcctcgtgtcaccgtaccaaatcaagtaaatgaaactcttgcttacgagagaataaataagtttattagctaactgcggaactgattgacattgttccacttttcaagatataaaacaaacccaaaatttatagaatattaataacaaacatgcaccaaacttaatttggatcgatgtccgtcggtaattattattaaaatcttaagttaagcattgtcaggtttatggtcaacatctgcaagttgaattagtcggtattaatctctcttggcaatatttgtgagatttactgaaaagttaaaaactaccatccacaaaatgtttaaatagaagataggagaaccaaaaaatctgattaaacgaaaactatcttatgaaatatttttcttcccaaatcgggattattttaaccaatatagtataatttaatggtctttgctaatgtagtgaaatatatcactatctagatttaaatccacataataccatattgttggacaaagaaaaatggaagatgttctcactcgatctagggtcaaaaactcaaaaatgattgttgtttttttatgtatcctcacgtttgagactattaataagtttttgtttcactcgcatatttatttgttttgtgtgtaagtttgtcgtttggtcgaagaaggcaaattcacattaaggcattaggtgaggtatagtaatacgagtttctcttcctaaatacgacgtcgttttctagtttacacgtatcaaggctttatttgaatggacccagtcacagtctcactcactcaaatatgactaagagttaaaaatcttattttaatacgattatacgaaactgacccaccatgggttccactggttcagtaatcgttttgtacgggtcatgactcaacccgctacacagtccaaacagcacgggtcatgacccgaccatggactgttggatatgtttttttactttcatgtcgcatcgttaaattacgtattgtttcgtttggacagataagaaatgacaaatatacaggatatatgtcttatttatagggattgccgtaaaatgttattatgattattgagataaagcgtataatcgatccacacacatactaatgaccctagataatgtagacatatcacgtgatgaaaagcgcgttacgtggtattttgatatttggacccatctctaattgccttttaactattcttcaatttatatatcctccatcgtcagttgtcactaaaaaaattacgtgattcaacacagctcatcatattccaaacttgcttagaaatcataaactttttacgcttttgttttttaatctttatataatactttactgtttctttctttttttattcgtcttcaagaagttagaatctttggatatttttaaactaagcatattataaagaatcagattcagcgatatcgaattctatcaactattgattgataatggtgaatattgaataattttacttggtgttgttacgggcgagcgaagctaagaataaatagctagcgcatcacagccgtcggattgattctgagattagctattgtacaacgcagactacagtaagaccaaactggtaaacgtgtgaaaccaagccacgtgttttccttgctgtcaagctgctgtgtttgatttcgacaatagttggatgttgactttatttttcctctctattaatattaattctaaaagctgaattatattcacaaaaatttcgagataaaacaatcaaaaactgattgaaacaatttatgttttaattataaaatatttcctgaatttaatttgggtggtgagcaccattatttcaattaaatcacaagttgtttaatctaattaaaaaagtggataaaatgtgtaggtagacagtagacatattagatgatatacctaatgcaaatatttatgattattatgtaaagtcgaagctatttgatcatattttaattaagaaaatgacctcaataatcatattcgtttagactttactcttcacgtctcgttctttaaaacgagaaataatgtctgcttttataattgaaaataagtcgctatataggaaaaacaatatctgatttttataatgaaaataagtcgttatatcagttttgggttctcaatttttttcctaaattttaattaaaattgaaaagtcatatagttttttttttctctttacttttggtccgtggaattgctatttacagactgtagtgtacaaacttttgttcgctggcttgtctctaaaactatatgaatgcaattgtaagaagttaggaccatcggctgaatgaatttaataattatgtaaacattttcatgcatttttggttgttcgtagcatatgaccaaaactcagatttgtatttattatctatttttgggaggtaacaaaaacaagaaatgatcgtcctttttaatttccgttaagtttgagataaggtttaattaaacgagtggaaaacaaacgcttcaaattaatatcgtcggttgctccgtttcccatatttagtccatttagtcacttaccataatcatttttctacatattatttcgaaatttacttactacagtattaaaacactcaggtttcatcctaatcattctcgatgtaatactaatcatcattcatcagtcaaagtaattaaaagaaaaccagtcaaatttcttgatataaacaaaaaaaaacgcgaagaattatttgttaggagaacacatttaatgaacatttaatttatgtatattatcttccagcaaaatctcagtttaatgaagtgcattatcatcaacataaaccttctgtactaaatacaatctgtcccatttattttaatttatataaaaggaagattttattaaatactattccatgcttcatatagttgtagtggagtaaacagtatgatcacgatgtaaaaacagaaaagataatcataaaacagtcaaaaacgtttttttttcttttcaaaatgatcacatatacaatgtttgtatgaggtaagctaaatttatttctcttacaattacaaaatgttcagtaacaaatacgtctaagtataatactgtttatttaagtatcgcatgcaacggtaaatacaataaacgcttttcagaaatcaaagattgaaagtctcgaaaacgtcaatggcttaggtttattttgttcaggtcttctattaatagggattgtataaaaaggaagcacatgtgatacatgtcattgtttggctatcatcgtgataagaaattttaggaaaaagcctatctattcattccctttaacaaaaatagggctactgtgtatacggatttagtatttttatttgtttccgacttaaaaccagaattattactattaatcaacaggccaaatatctaaataatactatatagaattcaactaaattgaattattaaaagattattaaggagggtaaataaatagaaggagaataaaaaaaaaaaaaaaagaagagaaagtgaaggtaacgattagtttaaaggagagcctctgctacgttttaggctttgaagtgatacagaaggcattagatagatagatagattattttcaccatcaacatcaccatcaccgccactatcacaccataacccaccactcttcttcttcttcttcttcttctctctctttctctgtatctagaaacagagagtttttgattctctctgttttcaaatctgttccactaagctctcttgctttcgggaagattctgtttcactgctgcattttggatttttccggtgagtttttttctctctccatatatactctcctcctttcgattctacatttcttcggaattatgcttcgaaatcggagaactgtatatatcatgctctgttattagttcatttacaaaaaaaaaaaaaaaagaggaatcggcgtcggtgacttttggttttgtgatttgactgttgagaaaaaagcgtcggtgatttggttttcgaggtatttttttcttcgtctgccatttgtttggctttatatcctgaagttactgattctagtaatggcttttgtctccattttacttgatttttggaggtattcctttactagtttgattcctctcttcttttcatttacaagtgttcacagttcatcgaaatcagaaattttctagtcgattgcgatcgtcggtagtcttttgcctctgcatctctgattattttttactttctggcatttgctttctgatttgacttcaccacttcgtttcggaaagttcttaattatttttccgaaatcccaaaattgtatatatttggtttaatttttatgtttttgttttctgaaaatgttgaattgtttgttgattatgaagatggatcgtaagagttggccatggaagaagaaatcctctgagaaaacagctactgtcacagaagttgttgatcaggtactttgatcactaatcaatcactctttaaatttctcagatttgtttcatttaattctaagatttatgttttgattccttcacaaaaaaaaaaaaacaggaaaatgggaagaagccgagttatatccagatctcatttgatcaatacacgaatctaaatggtttaaaagatgaagtcaagagctacgaagaaaaagttacaaagcttgaggatcagatcaaagatttggatttgaagctatcaacagctaatgcagatattgtagcaaaggaggttttagtcaaacaacactccaaagttgctgaagaagctgtcacaggtaataaaatttgcatgcatttctgtgttttttcttttgagtcacatgtttttgatttatgtttggttttgattcaggttgggaaaaagctgaagcagaagcatcagctttgaaaacacatctcgaaaccattactctcgcaaagctcactgtcgaagatcgagcagcgcatttagatggagcgttaaaggagtgtatgagacaaataaggagtttaaaggaagagaatgaacagaagctgcatgatgttatcgctactaaaaccaaccaaatggacaatcttagagctgagtttgagtctaggattggggaatacgaggaagaactgcttcggtgtggtgctgagaatgacgcgctttcgagatcgttgcaagagaggtctaacatgctaatgaggataagtgaggagaagtctcaagcagagtctgagattgagcatcttaagaacaatatagagtcttgtgaaagggagataaatactctcaagtatgaaactcatgtgattaccaaagagttggagatccgtaacgaggaaaagaatatgagtatgagatctgcggaagcggcgaataagcagcatttggaaggtgtcaagaagattgcaaagttggaagctgagtgtcaaagattacgaactcttgtgagaaagaaacttcctggtcctgcagcacttgcacagatgaaaatggaggttgagagtttaggatttggagatcatcgtcaagatcatcgacaaagaaggtcaccggttagaccatctagtcctcttatgtctccaatgtcacacatgtctcaggtttctgagttctcacttgacaatatgcaaaagttccataaagaaaacgatttgcttactgagaggctacttgctatggaagaagaaacaaagatgcttaaagaagctttggctaagcgtaacagcgagcttcaagtgtcgagaaatctctgtgctaagacagctaataggctacaaaccttggaagctcaaatgatgagtaaaagtccaaccaagagaggttttgaaatgccagctgaaatcttttctcgtcaaaatgctagtaatcctcctagtatggcttcaatgtctgaggatggaaacgaagatgctagaagcgttgctggctctttgatgtctgaactctctcaatctaacaaggataaagccaacgcgaagatcaagaagaccgagagtgctaaccagttggagctgatggatgattttcttgaaatggaaaagctagcttgtctaccaaatggctcaaacgcaaatggttcgacggatcactcaagtgctgattccgatgctgagattccaccagcgactcaactgaagaaaagaatctccaatgtgcttcagtctctccctaaagatgctgcatttgagaagattttggcagagatacaatgtgcagttaaagatgcaggtgttaagctgccttctaagagtcatggagctaatttgaacggtcttacagaagaaaaggtgatagccatgtcaaatgagactacagaggaaaaagttaccattgtcgaggtaataacacaagaattgtctgatgctctttctcagatataccagtttgttacctatctttcaaaggaagcaacggcgtgttctgagaacagaactttctcccaaaaagttcaagaattctctaccacattcgagggagtcttgggcaaggaaaagacattggtcgattttctgtttgatctttcgcgagttttagtcgaagctagtgagctaaagatcgatgtgctagggttccacacatccacagtagagattcacagcccggattgcattgataaagtcgctctaccggaaaacaaagcacttcagaaagattcatcaggtgaacattaccagaatggttgttctcagagctcagattctgagattccggatgattgcaacggaacatctggctatgaaccaaagcttgcaacttgtaaatttacaacagaggagtttgaaggtttgaaactcgagaaagaaaaagcagagagcaaccttgcaagctgtgaagcagatcttgaagcaactaagaccaaactacaagaaacagagaaacttcttgctgaagtcaaatcagacttggaatctgctcagaagtctaatggcatgggcgagactcaactcaaatgcatggtggaatcatatagatctcttgaaactagatcatcggagctggaaatcgagttgacttctcttaaaggcaagatcgaaaacttagaagatgagcttcacgacgagaaggaaaatcatcgagaagctttagccaaatgccaagaactcgaggagcaattacaaaggtaacagcaaactaatcattactctctttttcaatgtagagtctctaaaaatctctaacttcacttttctacaaaacatcaggaacaaccaaaactgcccgaattgttcagtaatcgaagatgatcctaaaagcaaacaggtaaattttccaaagataccaatttattaccttacctaacagagatttcggttttttaaatttataattcatgacattgaatgtttttacacaggacaatgaactagcggctgctgcagagaagctagcagagtgtcaagagactatattacttctcgggaagcaactcaaatccatgtgtcctcaaacagaacaggttgcttcttctccaagccaagaacaacaagccctaaaccctgaagaagaggaatacgcaacttccacaaatcctcaagacagcaaattgagttcgccttcagacaaggatacaccatcgatgaatacaatgaaatctccggtcgcgtcgaaacatagacacacgaagtcgaactcgtcatcgtcctcatcaggacttactcctgagaaacactctagaggattcagcaggttcttctccactaaagcaaagtaaaaataaataaaaagaattaaaaaaagtataaatctaactatgttgtatatcgtatctattgctactatattatatgggttttgtttttaattttttactatgtgggaatgttattttaacttaggttttttcttactttctttctttatttctgtactgacaacaatttggtgttgaattccgcggcgtgtaaatgtcaagctaccaaatctcgttttctcattggtgtgcgttattttttaatctaaggtttcttaaaaacatctcaatttaatatcttttcccctatctttaaaaactgaaactacaagttctgtgttctgtaaacaaagccaatcaggtttcaaggtttaatgaaatctcaactttgggcttagcccagcccacttacaccgtctcatatgctacttgtttgaaggtgtatatagaatttcttgtgaaatcacatcccgtgggttgagaataacgccaacatttttctagtaatttcatacgaaatgcttgtttgaaggccggcaaaaacaaaagaaatcaagaaagaatgtctcagtgatgaacactccgatcgattaattggggttagtgcaacgatcctcattgtgggaatataccttttaaagcaattagcgatcatttactgataatcaatgttttgacagtttagctactgtttggtttaatagggcatcacatgttcacgtattcaacacctacacactattacatctaattctgacctatatcacaattcatttacttagacatgtcagacattcttctttctatttaaacggtctataatacaatgaatgtataattgaaaaatgatccgctgacgttattcaaatatgtagccaaaaattaatatatctatggagtacttataacctttcacgatgcattctcttgcttatcgtaagtgtacacttttcaggaatgccaacgaaggaagtaagttaaaaggttcgatgtggtcgtacgttagattgcaaatgacttataaaaaatagattccatttagaagatctaaaattttatgagtccggcagtatctaattggtagaacatttctgagagctgtcttcatacctaaagacagtatacacagtcctagctacatgtgttggtgatactcagattcgttctttttctgaaagaagctgcaaactattccaccaattagtctgacagttttaaaatttttcgatggaaactaatttataattaatgtctaatcttaattaggaatttctgaaattcagacgtaagtttgtgttaagtcattgtcattgaagacagctaatattaagatttggcttttgtcttaccattaaccctacataaaaatagtttgcgcttataaattaagatttgttcaaccaaaaatagtaaagattctgattatgataatgtattataccatgtggctttgatgagtatccttgtcgcttctctctgtttggttaatcatatttggtttgctctggttttgagataacatagttttttcttacatccaaatccattaaaagttatatacgtttccaacttccttaccatatcatcttctctaataaatattatacgttcgcgaagacaacggccgagccattgaaagacattcaatacattttgtagttgacttacgtataatatcccataatattaacatagcactttcgtattttgtctacatcaactcgtttttagctagctagggaagtggaaatattgctttcaacaaaaagttaggacgatcaatggggctttgaataaatagtcggctaaaatttgggaagtatagttgacctgattatacaaatcaaataatttcagctaatgcacattcagtggctctctagtgatttaatcactatttatggtcaatacacattcattgcaaatcattatagaccgtccttttttggggggaaaatttcatagtattaacacgtcggctttatttcattttttcaaaaatcattacaaacgtcagagacttttcatattttggaaattttttaacattttttagtatttttaaggctctctagatttctgaatctcaatcaacatatattttcgttaaaatatgttgaaaataaaataaataaacagagttgattttcatcgtgttgtgaggttttaaggaaactcgaccgtccgttaagtaccgtacggtctgaagaaggagcatttaggtaaaaataattgaaacccgcatgcgatatgtttgaagtttgcgttaaatctgagccctcaaaaacatgaacgtgggtcatcacgtaccattcttgatacttgattagcatacgatcattatcataactcgaaggtataataatattgcagggagatatctacttttatagttttatcagatttacaaagttttgggtccacttgcatgtgctatctctcagacattgatatgacttctccaatgtatatattttgttaaaatcgtagcttttttttttggtagtaattaagaatattttttctacagagaattaagtttcaagtgactaataaattcttaatctctttaggtgactaaattcatgatttatagtcgggtgatattatttgtaattatattgatatttagatgacatgttacataagatcgaagaattgttctgtagaaattgttatagaattatcatgatttggttattccctggtaagtggtgaaattggagcaactcgtggaatcgttttagaacttttattccagacgttactaccaatgccaaatacattattttcatggcagagatgtcttctttttaccaactaagcgcatttctgtagtgaataaagggaaaggccagaaaacgggcatgagaattgtgaataataaaattatattttcctgcttctgcatgtgtgtgtttatgcatagtgtcaattttttttgtcattatcctggaatcagcatttcgatgctttcttaactatttatttattagttcaacagttttaacttttaacggctaaaaaactgccgattccaaaagaaggcatccttcgccttgggattccttgtttggacgatgtcgcacagtaacgtacttttttaaaaacttcaaaaagtaaaacaagttttgcgagcaaactaaatcgatatcatactatatgcaacgcgaattccactcgtgtgaatgaaatgagtttccatttcttcaaatggaaacaaatatagtttttttggatcaaattatacatgcttttaacttggttaaactatgtacagatttacattatattaaactccttgaatggagtatatcatatatgcaagaatatatatgatagaaaatggacaaaaccaaattataagaagaaaaatagcattcatcactgatattatataatagtccctcaatgggttgtacagataatcacaccaccacaacgagaaaaattatcagagtatttgcttattttcctccctacaaatctaagataattaatataaccaaactggttttatagatcactcttagaggcatctctagagttagtctcgttctaatagaaacacttacccccattgtaccccaaaatcacctaaaattttaaaggctacctaaaacagatctttatcctcaagaataaaacactaaatatatgttggctgaagcatagaggtgatgagagatttgaaagctacttcctcacaagggatagtgagacccatgttgtgatcgaagccaaactcttcctcagcttgttgtagaagaagctgaaactcgggtcgggtcaaaaacgaaatgggtaagacgtacctgacccgattccctcctacgtagaccacgaagtgacctttgggaacatccagaggaagagagtctccatcatgttcatgtgtatcgttatactcactgctctgtttctttcccaaacttgaacacctcttcaagatttgctttatcatagtcgtttgtgtcagcttgctccggtttataatcgccattcccttgggaaatggggttttctttgttatcttctatgtttttgttgtggtttgctagaggagtgaggagatagtgaagaagggtatgctgagttatggttttggggtatttatggatggttacactaaatatatagagttttataaataaatttatatactactttataatattagagtcttgtgatgggtctaaccgtctaagattcactagacagatcctagttttggaccgggtcaatgtttttttgtttaaggtttggaagaaaaaatagtttattttggtgttgtttattacataagagtctatataagaccaattaggtggaggttttaaacctgaaatcagaattttgttcgttaataatccaaaattgttagaccatttttatttgtatgcgtggttggagccactaaattctccatcttagggctggttcttgtaacatcaatatataaaatgtatatacaactatttttagctagtgtacatatatccttttacaaatactattgtacatctatgcaatgtatacaggaagaggtgattttgaggcgtggggtaaagtaagatgtgtttgtctcgatatatgaagaatgtgtctgctacagaataaatatttgttgtaccttgttaaaacaaattttgtcaataagttgtatatatgtttaaattatgtagatatacaatacaaattatttgtcgaggttttttgttttgtttgataacatctattgtccaagtcaaatattattttggttgaagattagagaaaatgttgtagagaaacgactctaggtctttataaaaaaacaacaactcttggttcatcaggtttagcttgaaaaagatggcaaatataaaatgttataaaactccgatgaatgcaaattaatggcacacattagtcgcaatagaggctgtatctaactttcaacatggattcaaagttgtaaacttttctaactacctttcgggccacacaaaaaactctaattaaatatacttgattatatattgtcggaatgtatttgcatgccttacttcattacaatttcaaaataacaaaactagcgttttaaaaaaaaaactagaaacaggaatataatgtgatgtactattttttttttttccagttttgaacgtaactaattatgcaaacgctaatgctagccgtgacgtacttgtttgtaatttcagtttaaacatcgaaaagctaagagcctgagactatatctatcgatgattagtaaccaaaaagggtagcttatcgatgcgttggtgaaaaggacaatataatgcaaacgtgaaggactaaggacagtaccatagccaattaaggcttcctcaattaatattcctgccattgcaattatgtatgcacatgcacgacctaaaacccatcccattcatattctatttttctatttattgttttgctgattggggtattcatgttaaaatccaaaattgttttcaaaattaatagtcgccgtatgaattttgctttagaccaaaagacgatgaccaataaactatagatgatcaatttatttagctaaagaaaaggagtttaattgttgtgtttagtggttcatactttaatactttatacattgtgcatatatattacatgaatgtcatgttagctggtctgcaacggcgcatcgctatgtcttttggtttgtgcaaacgagctgtgactaaactttattattgggctttattgtagcccaatatgaattacgcggcaaaagatggattgtgaacttgtcaagatataactacgaaaatttaacctaaataatttgacaaataccaaagtcgacgatggtgaaaagaggtcggagcggcggcgtttcaaatcggagatttcaaaacctagttctccagtcatctgagaagggatcaacggcagaggaaatagtcaatgagctccgttcaaaggaccgtgaatgggctcgattgagtcgtcatgttctgctacttaacgtcaaccaaacccttcaatccagaaatgtaagcgacaaagacgaagaagaaagcaatgcaagatcaaaatcacggaagagagccgccacagcttcaccttcaggatcgtcgtggtctgatgccgtggggacggaaatgtattagatgatagtggtaagtcaactccacagtttgatttgataaatgaaaaccttagggcttcgtatgatacaaggaaacatattagggtttcagatgtggaattagagatagggaataagaataaaaaaggtaagaaatttaaggatcttggtgggttaaaggagatattgcatgacctaacgaattgagtaaagaatcctctgctttttcctgaaatgcatgaacgtcttcaagagaagccaatttctgggattttacttcatggtccacctggttgtggcaagtctacattggctcgtgcatgccattgctaatgaaactggtgttccttttcatatgatctctgcttctgaggttgtttctggtgtttcgggtgaatctgaagagaatataagaaaactcttctctaaagcgtatagaactgctccttcgattatctttatcgatgagattgaggcgattgcgtcaaagagggataatcatcagcaaaagggtatggagactcgtattgttacacagttgatgaattgtatggaccaagagtatatgcttcaaaagatgagagagtctggttctgaaactagcggccatgttatcgttatttcagctaccaatagacctgaagctcttgatccagctttgtgaaggtcactacgattcgacaaggatttttgtctcggaatgccagatgagaaggcaagagaagagattcttactttgatactacggaaccgtcctcttgacccaagttttgatattgcaaggattgttcgtaagacttcaggatttgttggagcggatctagcacttttggttaaggaagctgcaaatgtggcaatggagagattagtgaaatcaagaggatcagaacttggaactgatattgattctttgttgagtatgcagccatgtccatttccaccacaagtgatagagaaacttttctacactatctcggattttgaggaagcattgaaaaagtttaaaccttcgttaacaagagaaggattctctactactcctagtgtaacatgggaagatattggcggtcttgatcatataagaaaggagttttatagcgatataatcaaaccgttgaaatatccagaagagtgcgagggattcaagttctgttcagggagggattttttgctatatggaccacctggttgtggtaaaacattagttgccaaagccgtggctaacaaagcagaaaccaactttatccgtgtcgagggaccggagctttgagcaaatacgttggagatagcgagaaagcgattagggagctatttaaccttgcaaggatgtgttcaccgtgcataatcttcttcgacgaggttgatgcattgacaacaaaacgtgggtcaggagaaggtgcttgggttgttgaaagaccattgactcagttgctcaatgaaatgagcggtggaaaagaacgagatggagtgtttgtgattggtgcaacgaatagaccggagatgatggatcctgcgattacaagaccagggaggtttgggaaacatatctatatacctcttccaaactctgttcaacgaggtttgattctgaaatctcttgcgaggaagattcctttagacacaagtgttgatttggatgctatagctaggcgttgtgagaattttagtggagctgatcttgaagctttggttatagaagctggtttggcggctcgagacgatgagacaggctcgtaccctcgtaggacaaagatggttcattttgaggaagcgtcgagtcgtatgcaaagcggcaggtgaagagaaaagtcaagagattggccaagtttttccagttttcaacattttttcaaaacttcatgcttattttttttggattattggtcaagtaagctagtttggttttaccatgttatatctgcttggtcaaataagatgttatgtcataagttcatagcataacattttaactccgcccatactgattgcaaattttccgatgaactatatagttcaagattattcaatgtgtatcattattggaatagaaatatagcaatctttctgttctttctaaaatgatgttactttctcaatttaagacaactgatttacataaacccatctaaaccacaacaaaagaagacagaaaataatatgtcaaacacagttcttcaaagaatctccagcaccttgaaagaagaaggaagaaagcacaaagtccgcgatgaagattccgacaagagacatgacgacagcagaagttgtagattctccaacacctttagcacctccagtagtggttactccccaagaacaactaattaccgatattatagctccaaagacttgagatttaatcatggcactcacaatgtcccatggtctaagtgctcggtgagccgagtccatgattatgttaatgctgatcccgtaaactgcatcagagagcagagcgcttgaagccataccaacagtgaaacacatgagtgtcagaaacggtagagccaaacacgaggcgatgactcttggagtgattagataatcaattgggtcagctcctaaaacacggagtgtatcagtttgctctgagacttgcattgtccctagttcagctgcaaatgcacttcccattcgtccagcaacaacaatcgatgtgatgactggacttagctctctagagaaggctaaagccaagacacctccaatggatctgtttagacctagtctagtgaattctctaacgaactggattgtgaaagccataccaacaaatgtagaagtcagaagacaaactcctagagatttcggtccggttctctccagctgttgaagagtgtttctccagtgaatcttaccctttaaaatccggagaacgacttgtcctgctataataggaactgataaacctctccatatgtacttagaaggtgaccatttgctgaacggaagctcggcttcttgactgggtgcgttgttttcagtagaggtttcttcttccaacatagacatggatgggtgaccatcattagcattcaaattcacatataatcttctttgccgtatcggacttgaaatcccataagattgagtctttccaatgaaaccaacttgacaaagctttgggggcttaataccaatcgaagcatcaaaccgtggaaagactctgcaaaattaatattcaagaatccaaaataacatattctgacaatgaagcaaatgagaaagcttataaacttatggcaacacaaaatacctatgagggaaacaaaacgattgatggatacaacaagtctgcatcattgtggttgccttcttctttacgacctcactgatttagtgcctctcaatttgtagcaataagcacgatttcaacagctgaatctgtaataaacccagaatcaaattgatttacaatcaaatagaattaggacacaacagattttgcataagagatccaaatcgagacaaaaagtttccggtgacctgatcaattaatcaatctctgactctgaggcagccaaattcgaatcccagtataagatatgtacggaccaatctaggtgaaatctctactatatagaaggggaacaaataattaggtctatcaatcttcttactgaaacaaaaacttgaaaacttacatttagaaacgaaactaagctcggaagatcgaagaagcttgcttgagagggttcatcgagagagaaagtggcacagtgccaacaacaacaacacacacaactaacagttgcgaagaagatgtgtgggtttaactcccaacaaaacaaacaaaaaaaaaaccaatggcaaaacataaattggtccgtgggccgtaaagcccaatatacttttacaagtaaagcgtgggctctatgccattcacggcaggtccacttgtactttacacatagactgatacagaaaagtataaataagaaaataacaatgagtgtttttctctattgatccaaaatgacaaaatatatgatctaaacattttatgttattctgtatatgtaaagtgttaattatttaattggttgtataaatctacaaagctattatatgaaatgtttataccaagacaatcaatcaaataaaggcctacatttcatgtccagatttgtactaatatccccttcattgcttactaatatatagtaaatttaactaaatgctaacttaactataatataaccaatatcgaaaggagaaagatgtgaaaagaggaatggtggtggtcacgtgacagtgatacttggtaacctttacggagacaacaacgttatctttttcttcagccggtccgttctttaaaagcacactctctgtataatatatgcctctctacgttttatatactcacgtttaccctactctacactacaaaccaaaagcactacttctctcctacacaaaacgtgattctaccaaattgaatgcaagagtttagtagagggtctcgattcttaaaaaaaacaaactgtcctagatgatattttggaaatataagtttaaggaaacgctgaaattggttgctttaattcgactactatatctttcgcatcttagaattatattagaagatattcaatatttgtatcttttacattttatatttttatgagtattctattttaattagaggtattaatttgttaaggttttagagttttatgttacaaatttacaatattcaagtgttacgtttttagcaaaacttgtcttcatttccggtagattgattaaaaaagcacaacgaatccccaaaaaaatggtaattcaggtattttaaattaatcgagttccttgaaccgctatgaacactcaattcagtaccttccaaaggaaatgtgtctcaagatctcatgttcaagcttcgctggtagacaatgtactatttagttcatatcctccgactcgagaaaactttgacccttggttattgtaaaaagtgttctatacgtatacttatattcgtaatttcgtagatagagagaaagcataatgtgatgcatgtgcatgggatgggcagatggggcccgcgggctttacaaggcccataaagctaaaagaagaggagaggaccacgtggcagggagctagctagtactacaagtggagtggatactaagaagtaagaaagtaggaatgagttgaatctcgtgatcgcactgtttctactattggcaatgcagtgttgctttcgtctagggtttcagagctatagccccctcttccttaattatttctttttttcactttacttttctcaccaatccatgtccaactacacttaaaattgcattaccgcaacatcttatatgtgtctatattcgaaatatcttctgtgtatagaattgtataagctagctacggaattacattttcgaacgacatatatttggatgttctagtttttgtcatttttttattagtggtctatcaagccgatgattcttgaagtctccattcccggtacattattgaatgtgaagtttaacctctcttaagattgatctctcgcataggatcgaatcccaaacattagcatgcatgctttcaagtttaactaacggtgtttgaataaaacaaaaactatatcttaacattcccttagataactttcacatattttatgagggaggatcgttctcaatcatacgctaatggttaacagttttggttacatgagtgttcactaatgagagttgtattatatgtgttggtaatgttatttttgtctctgttggtgattgtttcttatcccttttgtaacgattttaacaaaattgatcattaattaagaccgaaaaggaaggtgtttaacatattttctcatattatatattttattatttgataacacaactattaaagggtagttgagatattgcgtgtatttacatagtgtatacgaataaagtttctatatcttaactttaccacgaagctttgagtcacttcattcctttatatattcaacaagacaaaaagccattctaggcggaaagagcgtaattatcacttttctttaagctaacaaactgatggttaggaatgaggaaccttagcgtcaatcttatgttaattttaacaaatctacatccaattattgtcgtttaacatcatacgggagccaatatggctccaccggaactgaaatcattctcaaaattttttatatatatatttttttagttcggaaaattttttggttgaatcagacaactaatttctagagtctatatatatcgccggtaaagaaaatttcgttgtggtcacttaaaaaattgtatccaacgaaaagtaatttatagtttagactaaaatgacaacaactatttggacaaccattacttgatccaaatttaaactcatatttgttttttttaccaacaagaaactctaattttggctatgtttttttgctgaatacaaacgctctcgtttcaagaatattttacatcctcttagacaaggcgatagagaatcgagatgtgtactttcgtattcatctaaagttttggttgagcaatactaagccaggagcaatatctcagtaaattgtttttgccatcagtattagccaattaacaagaaaaatcgtactcctagttggcaatactagtaaattgtttttgccatcaggagtagatacactagctaacaaggataatgattgacttctagttttatcctgtaagagagatgaataggtagagagagaaagtgaagggtaagcacaaggctcgagggtgaaagacataataattgggacttctcttcgtccataaatttccccaaacaagtcatgcactctctacttacctttctgtgtgtattgagtctattgccaaatcatagtaagatcatgttctaataatcatttgttattttaaccactaaacactactgtactaccttgtatgctagtatcatttgccataattatttctgagcacgcaatattttttctcaactccaatataatagtatttcctctgtttcattttaataaacgtttaaggtttttgttaaaaatcacaaaaatcttatttagttttttttttttacataaaaatatcattaactacaaatgattcaactaatagataatatattataaaatataattggtaaaaaattattaaatatatttagtttttgcatatgaagttgaaagcatcaagcaaataaaatctctaaaccatcacttaactactgcggaaatattatatgtaaattgttagtttggatcaccaaagttcgctgttcaaaaaaattgcaagttagtagtataagtttggttacctcgttgttacaaattcatatgtctaataccacctataatgttgatccctatggttcgaaaaacattgggaactttcatcatttgatcatgtagtacaatctcattgcctaggattctaatttataggacagtcattccgaaataaaaaaaattcttagtgggatatatatataaattaaaattaataaatgggaagtcaaagtaaaaataacaatggctgttaaattaacaatacaaagctaggttttcatcgagcgcaacaaaaataaagaaaatttgttgagaaaagacaaaagggagattaggcaactagtttaatcattgaagatccagtcatcaaagttaggggttcattgtttcagttctgccaaaaaatattattatttgtgaaaattgtaaatacagacaattatttattatagagtccacacaaaaaaaaaatccacggtccgttaattagtattttttattttatttttaataaacgatataattaaagcgtagttgttgctaattcgtaactcgaaacccataatgaaatgtgttgaattttattaatggttgcaaatttgcaatgtttcattatatatgtcgtgtatattaaatggtcggttgataacgatgcatttgttgcatctacgagaagtcaaaacctcagttgagtcgtgacttttggactgaactaaacataccactttacatcaatacttatttagttagacaaaactgtatagtcatgactcatgaatctgggttacgtcaattagttttgcatctgattttctcgttgattgtaatatatttattgagaccgatttttgtatacaagcaaggaagatttaacaatagctatccatgattttttttttcttgggggtcagatataccatttgaatgtagttcactattgacttttgacttaaaattttgtcgattttggtcttatcaaataccaaatgacgctatatactaattaacatcaaattgcgccgctaaatcacgcggttccatgtgatcaaagtccctggagtggatttgcttgtttggtctcactctcacgccaattaaaaggtgtctgtttaaccttttctcctttagtttatagactatgatatggtcaggaattacttaactataccacggatttataagaggtatctcaataaaagatctaatgaattttgaatcagatacaaatatatgatttttataattataaaacctttaaactatctcatggagtagtttggttggaaaacgaaatggatcctatccatccgttagttgataattattactcgtgacctaaaacttagactatatagggtttgctgtcaagcaagtattcattaaaaattgcacatttatataattactttgtttaaccgcatattcacagcacttgttaaagtttcaattatgaaactcagctatagtcttatactgttattatgttcacattaatctcatgaacggcaatatagagactgttggataaggtttgaaataacttaattctcatacaacagcacaatatataattgtttacgatccaatttagtgatttgcaaaataatgaaagaaaacatgtgaaagtaatagtaactgataactttccaaaatgatctaattatttcaaatctttgtaagattttatttcagccaaatagtatttttgtggtgtcttatctttgattaagccaaatgaagcaattgccgacaaaaataaaagatgctaaagacgtaattaaatattaaaatattaccgcacgagggaccttttgaaaaatcaacattccatcacataggtaaaattatgtcaaatgaccgtctagctaatcacaccatctgattaagcggcaacattttttaagtagttctaaatctaaccagtgttttgatttcggagtgatccggccggtcggacctttaaacatgcgacttgaatacgactaaactatagttcgtttggtaagcgatttttctttcacccactagaactaaacatgcaaaaacttcggcaaaaactagtgatccggtaaaatccacacaagggcggtctttaacacgccaaatcacaattttttttttatcctggtaacctctgattctttttttttttttctttctaattttgatgacgtgattgatatatttatttgataaatttgactctctaaaataatttaatttctgctaagacatacaagaactaataaaatcacacacatatatatatatatatatatagaacgtattatatgataaattttgattttcttggagaattctcatgctgattttttttaataactttaggaataattaattagtttcaaatcactctagaagacatttacttaatcatagcctctgatgataatagttccgaaacaagaaaacaaaacatacaatatatattatttattttatttttaattttataatagatatcaaaattggtgatatttattgtgatggggattcattgaaactggaagacaactgtagagaaagtgccccatagaagaagatcttcatagtactctccatctctttactctccttctctttctctctctctatctctctatttctctctctctctctctctcacccacagagaaaaccagcagtagtagcagtaaattgcttgagttcttgatgacagatcgacaatgtcttaaatgatgaagagaaaagaaggaaagcaataaaccttggcggcgtttgcagcagtttcttaaatttcctcaccatcattactctctcatctgctcccaaatctgctccttttaaataccaaacacatctccaagcctagctagaaattaatgtgatagagagcaaaagaaaaaggtgaacacaaatccccaaaaataattcatccacaaaccccaaaaaagtctcataaatcctctttctttctttttgtttgtgttttgtgttggggaagtagaaaaaaatggctggattgttctatctaggagggagagatcacaacaaacaagatcatcatcaagaaaaggatcataatgaagacaagagcaacaattatctctatctatacaaagacgagatctacaacaacaacaagggttttgagattttccctcctcaatattttcaacaacaacagcaacaaaatcatgcggctgctccaacaaatctctactcttttggtatggtcccgagtggtggtaacataaacaataaccggagtactaatcggagtttgtacttcaacgtcgtctccgatcatgagccggtgagatcctcaacgggagggtttacggtaacgagacaagggaacatgaattgccaagactgtgggaatcaagccaagaaagattgtcctcatatgagatgtcgtacttgttgtaagagccgagggtttgattgccaaacacacgtgaagagcacgtgggtctcggctgctaaacgccgtgagagacaggctcagttagctgttttgccagctaagcgtataagagacgctaactcaaggggtggtggggatgacgatgatgatgacaaagaggacgagaaaaatgacagttgtggtggtggctcggctcttgcttgcacccgtgtggttaatgctagttcttcaggtatgacgatgagttttcaattaattaacatagagaaaaaatttcaacaaatctagaaaggatttaaaaacaaatttatgtgaagatctggttatgaatgttttgtcaagaaagcaacaatatgatttgattgtgaatatatgtccaccggattttgctcctttctttttgctgtttgattttgattgtgaataaatgtccaacaaaatgattttagtcactgttctatggtaaacctgacgacacaaagggtttagtcgatttttattcaatatatgatgtaaaaaataaacaatggttaattatgtcatgtgttttaaagattttgattattggattcacgaaccaaaacgtttttgaattttatagtaattctttggttttatgaaattagggttagagactagtcacttaccaccggagataagttccccggctgttttccggtgtatgagagtcagctcaatcgacgatgaagacgaagagtatgcttatcaaacggctgttagcattggaggacacgtgttcaaaggcattctctacgaccaaggtccatcgtcagatcaccaccgttacagctcaagcctcaatggcgaaacctctcatcaacaccatcttaacctcatggactcaactccttcagccgcaactacaaacgccgtgaccgccgttaacactaacaacggatctattgacccttcttccctttacactgcggtggcaactccgttcaacgcctttgtcgccggtggtacgcctttctttgcatcttctaggtgttgagattaaaacatctgaagatgttaaatcttttaaattacgtttgtgattaattataactactcttataactaccagagatctatctacgagtacgagagataatttatttgagtatttttattgttgtcggacaatatggtgactgttcgtacctagctagggtttgtgtactgattaacatgcacatcgtacgttttagagataaatgagatattatcattaagttttttttggggataaacgagatattaaattaatgtcagagtttcaaattttgatcttctgtttgtttactttaatgtttgatcttcccaatgtgatcaacataacttctttttttttttttttctttcgaatatgtctgaattattttcaaaaagtttggtcttctatataaaatagggtttaaaaaatatattctaattttcttctgtatacaaatagggttgggtttgatagtgaattagctttctggctggtgatgaactcgaagctactttttcccagtttatccgtttgcttgccggatctaaacaggaactttactaggtttcgtgttccattgagcaaacaatttcaaatctatttatatataagagaaaaactttctgttacccaatccaatttccgcagtaaaacagtggaaaccatcatcatagtttacgaataatttgttatgtttacatttatgtaatattaaaaaaaatatttgttaccgatatttttcttaacaagagagtaggttactcccaaatttcatcacaaaaagaccttcaacgcttgtatcaatttatgtaaatccaatcgtatcgttctattctttcattaaaataaacaaatttttaaatttgagaaattttcaattgtcggcgtttcttgaatgagcttgatcagtttcagtgtatgagacaatcggactaatactaatccttgaagaagttttgttgtcgttctcacatcacatggacatgacgacttatagcggacgttaggtttaattgttctggagaagaaacatcaaaattatgaggacaacatagtgcatgtgaagtattaacttttgtagatgaatgtaaatggaaagtattctagctagggtacttaaatctactaaactacttctctacaaaatttttagcattttagctatttggatgtaacgtgcatgatgtgactatcattggatgtagtattatagattaacctaatcataattttgtaacttgttcgatatcattttcatatacacatttgtttatgaaatgtttcaaaagattttttatttatttatttagaattttcttttaaagaccaatttttgcctagtaactagtaaaaagtaggtggacaaaaaaaatactaaagaaaaatggtattaattatatctttaaaggcggtttggcaaattttgaaaaatggaaagaaacagttacttgtttaattattagagaaaaatgtgggaaattatgttggaaataaaaggatacaattgggtcaagaagcatagtaaaagtcaatggtcaatgtataaaagaccacatagagtttaaaacataggtttttgatgcatcccccacaaggccacaacatctgtatacccaattcgattatgactgatatgacatattatttatcaaatccttttccaaaaagcaaaaaaaaaggtctttacatataaaacaacgaccttacgaaaatgttcgtcccttatttagtgtttaagaaaagtcttacattatataaacttttttctttctcttattctgacaacaatttagctactttgttttctcatcaatatgtgatccattctccaagaaaatgtacaaatctcaatatataagtggccatagagaaaaattcgtaaggtagaagaacaaaatcaacgagatcaatctttctttcacgttgttaattaattcagattttcttagatctatgaatgttaattgttcttaaaatacagattagatgatacagattcgagggtttcaatgtcatctaatgctacgggaatgaagaagcgatcatgttttggattgtttaacgtaactagtcgtggaggaggaaagacaaagaacacatcaaaatcatttcgagaaggtgttaaaatcggatcagagggtctaaaaacgatcggaaaatcattcacatcaggtgtaacaagagctgttttccctgaagatctaagagtctccgagaagaaaatctttgatcctcaagacaaaacacttttattatggaacagaatgtttgttatctcttgcattcttgctgtctctgttgatcctctgttcttctatctccctattgtcgataactcaaagaactgcattgggattgactctaaattagctgtgacaactactactctaagaacgatcatcgatgttttttatcttacacgaatggctcttcagttccgtaccgcttacattgctccttcttctcgtgtgtttggaagaggtgagcttgtgatcgaccctgcaaagatcgctgaacggtatttgactcgttatttcattgtcgatttcctcgcggttcttcctttacctcaggtagttaataaaacgcttcaatcttttttgttttgtgcattgttttcaattgaatagatgattcttggtggtgttgatgcagattgctgtgtggaagtttcttcacggatctaaaggaacagatgtattaccaacaaaacaggcgctattacacattgtcatcacacagtacataccaagattcgttaggtttattccattaacttcagagctcaagaaaacagcaggagctttcgctgaaggtgcttgggctggtgctgcttattacctcctctggtatatgcttgcaagtcacgtaagcatttcaaaattcatccatcagcactaggttaaatatctattgtttttttttttggttctgtttttaagaaatgttgttatactttgatagataactggagcgttctggtacatgttgtcagtggaacgtaacgatacatgcttgagatccgcttgtaaagtccagcctgatcccaaggtctgtgttcagattctttattgtggcagcaaattaatgagcagtcgcgaaaccgactggatcaaatcagtccctgatctttttaagaacaattgttctgctaaaagcgatgagtctaaattcaactacgggatctatagccaggctgtgtcttccggtattgtatcttcgacaacgtttttctccaagttttgttattgtctatggtggggtctccaaaatctcaggtaccttccttggaaaatcgatgaatagctgttagactgtggtgcaattttattgacttgggtgttttcttgtatagcacgttaggtcaagggctgcaaacaagtacatatccaggagaagttttgttttcaattgcaattgctgtagctggacttcttttgtttgctcttctcattgggaatatgcaaacttatcttcagtcacttacggttcgcttagaggaaatgaggattaaaagacgtgattccgaacagtggatgcatcacaggtcacttccacaaaacctgagggaacgagtcagacgttatgatcaatacaaatggttggaaacaagaggagtcgacgaagaaaacatagtccagagtttaccaaaagatcttagaagagacatcaaacgccatctctgtctaaatttagttcgcagggtaagttttcagaaatgtgaattgcctaaagatcctacacttcattcacaaggaacaatgttctttcttttttttgcaggttcctctgtttgctaatatggatgagagattactagacgcaatatgtgagagactaaagccaagtctatacacagagagcacttacatagtgcgagaaggagacccggttaacgaaatgctcttcataatccgaggccggttagagagtgtaacaacagatggtggaagaagcggtttctttaacagaggtttattgaaagaaggtgacttttgtggtgaagagcttctgacttgggcacttgaccctaaagcaggctcaaacttaccttcttccacacgaacagtgaaggctctaactgaagtagaggctttcgctttagaagcggaagagctcaagtttgtggctagtcagttcaggcgtcttcacagtcgtcaggttcaacaaactttcaggttttactctcaacaatggaggacttgggctgcttgtttcatccaagccgcttggcgtagacatttaagaaggaaaatcgcagagcttagacgtaaagaagaagaagaagaagaaatggattatgaagatgatgaatattatgatgataatatgggtggtatggttacaaggagtgatagttctgttggatcaagttctacattacgttccacggtatttgcatcaagatttgctgctaacgcgcttaagggtcataaactaagggtcaccgagagttcaaagagtttaatgaatttaacaaagccatcagaacctgactttgaggctcttgatacagatgacttgaactaagtacttatagattgcacacttccaaacattttcattgtaaaacatacaaatttacatctataaccaaagctgttacacacttacacttacacaagataaacacctagaatatatgattagatatacacacaaaaaatcaagggaaataaaaaaactttctttagagattcaagaatccaaacctaataagccatacgattgtctttgtgaagcctaaagaaataagctgcagcgcttaagacggcagtaaccaaggcaacacctttgaaggcatcaaactcatcatccatgaaattgaagaagatcaccacaagaaccgacacaatcggccacgtaatgacactgatcacattcgacaacacgctcgaaacagagtagacaagtccaacaatcccaacccaatagacctgccacgaaacagcttgaccaaccatagccatcacataagaacctttccctttcgagaatccattcatttccctcttcaaatcgtgttgctcaccggctataagcagacccacgacggagatgatcgtagcaacgagagaagagaagataataacttcgaaaacagaggcaaagcttggtttttgattggttgattcagttcgtttgaagatgtaactgtcgaagacgttttggatgttacagagaagaagagcgaaacagattccagcgaacagagcagcccatgagcctctagcgtaattctcctctgcttcatcaggctcaccaccgaatgaagaagacagagtaagagctccggtgatgatagctaagatcacagagataacaacccatcgattgaatttgattttgttaatgaaagctgcgaagataggagtgaagaagagctgtgctgtgtagatcagagtgaaaacaccaaatgggatctcgagttttcccatggctgcgagtcttccttgaacggacatgataattccgatgcaaatgtagatcacagctaaggattttaagtggattgaatcggaagtgatcggaggttgttgatggtggttgcgtttgttcttggtgatgaagatgaggaacgggagaagaaggagagggaaaccaacagtttggagaagagattgagtccaaacgccatcgttttgacggttttcgttgtattcgcttcggttggttttgtcgtagtagaagttttcgaggagtttcgctatggattgaccgatgatgacgaagatgattgagatggtgatggttggccagtggtttggtttccggattgtgtttccggtttggttcatgcgtgtggttgaagaatcacgctcgatgttgataggtatttgcacaaattgttctgcaaaaagaaacagaggaaattagaatcaaattgttttgtaagaagaggagatcaagaaacgagagatctggtttgttgattcttattattacctggaggtttggtctggaaaataggttgttgattctgagccatggattggaactgattgtcggagattctgagcggatttgagttcaatgtatgtcggcgattagatttggtaatatgtgatatttggagtggatgatgttgtgggataaaggaaagagaagggtttattatatatgggcacgaaaagtctaccctggcggcgtaatggtcaatcaagcgagcctcatgtctacgcgtcgtcgttttcaacttgttccgggttgtttcgtcatccaaaaaagtgtgtaaacaacacttagaagtaacttattcttgtctttacaaaatccaagcaataatcgacaaaagatgatgagaaatatttgaggttttgaatcttgattgttttctatcaacgaatattccgaattggatttatggttcgaaggttatataaggaaatggtatagttaagtttaagttatattgactttgtttgttttgggggtttgacctttgggattatccaacatcctacgtttcggaaattttgaactaacacgatgcccacttggcagctcactacttgtaatatgatactctcttaaatgcgtgtcttcttatgacttcatcttagaatatcatacttcatgtaaggattttggtatatgacattttataatgctcaagatataatcccaaaggtgcaagattagaatgaacttgaacttcgaatcaaattgtttgcaataactaaacaaattttgaactcagattcaatgttgttcaacgtaacattgatcatttttcaaccaaatgagcttcgaaagtttggattttacaaaataagagattaagggtaacaaacaaaggcaatttccttggtgctcatttgacacattttacttaagaatcatacaaaatctctatgtacacaattgcctcgtttgactatataaacgtcctcacactgtttccacgacgctatacccattatgacccataggcatacatgctctcaaatatacactggacccgtaattaaaataacattttaatacttaacaaattagcatgtcttgaccaagagactgaagcagccaaagttgtccagagcaatagctcaagtaggcataacctattactgtgttaatagattcacaaaggcaaaacaactattactaaaccttcatggattactcatctatataagttctagacatgtgttttgaattccccggttcatcatcggtacaatagtttcagaactaaaacgctatggggcattgaatttgaaactgtgatcacgcaaacttcttaaatagaacacccattagaacacccatatgacccataggcataaaagctatcaactacactggacccataattaaagaacacagcatatcaccaaatcaacttgaggcagcctagccacagttgtccagcttaagtaggcataatctgtcatgtgttaattgaattcacacagacaaagcaactattactaaccttcatggattatacatttcggcatatcatcatctataccagttttagacttttgttatagtttcagtactaaaacgctatggggcaatgaaactctgatcaacaaaatttctttagatagcatttccacaggcttttcaatgaacatgccacaactcgagaagtgaggatttggtattaaaagccttaacttgcatcactacattattctatgataatagagccaataaagtaaaaccattctgtttgaccaatccagtcatatgatccgatgatcatagaggcaaccaatgatttggcattgcaacaccgattaaggaaacttctttagaaatacctttcaatgaaaatgccaactcaacaagcatggatttagtactaagaaccttacttgtatcactacattattccttaatcacaaaggcaataaagtaaaacccaattcttaatcaatccagctaaattttcctatggtcatagaaacaaagaaggatttggcattgaaactccaattaagcaaaatttctttagagagcatttcgacaggctttcaatgacaatgccaacttgagacgcaaagattttgtattaagaacgatacttgcatagttgcattattagactattctttgatcatagaggcaatctagtaaaacccttttcttgatcaatccaaatataacattcctatgaaacatctccaccatctattccctaagtttctgaaactttacacattgatcaaatataatgtatccaataactgaaaacgcttgaaagagagaccagaagaaatttctaaataccgatttaactatggctgcgatgggaacacatctttcactgcagaagctgcggtcaagtaattgtgaagacatagaaattcacagattgagaaagaagtcttgttttctctcagtcgctccagttgtctttatcttcagctacttcaccttgcgcctgcaaatagacaaatcttgattaaagagacatccacaacaagactgcctaacctctaaattatgaaaatttgaagtagtactagaatttagctcaaccatttcatcttccacggatccgcctggtgaccacacaattatttgtctatctgcgccacttgtgtatagttcctatgagcaagtataacaagtaattcggatttagaggtgtgttcaagcaaacttacaaactcaaatcactcgcgaaattcgggaagattctgaggattgagtttatacctgatcattggaattaaagcagcaagtgttcacgctttcgtagtgtccacgaagcatcagtgttgttctacccgaccacatgccaaaacccttatatacagttgcagcaacaattcatcaaataatgcaagtactggaatggaaagatttgctgatacaatagtaaggtggtgactaccttcacagtcttcatgcacggaacaaatacgagagctggatcatcgcttgtatctaattgaatcgctctgtctgtctggatgcgtccagtttcaaagttcaccagggtattgcgtccagattcaatatcccacaatcttattcttgaatacgaccctgaaacataatagtaatagactcttaagtcttaactgttgtatcaccactgatgtgtacggtagtaattagtgctaccacaaattgatatagttcacttgatgctaaaacccctaacacatcacttccacttcgtagagaggcatgtattataacatataaccagcagatgctgcctataccaggttgtgacagaggtcaaataaataacctaaagaacaaagaaattagccaggacaataagaactcaccagcactaagaagatacatcccatcgttagttgcctttaagccagtaacaacaccataatgagccgtagcacgatctagagtagataacattccagggtgaattctcttctgtcgagacttttccactgaaggtttctcgctagatgatccctttacactttggctgccagtgtgtttactctgcaatgtcttcaaccaattttggtcccccagagaagattttgcagctgaaaaaaactttacaacaagataaaaaaaaaattactacagggaatcccctatcaataaaacagatattgattatccattctgtctgtcaattgtaggcttgtagacatgcaggttaaactggatataaataatggtcctaaatttagaaggcgtcatgcttatgggagaacgggacgggacaaaatctgaggcaattattgttgtgtgcagagaaaggctcaacaacatatggtgacactgtttattcagattcagtagcatcttaggaatatataaacgtagatccttcattctggggccacagtccccttgtacgagatgatacaggatgagtgtgacttgagcattttggtactgctaagtattgtccaccctctggtagaaattgttatttactacatatctggtcgtttatcaggtcttgcagtcatactaaacaggtggtatacaaatgattgaagtcgcgccaacacaagaaaaccccaactaactttttaacttcggaaaattccagtttgaaaatcttcacacaaagttgggtaattaatgctaactctcactagcatgtcagtaacaataaattacactcttacacagatgcgtctaaacaatataagaagagataccagtttaaatatacagacttcagggaatttaaacagaaaagaaatcaataagtaattcataacttgtctattcaagaaattgtagtaaaaaagaaattcaggaataaaccttactgctaaccgctggtcgctttaaaattggtggtcggaccccaagttgtgtttgtgagttatctagaacacggaaacatccagcacgtctgatgtcccagaaacgtattgcaccatcacaccccccagtatacaaaacccactcgctggaagtagaccattccactgacataacaccatctggcatatcatcaaaacatgacaatttggtagcctggttctttaactaatgaattttgaatatgaggaaaagcatgagtaaagtagcttattatcgttccagtaatcatcaactgaatacaattctatataaaattttgatacacttcttttccaaagaaaaaaagaaaagtaacataccacggtgacccgataatgtgtgagagaatgccccagaagcaatatcacagaggcgaacctggacatcatcagttccagcagcaattaacgtgtgagacattgccatagaagacatggcagttctataaacctttccaggcattttaaaatccacaaccacctaaaacatatgaaaagacaaaaaatgcgtcttaaaaatacgaaaaatggaagtgatataccgtcttagttaaaagcttagtacctacctgcgaagtattggtatcccatacttttacgtaatgatcaaaagaacctgtaatgaacatcccagtgtcaatgggataccaaatggcagaggatatggcatatttatgtccattttcatgttgcttacggacagtaaaaatacacttgtgcttggcaattagaccacttgcctcgtaatcggtggcccgcttaacatcaaatacagcagctgaaccatctgctgctccagagagcagatatctcccctccgtcaaatcaacctgataacacagttaataacacaaccagctaccaaaatatggctactctagaagcagcaaactacataaactagattcagtcccagatcttttatatttttagtgatttctcagccaaagactgagaacaaaagtcacggataagaagagcaagaaacatctgagagaacctgaagggagttaacggagccacgatgaggagaaacaaaatcttttcgattagagagctggagagacaaaatccggcgggatttgaatcgattggcgaaggaattggaacgaaatcgaccggtttctctgtctttaaaagccttccacattctcctagcatctcgtcttctgattctcgtggatattaccagactttatgtgtatatatactcgagctcgaatctcccttgtccagctccaaaacccctaacaaaagctttgatcctcctccttttaaagttttgtgttagaaaaacaatgtcgcgcgataaccaacagcaatcgaaagaacaaaaccaaaccacctcaaagaacttgatttcggtattaaccggactaaccgtcggttttcatatcatctttggatttattttccggtatatacagtagttttaatagccaattaatttgttgatttaatttttctctcaattttttatttttttcgtagagttaataatttaccccaacaaaaatacatacagttagtcctaaatcttcactaatccactaaaaacaatatgtcaaagagaagcatccatatctttacttgctatcgaagatgtgtgagcttataaaaagaattttgccgagaaacagggataatagctaactgaggaatcgcatgagcatattgaatctctcaattttcccagaatcttcttcactgcctcaaaagaaatatgaggctttggcactcacatgatttatacaatttctaacctgcctctcagaaacataaggatgacctaatattatttgttgacttgtttgttttcgtgtcattgatccacaaacaaaaatacgggattattcaacatcctacgtttaagaaatttgcacaaacacggtgccaggtctcttgagatttggatataacaagataggagattaagagaggctaatagagaaaggcaattccttggtgctcatttcacgcattttacttagaatccagagtctacaaattgatacaacaccagaacgcaatcgcccgcgtttgaccattaaaatgtccccacactctttctatgacgctacatgcattagaacttaatcaatcttttaaatattgatgataagaaactacactacccatagtccatagacataaagaagctacacgcgacccattaattcaaatcacacatcctaataccagatcaattaagcagtcttcacacagaaactgaggcagccaaagtggtccagaggcatagctcaagtgtgcataatttatcctcttattaataaactcaaaaagacaaagtaacaattactaaccttcatggatcttacatttcagcttatcatctaaagattctatactagttttagacatgtttcttcgagtcatcatgggtgtaacagtttcagtactaaaacgctatgaggcattgaaacactctgatcaagcaaacttatttagatgaaaatgtacatgcttttcattgaacatgccaactcaagaagccattctttggtatcaagaaccctactagtgcaatcaagtaaaacccttttcttgatcaatcctactactgtatataatcctatgaacatagaggcaatccagagtctggcattgatccgaataagcaaaagagagcatcttgagaggctttcaatgtaaatgccaactcgagccgcttcgtattaagaacaacacttgaatcactagagtaatcttttatcatagaggcaatcaagtaaaaacccatttcttgatcaatccaaacgatcctatgaaacacatctccactatctattacctaagtttctgaaactttacacattgatcaaatataatgtatccaataataactgaaaacaccgaaacggagaccagaagaaatatctaaataccgattaaactatggctgcgatgggaacacatctttcacagcagaagctgccgtcaaataattgagtgtattcctcagcgtctccctctctctctttaacctagccgccgtatcttcaagctccagtaacgcttgctgctccatcggagctccttcaaacgtgcttccgacgaagaacgagaacggagtcggaaactgattcttcctcagatcctgagattccttatctggtttcccattcaatctattcgacaatcgaatcacttctttcatcagaacctcaacttcattcgccaattcgtccagattctcttcaccggacggtcgatcttcaagccacgtcactttcgcgacgaggtaaggtttcgtacggacgagatcggtgactcggaatcgttcctgacctttacagattaagaagaatcgatcgtcgactagacgctcgtgtttcacgatttctccgacgcatccgattccagctgcggagcctgaaacagcgtcggagtagacaacgccgaatctgagatcggattggagaagcgtttgcatcatgactcggtaacgaaactcgaagatctgaagcgggattgttgcgcctgggaagagaacgagaggtagtggaaatagaggaagctcgactaagtcatctgatttgggtggattcgcgttgttgtggtgtttctcggagaaggaagaggatgagcaacggaaggagaggagtttacagcttcgacggttgatgctccggtaagtagctggaagatgtagaggtttagggttgaaggcggagagataaggtggagttgatttgaaggaaggagatgagacagtgcttggaagcgccattagagagagtgaaggaggagaggtttcacaagtgaacggcgaaattgatttaagattttaattgtttcgtctttaaaattaaaccttatctgtttgagaaaatatatttcatcagatatttttatttcataattcctgtggctagaaatttgtttagaatagaaataaaaatatatacgagccatttggttcgtgtgtaagtgtgtagtacatgcatttgagacaccggtccacttggatatcatttcgtagtaaccatgaatttgcaggggtaattgtgtcaatatctcttggtcatatataggttacaaagatgaacggaagaaagaaaaaaaggtgatcggagattttggcttattctcagatttgggagaaatggcggcagaagagggtcaagtgattggttgtcacacgaacgatgtatggactgtgcaacttgataaagccaaagaatccaacaagctggtctcgattctcacccctttgttatgcaattctctttggttgtattggatttgggaattaggtttttgtttgattagggttactgtttctagtgtcaaagaaagcattatggtttcacatgttatggtataggttttgattccggctaacgtagagttggaataaacggattgttaaggagatcacaacattagatgtgagggcaagtgaatcatcagtgaaacttacgttttgatgtgtaaacttttagagtattttctttaattgattcatctttgtgacttttgttgtgttcctcttttccttattgtagctcagagtcacccctctggtaaaaaaaatcattttggattgggttatttaggattctgatggtgtgataatttcattgttttcagattgtgattgatttcactgcttcatggtgtccaccatgccgcatgattgctccaattttcaacgatttggccaagaagttcatgtcaagtgccatcttcttcaaggtggatgttgatgaacttcaggtgaacaaatacactttctttacaaacaaattaatctcctcactcttagactttagaattacactgatatattctatatacttgtgatgatgtttaacagagtgttgctaaagagtttggtgtggaggcaatgccaacctttgtgttcattaaagccggcgaagttgtggataagctcgttggtgcgaataaagaagatcttcaggcgaaaatagtgaagcatactggtgttacaactgcgtaaatcagtttgaggcataaataataaggtctaatttgtttatcttaaactagctagacataacgggaatagtgcagattggagatgaagtagaagttattgatctctgactgtcataaaaccatgctttttttatatggtctttggcttttgcctaattcatatgtttaggtgttctttctatacctccatagaccaccactcagtcgaattttcagatcagtgaaatagactcttgtgaatgaattgttccatgcatatcataatttgaatatctgaaatctgaggccttgcaaaggtgtaaaataattttgtgcgagcagctgtttccacgtgttataatttgattggaagttgaaattcttatccaccaaacgtttcatattttgttgccaacgaacccattaccgaggttcttcgtgctttcttatcttctttcttcttcgctgagcttactctgtaatcttgtgaactctcgttgataattcaaagaggaaacggagataaaggagaaaactttagagcgtgttcaagttaataacagttctgtcgataatggaaaagctcttcgtaccatcatttcccaaaacttttttgaattatcagactccagctaaagtagagaattcgcctgaacttcatccaaaatccagaaagaaaaacctatcattcaccaagaagaaagaacccaatatcattcccgacgagcaattcgattacttgtgtagaaacggaagtttgctcgaagctgagaaagctctggactcgttgtttcaacaaggttccaaggtaaaacgaagcacttacctcaaattgttggaatcgtgtattgattctggttctatccatttgggtcgtatccttcatgctcggtttggtttgtttactgaacctgacgtctttgtggagacgaagctgttgagcatgtatgctaaatgtgggtgtattgctgatgcacgtaaggtgtttgattcaatgcgtgagagaaatctgtttacatggtctgctatgattggtgcttactcgagggagaatcggtggagagaggtggcgaagctctttcgtttgatgatgaaagatggtgttttgcctgatgatttcttgtttcctaagatattacagggatgtgctaattgtggagatgttgaggctgggaaggtgattcattcggtggttataaaactcgggatgagttcgtgtcttcgtgttagtaactcgattttagctgtgtatgcgaaatgtggtgaattggatttcgctaccaagttttttagacgtatgagggagagagatgtgattgcttggaactcagtactgttagcttactgccaaaatggtaaacatgaagaagctgtagaattggttaaagagatggaaaaggaaggaatttctcctgggttagttacttggaacatactgattgggggttataaccagctagggaaatgtgatgctgcaatggatttgatgcagaagatggagacttttggtataactgctgatgtgtttacgtggacagctatgatttcgggtttgattcataatgggatgagatatcaggcattagatatgtttaggaagatgtttttagcgggtgtagtgccaaatgcagtcactattatgagtgctgtgtctgcttgttcatgtttgaaagttataaaccagggctcagaagttcattctattgctgtgaagatgggatttatcgatgatgtgcttgtgggcaattctctggttgatatgtattcaaagtgtggaaaactggaagatgcaaggaaagtttttgattcggtaaagaataaggatgtatatacttggaactcaatgataacagggtattgccaagcaggctattgtgggaaggcttatgagttgtttacgaggatgcaagatgcaaatttaagaccaaatattatcacatggaacacaatgatctcaggatatattaagaatggagacgagggtgaggctatggacttatttcagaggatggaaaaagatggaaaagttcagcggaatactgcaacatggaatctaattattgcaggttacatacaaaacggaaaaaaagacgaggccttggaactttttcgaaaaatgcagttttctcgcttcatgccaaattcagttaccattctaagtctcttaccagcgtgtgctaatcttcttggggcaaaaatggtaagagagatacacggttgcgtattgcggagaaatcttgatgctattcatgccgttaaaaacgctttaacagatacttatgctaagtcaggggatatagaatactcaagaaccatcttcctgggtatggaaacgaaagacatcataacttggaactcgctgattggaggttatgttttacatggtagctatggtccagctcttgctctttttaatcaaatgaagacacaggggattacgccgaacaggggaacgctttcgagtattattcttgcgcacggtctaatgggaaatgtagacgaaggaaagaaagttttctacagcattgcgaatgattaccatattattcctgctctggaacattgttctgctatggtatatttgtatggacgagccaacagacttgaagaagctctgcagtttatccaggagatgaatattcaatcagagacacccatctgggaaagcttcttaactggctgcaggattcatggtgatattgacatggcaatccatgccgcagagaacttattctccttggaacctgaaaatacagccactgaaagtattgtttcgcagatctatgcattaggtgcaaaacttgggagatcattagaaggaaataaaccgaggagagataacctgttgaagaaacctctcgggcagagctggattgaagtcagaaatttaattcacacattcacgacaggtgatcagtcgaaattatgtactgatgtgctgtatcccttggtggaaaaaatgagtaggctggataatagaagtgaccaatataatggagaactttggattgaggaagaaggaagggaagaaacttgtggaatccacagtgaaaaatttgccatggcgtttggtctcatttcgtcatccggtgcatctaagacgacgataaggatcttgaaaaatcttaggatgtgccgagactgccatgatactgcaaagtacgtctctaagagatacggctgtgacatattgttggaggacacaagatgcttgcaccactttaagaatggagattgttcctgtaaagattattggtagagtgattattgattagccaaccactaaggtacgacttaacttaatttcaacagtctttttaaccacatgatcacgtaatatatatatcattctcatattttttacagctataaaaagattattgagttagcagcatggcgtgggtaaaattagttgaagtttgaaagctaaattccaatccttgtaactaactacggaagttgaccaaaggttcattagtgcgtatttttgttatcttgtgatatatgattctttgaagaatgtgattcttttttccccccatgatttcccttggtagtggaaaccagaatgtaacgtgtattatgcaatttgatttgatatattccagaaaattcccaaccacaaacggaaccttttaatccatcataaattcccatcaaatgtctaagctatgtgttgcagtggtcagctatctgtttactcgagcttcttacacttgctttgagtctttagagatcatcttaatctgaggatggtattaacatcatcttatgttttctttcttcagtttctctatattaaaatttcaaccacaaaaagctgatattgcagttatgattatgtgagattaacttgatcttgtttctgcagagtgttgaaggcaagcctgcatcacttggcccatggggaggccagagtggtcatgcctgggatgatggaatgtacaccacagtaaagcaaataattatagcccatggttctggaatagactccatacaaattgagtatgacaaaaacggtagctcggtttggtctgaaaaacgtggaggaaagggaggcaagaagtttgataaggtatgatcgagactctttatcctataaatattgtgttggtggttctcagaaattaatcactgttctcttcttgctgtttaggtcaaatttgattacccacatgagtatctgatttcagtaaatggaacctacggtagctttgacgtctggggaactatatgtgtccgatcacttactttcgagagtaaccgcagaaaatatggaccgtttggtgttgattcaggtacattctttgcattgccaaaatcaggatcgaagattattgggttccatgggaaggctggttggtatttggatgctattggtgttcacactcaaccaattcctaaagagaataatccttcgtcgaaaatccttttgcactcgcatcaaagtttttctcagggtgataagaaacatgagtactcagtgctacaaggaagtgtagggcaaaactttgatatagttgttaccctcagaaagaaagatccaactttgccttcttttgagtcccgagattccgcaggagccgaggtcaccaaacataaggtgatgtcaagacttttctgttatacattcgaaaaacaggtcttattggatttttactggtttcttaacaattttttttatggaatttgttttatcagttggtgacagatactgagaagtcacagtcaaaaattgaaggtggcgcgaaaacatatggaccatggggcggaaccggtggaatcatgtttgacgatgggatttataccggtattcgacaaatcaatttgtcacgcaatgtcgggattgtgtcgatgaaggtctgttatgattttagaggacaagctgtgtggggaagcaaacatggtggcgtgggaggattcaaacatgataaggtgcgtgaatttgaaacgatttttggtctacttaagtttaattacacttcatatttcacaggtttaaatgtaacttgcagattgtatttgactacccttcagaggttttaacacatgtaacgggaacatatgggccgctgatgtatatgggacctaatgtgataaagtcactgactttccgcaccaacagaggaaagcatggaccttatggagaagaacaaggaccgtcttttacacatcaaatggacgagggtaaagttgttggattccttggaagagagggtttatttcttgattccataggtgttcatgttatggaatgcaaaataagttcccttaagccatcatctcctcacaatgcaattgttcctcataataactccggcactgcgcaaatagaaaattccccatgggctaataagctagtccttgcagcaaacggccatggcgaagaggtaacttgtagattctatcaccatggtattttccggtttttcaagttttcgatttcatgaatagcagccactgtataacaactctactatggctcagtttatatggtttcggttttaatacgttatatatatcttagccaaattaagacctgtttgatttttaaatcgttcgtttcaagtttggttcggtttatctagattaaacaccctaatagcagcctacttgttgggtaatcgttttcacaggttgatcgtggagtcgtcaaagaaccaacaccgagcgggcctggaccgtggggaggtgacggaggtcaagcttgggacgatggagtattttcagggatcaagcagatatttgtgacaagaggaaatgatgctatcacttcaatacaaattgagtacgataggaatggacaatctgtttggtccattaaacatggtggtgacagcaatggagtcgctacacacagagtaaacaacaatatttctcctttcacataaagctacttttgtgtttgatgctttagaaccatttctaatgctctcaaatctgtgttgcagattaaatttgagtatccagatgaatcgatcacctgcatttcagggtattacggacctctgaacaattcagaccgatataatgttgtcaagtctctgagtttctacacgagccgtgggaggtacgggccatacggtgaagaaaccgggacgtttttcacttcgactacaacacaaggaaaagttttggggttccatggaaggagtagctttcacttggacgccattggagtgcatatgcagcattggcttggcaacaataagtcttattacagcagggctagttgtttcaagctcttctgataatcttctctgcgcaacaagaaaacatctaacctggttccaccgacgcttacagttatcctctaaagagttgcaaatacatattcatgctcctaaacgcattgaatttactttccagttaaaaacactgtttctataaacagaataaatacgaaaactctatagagagtgtactgtaaaatgaagtaatattggcatttccttgctaaacttttgtttaatgatccgaattggttgttcgtgagtgaatttttgcatgttgcaacacttctctgagcacagaagctattcgatgagacatatgatgttccaagaacatctcttttaccctctcataccctttcttccccattgtattcctcatcttcacgttagtcgccagcttcacaatgtttttggcgagaggtaacacgccatctttaccagtgttgtgcaatagacctgttgttctgttcactacaatctccattgtgcctcctgctgcagtcccaagtacaggaagcttaaaggccatggcttcaattgttattctcccaaagcattctcctctggcttgggagttttggacaagaacgtcaatagctgctaaatatggtgctaccttcattgttttgttgacaaagtggacaattttttgaagtttcatctcttggacaaagttgcgtagctctgtctcaaatttcgtctgtgcgctcatatcgcttcctactaccactgcatgcattgttggtacctcaagtttcttagtctctttgattactttaagactttcatggaacgctcggaggaatagatcttggccctttcctcgagatacacctgcataagagaagcaccagtcagaaagcaaattaaccaaaattttgagtcttttgcagattatgattcttaaagaaactaaggaagagaaagaatgtaagaaatgactaactattaataatgccaaatagtatgtcttcattcctcactccaagagattctcgaacttgctcacggagaacattcttggcgaaactatcttcagctacttccatcaactccttgctatttcctaggtgcacgacataagttttaggcattttaatcctgtgttacaacaataaaagaataaacactgttaagcttatgacaataacgtaaactaatatatcgcaagactctacagagaggaaacagaccctaagcgatcatgagttctgttcttccagtattcagctgttgcgtgcgaatcaatcatagcacctgcaacaaacggaaggtgcttgactaaatccggtttgaaatagtgacctctcatctcatgaatccaccagagtactttaggaagaactttaggaacattgtccttgagaactgcatcaagccatttcccagcaacagcagtgtttaaaacaaccagatcagacttgagagctgtatctatagctttctgactctttgctgatatcacctgaatgattcaaaaaagattgatcactaacaattatgatacgaatcaaagaaaaacaatggaggtggttagctaaatctgaacctggactcctcgatccaacatcttgtgttctagaaccttgatcacttcatcttcttcaactggtttctgattcgtgatccaaacaacttcagattcaactcctctaagcaaaaacgccaattccattaacaataaaggtccacctaaaatcatcacttcaagtttagccatagagattttgacaagagagtaacacgatcacaaaacatcacctgagagcgagagttcatgagaaacaagtaaaacgagctttgatttcatgaactcgagaggattcaacgatccagaaaccgattggatcttaatgtcactgttatcttccttctctcggctacatctctttccactaacactacaggaatcaaaagtagatctcacgagaatcattcctactgttgatacagataaaaccaatagaatcatcagtggccatctcttcttctgcaatgttgcccacatactcgttgatggcttcgccattgtttctctctacagcttagaatcacatcctagggtttacacagtaacaatcgatctcagaactttctaaggatctgtcgtcagtgatggagaaagcttggaacgaagaagtttagaggagagatttaatggggaaaagccgctaatcagtgttgactctttgcagaagtttgcaattcacgccgtttttgttatttagaaggaagttgattgccgtttctcagcaggcccccgatggaatcctctcttcatatttataatgggctttaaaaggcctatttgctaaaagcctaaaactaaactagttatgatgatagttaatgcatactatatggttttaattctttttttttcttaagctaagctaggcttcagattagttttgctgatacaattttggtttggttttgtttggttctaataatggagagcataatgatttcgatccatagaatataaatgttacaaacatgaattttagtggtgatgatccgtcttcatatatggtccaacaatgtatgtggcaataaattcttttactttttgttacacggccataacttgtggctatttattataaagttttttttcggatatatccatgtaattaatatatttgacaattggcaagaattattatacttcaacattttcctccaaaccaaaggttgttcatttcttactcacacacattttcctcgtttagcatcatcgattcatcctcaactttaaaatatgatttacagaaccatacggttttaaaaataattacatcattaataatctaaatttttagtagatttaatcaatctctcaccagctaactgcctaattaatttatttttaatcatcattataaatcaagatccacgtggaaacaaaagtcaatatcatcatctctcaaagactcaaaacacatgaataataattttccaacacaatggtacttgccaaatgattttgtgtcggctgctctaaatccaatctccaacaaaccaaaacgaaactacttgttattttaaaaatcagaggaaatggattatattattagtgtagctataaagataatcttttacgtattcttcattgtggaatatgcaaatacaaacatgtaagtgtataactaaaaggtttataacaaaagaaataaaaagacaagagaacttagaataaaaattgggtataacagaagagtaaggagggactcaccaactggttgttaagtcatttaatccatcaattaagcaattgagcagacacacacccacctttgttttatcttcttccttaaaccagcttatcagggtcagttttgtaatctcatattcctacctataatgacgtttctatgttttatttgatggagtttaatttccgctaccatgcataactaaaagtatatccgttatatcaaacatttaaagaaaacctcaaagatattgaactacaaagtgctcaagaagttctattaaaaatgtatcgaactttaactttatgatgaaagcaaggtgataagaacaaatagtttaaaaaaacattttagtttgaaatccaaatctagactctataatttgtggcaggtaataatttcactattttggagcctcacgtacacaaatcaggaagtcgttaaaagtttcccacgataccatggtaatgtacgcattatagattatttcgtttaaatagttagatttggtttttttttttaatatacaaatactaaacttttcatatataaacactcattccttcaacttttttcttttggttgtatttagttaacttatacggaaaagtagtatgagtctcaagtcaatgacaacacaacatcattaaagtataatacaatcatctataaaaatccatttatttgtgtgtgtggaattgttaagttttgtatgttaaagtcgtcataagaaatattatcacgtaatcaagaaaagaaaattggtgatttgtaagctctcacgtgtttctctatgaatggttggcacacaaaaaaaatcatattaatttatctttactctaagcatcagaaacagaagcttctgccgcaaaaaattaaaaattacaggtagcggttgtcaaatttttccggtagtgatcattattttattttattgttgatattgcataataatatttttaaaaattgggttggtgtctaatgtcccaatgataagttgggttggttttattgttcttgtggactgaaaaaaatttgtttatttaagaattttgcaattattaatcgcctctttctctatctctctcgggattgggtctcaaatctttttttgtcttcaactgttcgaaactcttctgcttttgtgtttcctgattcagccacatccacactcacaaacacaatctctaggttttttttcttccttttaactttgattctctccctcaggtagtttttaaaaattcaagttcttgattcttgattcttgatatgattaatcttgtactgtgtttcttgattattattttttgtatactttctgtgttttttttctcccttgctttttggaaattctcctacaagagatgaaatcatcaagacactttacttctttatgtaataattgaatcttctctgcttttgactcactacgttgagctacacaatttctttttactctgcatttttttttccaacctcaaattagggtttttttctcctctcaatttcacctccatagatcgggtattcctctacgattacacaattcctgtattgggtttttctgggtttcttcagttcttcacgaaaaacatttgctttttatcaagaatttgactttaatcctccgaataatttggtccgattctgtttgttgctttcgaaactgtttatgtatgatatataaaaaaaatggtttggtgtgaaatgattacgatgttttaacctctcttagattccatcagaaatttttaaaattccacaccttacacgactcttcttcctcttatttttttgcaggatctcatttcccgaccaaactcatcgaactaagaactcactgtaataaaacttttaaaaggtgtaaacaccaatggcagtttattacacaagtaatgtcggttgttaccagcaagaaccaatctttctcaaccatcaacaacaaaaccaacaagcttcttcttcatccgccgccgcttctttcaccgtcaccggcggcgatactgttcgaaacgagatggtttttatcccaccaaccaccacaggagacgttgtaacaggaaacggtaccgtttcaagcagcgatctaagctttcacgatggtcaaggactgtctttgagccttggtactcagatctctgttgctccgtttcactttcatcaataccaattggggtttactagtcagaatccttcaatttcagtcaaggaaacgtcaccgtttcatgtggatgagatgagtgtgaagagcaaagaaatgatcttgttgggtcaatctgatccttcctctggttatgctggtaatggtgggaatggcttctacaacaattatcggtataatgagacatcaggagggtttatgagcagcgttctgcgttctcggtatcttaaacctgctcagaatttgcttgatgaagtggttagtgtcaagaaagaactaaaccaaatggggaagaagaagatgaaagttaatgactttaacagtggttctaaggagatagaaggaggaggtggtgagttatcgagtgattcgaatgggaaatcgattgagttatctacaattgaacgtgaagagcttcagaacaagaagaacaagcttttaacaatggttgatgaggtaactaacttacatttcataaaactacctttggtttataacaggattgatggtgatttggttgttgtggatgtgttaatggttgcaggtagataaaagatataaccaatattaccatcaaatggaagcattagcttcatcatttgagatagtagcaggacttggatcagctaagccttacacatcagttgctctcaacagaatctctcgccattttcgtgctcttcgcgacgcaataaaggaacaaattcagattgttagagaaaaacttggggagaaaggaggagagtcgttggatgagcaacaaggagagaggataccaaggttgaggtatttagatcaacggttgagacagcaaagagctttgcatcaacagcttggaatggttcgacctgcttggagacctcaaagaggtcttcctgaaaactctgtctctgttcttcgcgcttggctctttgaacatttccttcatccgtaagtgtttcttctctcacaagtcacaagtcacaatctttcaatctcccagtacaaaacatttagagagactctatgtttttcttctgttttttttatttgtagatatccgaaagaatctgagaaaatcatgcttgcaaagcagacaggattgtcaaagaaccaggtataaaccaagcttttggtcttcacttaaaatttgcaccctttgtgttctgcttgaataattctggtttctctgctaaatgattaggttgctaattggttcataaacgcgagagttcgtctgtggaaaccgatgatcgaagaaatgtataaagaagagtttggtgatgaatctgagttactaatctccaaatcttcccaagaacccaacagcacaaaccaagaagactcctcatcgcagcagcagcagcagcaagagaacaacaacaacagcaacctcgcttattcatctgcagacacaacaaacattgtcttctcatcagaaaccaaaccagatcgtgttctaggcaatgataacgacccacagcaacaacagataaaccgctcatcggattacgacactctgatgaactatcacgggtttggtgttgatgattaccgttacattagcggaagcaaccagcaagaaagcagattctccaattcccatcacttacacgactttgttgtgtgatattatctggttcttcttggtacagaggagatgattcttgaagcgcaagaaatgtgcttttgcatttttatagtattaggcataatacacccattctctatggattatatagtagatgtgtaggttgcttttgtgtatagtagactcttaagccaaatattgatatgtgtgtataataatattcacggtggtataaaggatacttgcaagtgtgaaaaaatctgaacttgagacttttgtggtaaatgtttcacgattctttatagtatatatcactggactgtaaaaacgaaatgcagtccttgattttgaaaacaaaacggcacgtagtttctttgtactgtgaatcagttaaagtacaacagaccttggagtctctcagtcctccgatttcaatggcggtttttcagttaccaagtttgtcaccggagattcctttccgttttactcccacaccacttaaattttcaaatcgtaggagaatcaactttttccggccattatcagcaaccgacgattctcgatccggtgcaccagatccagaatcgccgaaccaaatgttcattctcgggatgggattcgtcggaggtttttttgcgcaacagctcaaagaatcagactggtctgatatctcagtttctctccttatctctatatctatctattttcatctttctccgatggtgttaacaattttggaggtttagggtggtttcagggacttgcaggagtgattctaagaagaaagaatgggaaaagagaggaattaatcttcatccattttctgcagactcacctgagtatttgttttaatcagatcttcaatgatggtaatctctaaaatctgagtcttaaactcttttgtttgcttgttaatcagatggagcttgctagattcagtgaaagattacactcatctactcatttccattcctcctttagctgacattggtgatccggtttgctttcttctccagcttttatcattagagcttaatgtgatttcttatttgataacactgtcttaactgtgatgacttccaaaagatgttgcggaatgtagaacttgtgagagacaagctttcgagtggaaatcttcgatggctttgttatctctcatcaacaagtattttcctttttaactttcctcattacatcaatgcttctgcttccacagtagacaggaacttacaatacttctctttgatgcttgcaggtgtgtatggagattgtggtggtgcgtgggtcaatgaaaagtaagtttctttcttccaagtttcatctcttttgttcatgatagataaggtcgttccttcatattgcagtcatctcccaaatcctaaaactcagtcagccaaagtgagattagctgcagaacaaggatggttaagcttgggtcgtgatcttggggtttcgactcaaatacttcgacttgggggtatttatggacctggtcgaaggttgtttacagcttctgattgtgtatgtagtgcttaaacaggctttaaaactgattctcaaaaggaacgtttcttgctgcagtgcaattgataccttgttaaagcaggagcgtttgtctgaaggtcaaaagagaagagcgtcccgtaaattcacgtcgagagttcatgttgaagatatatgccaagttcttaaagctgccactgaaaagccagcatcagggtttgtgtatccctcttcatctatgatcattcttttgtgatggatgattgaaccattgagacggatgaatcaaccattttggcagggagatctacaatattgttgatgatgatccggcagcaagagaagaggtgtttgaatatgccttggagttgatcgagaaacgttggccggggaatatcaccacaaaaccatttccatttctgtatgaatctcgggaggaaagttcattgagaggcgagaaacgagtctgcaacgaacgcatgaaggataaactaggagtgaaattgttatatccttcgtataagtcaggactgcaaagcatagtcgagaacatggacaaccgtttttgagcacaccacaggactaaattccgctgatctgaatctttcctgtggagaattagggactctttagtaaagatagatttttagtttatccttttttgtttcttctgcattctacaaaatgacaagtttgtttcattggtacacatattttccccatgtgacatttaaacatggaataaaagtaaaaagggatacaaaatgtttaagggagcttttctctaatccaaagccagtcctattttatgtcatgttgcctgattaaggccctgaaatgcggaaaaagaagtgttagcagttgagaaacttaactttgtttagatggaaagtgaacatattgagtctcgtatggatattttacctcaacgcttgaaaaagaatgacttaatcttttattactatgtctggaccaaaagctcttcttcgaggtagaatccctggctttactccacttggtgctgacggaaccgaagtgccatttcataaaagacttagacgtggagcctttggtattcgaactaggatccatcttcagaccttttccttctcgtttccctagattctggaacataagatcctcacattcactgcggacataactatctaccacacggttcttacaccttttgtaactcgttgccttcaattctgcctcggcttttagagctttcctcgataatttagtaacctgtgtctctgtgcatatgggacacgtaggatcatacttctctgtttcatttgtcattgtctctaagcatgccgcatggtaaacatggccgcacgctagaacagcaggaattggaaggtcaaacctggcaactggagacctttcagttaaaagctttgagcaacgcccacaagtctgctgatcaacagaaggggagcatgagaatctgctactactacacccacttagtcttcgtcgtccggaacctaagtgctcattatcaaaagaccatctctccctttgagactgagccacgagctcacaaaaggcgtttatggaccagccaccttcagaagaagcaaaatgggacccagtggcagtgtcattactacaggtcgaaagcacaaaggacgaccttccttcagatgttgagtaattattgggagatttcaatcccaaagtttgactatcagaaacctgcctaaacaactgctgcccaggtgaacctcgagcacgtctagacggagttgatctgggaggaagtgaatgtgtgtgagctgaaggaagatcagagaccgaggtggaacttgacggatttggtaaaactgatgaaacaatatctgatgagtcaactatattcttcacctgaagaattaaaagacgagagggttaagagactctgaagggacgaaaagagactctgattggagtaagtaatgatctcacctcaacacgaacaggacttgccaaggatacatctgcccagagaaaatagatgcatgagagacaggaaaaaaatccttcattacagtaagaaaataaagctgaaatgatctctaccaaaaaatgaaatgtctctcgatctaatcctaccaaataaatgttgttacccctttgactggattgagtagactggaaaagaacatccacgaaggaactaaaatcgactcaacagtatattcccaaacaatgaaactgaaagttctacactttccccacaaaaaaagtgtttgaacgaacatacctgaaggagatcgaatcgccaaacttgtacccgctaaaggagctgtaaccatcgaagctgtgcccatctctgagtctgcggatttctgagagccaagagtagctaaacccccagtttcagatgacggaggtcctctctctaagcctaacgacaacttatcgatgtcaatacctctactcccaacattatgattagatgaatctttaatctcatcagctacacgcctcctgttgtcccgtcgaaaactccacgatggtgaacacactgaattatcaatagctccactgggaacatttctgtcctttgcagccacacagcaaacagaccccataatccttaaaagagagctgtaatgaatatgtcttacacaatctccattggtggtgcttcctaatctaccactgaagaacttatcacagtagcaaaccacaattctgcatataaacaaacagaatgtgaacttcgaatcagagccattataatacatagaggtgaaggcagagacctcaaaatctaacgcagaaatcatcaatggaacggaattaaagtaaatacaatagatgattctaaaatccgggggttcaccagggactcaccagagcaactagggttccgcaggattgaaacgaggtatatgaagatgcggcggaattcgaatccaacggctgagagagatttcaattactcgacggagatggccgccgatctgagagagagagagacggaggttgggtgcgtcgcagggaaattgtgccacgtcacccttcctctcttctttttctgttctctgtttttcttgtgctactatttgtttttggtcaaattttacttttttggtcaatttgtttcttttttttttacataacaattttttttttttttttactgaacaaacataacaaaatgttttttttaacaaacataacaatatgtttcctaatgcaatttgattatattttttagtagtacttagtaagtcttggtatgtgtttatggacacatcgttttcgggaaacgaattaaattgtactccgaaaatgataaatgcatggagtaattgtataccaactaacttgtaataatttgaatcaacacatgctcttttgtttacgcagcccatgcatttatcgttttcgaaagtatttaattcattttgttataactacgatgagaagccgagagaaccacagaattataatgaatcggataagaaaaatcaacattctccccctataaatacaaaacaactagctaaagttcgaaggattcatacataaatcttcaacacaactctttaattatctagtttaatacaaatggcggcgatagaggacagtccaacgttttcctctgtggtaactccggcggcttttgagataggcagcctcccgacaaccgagataccggtggatccggtggaaaatgattcaacagcaccgccaaaaccggtgagaatcacctgtccaacagtcgccggaacttatcccgtcgttttattcttccatggcttttatcttcgcaactacttctactctgacgttcttaaccacatcgcttcgcatggttacattcttgtagccccacaggtacataatttaactatacaaaaaataattatgaatcatttaaaaggataacttacggtatgtaacatgtaacatgtaaaacaaaatgtacattaattgagattgattgttacgtgaaaagatataagttaattttatattcttgaatgacagttgtgcaaattattgccgccgggagggcaagtggaagtggacgatgctggaagtgtgataaactgggcatcggaaaacctcaaagctcacctaccaacttcggtaaatgctaatggaaaatacacctcactcgtgggccacagccgcggtgggaaaacggcgtttgcggttgcgctaggccatgccgcaacattagacccatccatcacgttttcagctctaataggaattgatccagtcgcaggaactaacaaatacattagaaccgatccgcatatcttaacgtataaaccggaatctttcgagctggacataccggttgcagtggtgggaaccggactcggaccgaagtggaacaacgtgatgccaccatgcgcaccaacggacttaaaccatgaggagttttacaaagagtgtaaggcgacgaaagcccatttcgtggctgcggattacggacatatggatatgttggacgatgatttgcccggttttgttgggtttatggccggttgtatgtgtaagaatgggcaaagaaaaaagtctgagatgaggagctttgtaggtggaattgtggttgcgtttctcaagtatagtttgtggggtgaaaaagcggagattcgattgattgtgaaggatccttccgtttctccggccaagcttgatccttcacctgagttggaagaagcttctggtatcttcgtctagatttgtgttatgtactattatcagaggggtcttgaatatttgaaaaacctatcaatgttttctagctccaagctagctattgttcatgtcctaagttgcatgtgtatttttattaaactcgatcaaaacatttgttatagttttaccccaaaactttacagcttcttcttatactaaaacctaaacacatttaaatagctatataattctctatataattcttatataatgaaatgtgaccaagcttttcaacttcgttgcaatgattcatgtaatttggtttaactccgtcacaaactctatatctttgtaacatacccttattcaaactttcttgttgtattctaaagttaatggtatttgtaacatatcgcaatttcgatcttattttcgtaaggagaaaggaaaaatttgctcctgcactacaacatttaatgagagctccaaactctacaaacaagtcaacaatgacaaattaatttgggcctgcactacgacaacgatacagcaaaatggagacaaaaccacatttaaggttttattgtaggcaaatggtcctaagattgtctgtatacgaaaggtgcgtcgtgagtctcgtgactcttgtgtatgtggtggttattttactctcgagttccacgtgtgtttgttataattgttagtatatacgaaagattgttagttataaccaccagctgacctgctgaagaaaggaattgagatgagccgaaaaggatcgagtcataaagcttggaccggtagatatttaaatgggcctaggcccatattggtcatttactttcaaagtagataaaacagtttcccacacatcccactaaagtcacatccaaacattacaaaaagaaaaaaagaaaaaaaccaccttatccataaccatccctgacacaggcgccgtacacgtggcgtccattaggcttaatttaatcggtgactgttacttgatgacttgtcagttttccacgagttaacggttcacgtcatcacggctagacactgaattc

SEQ ID NO: 991 - DNA, 68986 bp, Arabidopsis thaliana
aagcttaagacgaaattcaaataccagcactatggggagctgactctttggcctcaaaagcttggcatgcttttgatacttctttgattgtatcactcatatatgggtggagaatgtatgattcgtcaaaatcatgaaaagtgctttgcacctacacaaaaaataatagaggaacgaatattagaacaaatgcaaggaacaaacggcagggttcatttttccagtatggcaaagaaagatctattgataaaaaattcagtagacaaaagagaggcaaggagaagacctttgcttcataaacagaaatggtattgcgtatcatcccagcaatttcttccaaagaatgacttgaatatctcgcttcttccgccttctcctcagctttactggctgaagtatcattaacttgggaagactaaattggtagaatcaaatcaaagtaaagattcacctccatttgaataaaggacatatatgtactaccctcagcgtatatcatgtaccttggcaaatttcccagtaaaaacagaaagagctgttttccaaaacgtagggagatgatatacgattacagcagtcaatatcttgatgtatcttcccctcaaagcatccttttctctcctcgctgactcttctaatggttggtcaacttgaacttgattatcttccatagaagacgtgtcatctgactgaaggattgaaaagaaagtaaaaaaatttaacacctttaaacctgaatcttgcttatctcgcaataatatagctgccttcacaggtgaactcacaagttgaacaccattttgttgaatttgtcgccacttcgcgtcagagagagctctctcatgcacctggttgcgcaaaatttccatccttgcttcatgatcaaatgtacacttttcaagcatcccatggatcctatgattctgataaaagaaagaaccaagccagaaaaatttatatacatagtctaggaaaccatatataatgtgtatttttgaagaggtgtcatgtaagaccacaatcatgaaagaaagagatgcataatagcagaggctaagagagaaaccttcggatattaaaatcaaaagtatcaggaatccaaacactactcagcactaaacaatggaaaaccgtagtgaaaagaaaaacatataatacactgacctgaacatttaagtaatgccaaacaggatccgattcaggctccagttccagcaaaagcctcacagtgttttccagctaaattaagcaaaaacaaatagcattaagcagaggaaaagaatggggagacaagatacatgaatgtttattataaacattaacttgtgactcatagtcttacaaaagggaagcatgaaaacttcaatcattctacacttgggaactgatgatgatattataacaaaagaaacaggatcccaaacatattacaatgatggaatgttcattcattccattagtaatccacattagaatagaagtggtaatagtgaacttacactcgtaaaatctattttcggatcttccatagacctgtaaagggtgcctttaaactcctgcatcactttctcaacctcctcgagtacgcgcttgagtaaatttacctgtaaccaaagtgttactctatgctttcaagagctttgtaatgcaagtgaataatatggtaacaaacaagcgaatactaggagaaacatgagtgctatctgtctgaagagttggataatcgggcatgcatacatgagaagggagagcaatagacttcgccttcttgtattcccgaacagccaaatcatactcgcctttgctaatactactacgaattatactgggtaaattgaagagtgtacggaatctctgaagcattccttgtacagacctgatcttctcagcttgggcctatgaataatggtgaaaacagtctaagcagatagcaagaggctaggaaaacaccaaaaaaacaatagtacgtgaccatacaaacctgtctctcaaaaagtggctcaaaagcacgattagcccgtgatgtcacactcttcatacaattaaacaaatgagtagttcccgatccgtctgggtcgtcttcaatccgtttcagttttgattcaatatctgtaaagaaaggcagtaatgttcacatcaacaagagagaagagtaaagttcaaaatagataattgagtgtaataatgcataccatcaattgttgttttacacgagacaaagcagtcaaaattatctttcaccaattgtttcctttgtagattacggccctttaagtcacttttcagggcaagggccccagattctaagtctgctgcacttgtctcttggtgaatgcgagaaataaatagcttgggatcgaaatggtcagaggtgtacaccaacttttctgcaaattctcagaccagttaaagttagaaaaccggaagttgtacatcgagtaatcccgcataaagttcaaatcaaactccaaattccaagtatggtcatgaagaaatacatacccctaagtgcattatccactttctcagcttttgaaagactttcagatgactcagtgattaatctcagtgtcttgttatctattatcctacaaggtacacaaaagccatatttagataccccctaacatacagtgttccccgagatagactaaggtattcgaatgacggtagaggtgagcagcacaaacgagaggaagtaccccaattttagcggatcaatgcattccatgccacgagggaatgattgcaaactggtaagaaccactttcttgtcagctccagatacctttctatcaaggttctgagtcacggatggtgctgttctcgactcccgcatatcacgaaccttgcgtgcaagctgccaaatgtcattagcatttcagtaaaaatgttcatatttccaactaaatttttcgtcatgccatgattctaaaataactaatggccttgagctgaggtcttctacacctcaattccatgaacagataattaaaggccatacaactaatatcacatatacgaattgattcaatttcaaatcttcaaatcgatcaaagaagcaaagattacttaagactacttcaaatcaaaacaatgcaattgaaattcgtaggtcgaaattgcacacataatctctccaaaatcaatttaaagccagataaatccaaacatgatagaaaccgtacctcagcttcattaacccgtttccagcaatctggctccactccatcccaagctctatcatcttccttccgcgctcgtcctctctccttaccacttccacctcttcctctacctccgccaccgtcaccaccaccacctcttccccgatcatttccctcatcttcatccccgctcgaaatgctaagcaattccacctccgattcatcatcctcatccatcgatggcttccttgacgccttcgcacctcccttagacggaggagctgccgccctcttttgtctccgtggctgctgcactaaattggtgactggcttacgggaattagcggaaggaggcttctgataggtaacatctctctgagattgctccttcaacgccatttgaagtagctcatcttcatctaaatcatcactgctagacattgttatctctgacttagatgatcgtctttgtcttcctcccttgagctaatcgcagagatctgtgcagttcttatttgaatttagttttgtgactttttcctttgaagaatttttcttctgttttcgactttttccaatttccatgtattaatgaaataaaaactggagactcacaaaacgcagtcgttgattattttaacctaaaagttataaattctccttactcaagctttcttcttcgatcgaaatttataaatacgacgcgacaaacctgaattgcgttcagaaaccctaaagctctcaaatatatctctgcaacgaaaagaaatcacctgcttactcttctcctgaaagacctgatcttctccggtgaattgttttttgttccgtcaatcttccgagtttgtttttgcctaatatgaagttaaacccattacagaaaaaggtaatcttctctatcgctctgaacattgtagttgattttgttgatttattgttgttgtttctagagttaatgatcggataccttattgtatgttttgttttcggtattgggggttaatcacaggctatattcatatttgatttctatcaatggatccgaggaattcgagtgcgtggggtgggggtgatggtctcccccttatctcatccatgggaggtgttgaatcaaagaatagatgctgtgtgactgacgacgatggctctattggtacgaagctatgtgagaaacctaaagctgaggagattgatttttctgctcggaaaaagaagttgaaatcgaagaaaggcgggtctgttagctttgctcttctcgatgttgaagatgacaaggaggaagcagaggatggagacgacaaaaatccttctattaggagtgatgaggtggttggagaaacttcaatgagtaagaaaaagaagaaggataagagtggcaagcatggggtatgtgaagaagatgatgatgcggacaagattcttgctcaacatgggataacaactactgtttcaacagggcctgaagcggagatagctctagctcaacctgagcaagttgcatctgcagatggggctgttgacaaggacggagaagaaaagactgttgagtcagctacagcgaagaaaaagaaaaagaagaaggacaaggacaagaaagcaagtgcttctttagctatttcttctgtggaggctaaggaggatagacaagggaagaaagatgtaaagattaaagtagcggaaaagaaagttcctaaacatgttcgagagaagcaagagactcttgcgcggtggaaagaagctgaagatgggaagaagaaggaagaagaagagagattgaggaaagaggaagaggagcgccgtatagaggaagagcgagaaagggaagctgaagagattaggcagaagagaaagatcaggaaaatggagaagaagcaagaaggcctgattctaacagcaaagcaaaagcgtgatgctgctaagaatgaggctttcagaaaaagggtgttgactgatgctggaagtcttcttgttgcagataaaaacggtgattcctcaaaacgtcccatatatggcaataaaaacaaattagcttgcaaaaaagcaaacgatcctgcttctgtccaggctaaaggtgatggggaaaccaaggaaaatcatgcagcagatgaaccatgtactttacctgacttggtttcagttgaagatagaagggttggtattatcgaatcagtagacacagaagagacacatgaatctgttgatgtatcacaagagaatggtgatgaggaagatgtgtgggatgcaaaaactaattttaccatcaagggtgattctgatgatgaggaggaaaaacctcagcctgtgttcaagaaaggtttaaaagacactgcatcaaaggcacatgattcaggtcagtagaaacaccctaggaagaagaacctcagcctgtggttttattatcttttgtctctgatttatctaatattttgggtttcaatacagttcctggcgcagatagaccaacagtgaagcctggaggttctggcaagccaaaaacagctgccaaaaaagctatgcctaaggtggatgatactacccggccgaaagatacttctaaaaaggatgaaggcttagtactgaatgaacttgctaaagaagtagaagaaaatcttcgctctccaatttgctgcatcatgggtcatgttgattctggtaaaacaaagctgttggattgcatcagaggaacaaatgttcaggaaggtgaagctggaggtattactcaacagattggtgcaacctttttccctgcagaaaacatccgtgagaggaccaaagagttacaagctaatgctaaactcaaggtgccaggtatattggttatcgatacacctggacacgagtcattcacaaatctgcggtcaaggggttcaaatttgtgtgaccttgcaattctagtggttgatataatgcgaggtctagagccacaaaccatagaatctcttaatcttttgagaagaaggaatgtaaagttcattattgccttgaataaggtgagacttcttgtcattctgttggcatgtgtttggtatctttattgtcactgatgtatggcacaaaacctccaaatttcaggtggataggctatatgggtgggaaaaaagcaagaatgctcctataaggaagacaatgatgcaacaaacgggagatgtggttaaggaatttaaaatgaggctaaaccgagtaagttcttcgtctaaaggttttaatcttttagtgtgaatgggatgtgcgtgttctaaacttattaactaatattgtttcatttgtgttccaggttcaaaaccagttccaagaacaaggactcaacagtatgctttattacaagaacagagaaatgggagaaactatcagtatcctacctgctagcgctattaggtctgaaatgtttttgctatctccaaattttagtctaacatagaggtcaaccatgctaactaactaattgattaatgttggatactgatatttcagtggggaagggattccagatcttttactgttcttggttcaatgggctcagaaaacgatggtggagaaacttacatatgttgacaaagtgcaggtttgtctcattcctcttttaggtaatgaatcgtttctgcactacttcagctttcttatcttttcttaaaatggtgacagtgtaccgtccttgaggtcaaagttattgaaggccatggtattacagttgatgttgttttggtcaacggtgtactccgtgaaggtgatcaaattgttgtttgtgggtcacaggtaagtagaaaactcatgggtcatacctaaacatgtaatatgccaagtatatcataaaactggagacttgatgtaattggtttatttttttcctttcttctatttcagggaccaattgtaacaactattagatcattgttgactccttatcctatgaacgagatgcgggtgacggtactttcagatagtccatttcttgcctcttgttattattattcctagggaaacatggtttatgcaaatagctttctacattcctttttcgtacacaatgacaatttttggtctgatatttcagggtacctatatgcctcacagagaagtaaaggctgcgcagggtatcaaaattgctgcacaggtgattgtctctgacattacaattactttattcttaccttgatcttaattacttagcacaaatgaggacatcctgaacaaatgtttcctatatttttggtgtttataaaagggccttgaacacgccattgctggtactgccttgcatgtgattggacctaatgaggacatggaagaagccaagaaaaatgccatggaagatattgagtcagttatgaaccgcattgacaaaagtggtgaaggcgtttatgtacaagcatctacattagggtccttggaagcattgctcgagttcttgaagtcctcagatgtaaaaatacctgtcagtggtattggcataggacctgtgcataagaaggatatcatgaaggccggggtaatgctagagaagaaaaaagagtttgcaacgattttggcctttgatgtgaaaataagtgcagaagctcgtgaacttgcagacaaaatgggagtaaaaatcttctgcgatgataccatctattgtctgttcgataagtttaagagttacatagagggtatcaaagaggagaaaaagaaagaaacagcttgtgaagcagttttcccatgtatccttcagattttaccaaaccatatctacaatcagagggacccaattatccttggagttaaagtcaatgatggaatactaaaggtatatggtattttctcattcaggatctgagtacacttttctgctggatcacaaagatctaacaatacggtcttgttgatttaggttggaactcccatttgcattgttaaaaggattgagaatgtaagagtgtttatggacattgggcgcgtctcatcaattaagaataacaacaacatgccagttgattatgcaaggaaaggacaggaggtggctattaaggtatgagatccctctttttgtcatcatttttctagtttttactgcctttccttaaaaactaatgtttgttttcgtattagatcattgcttctaacccagaagaacagaaaatgtttgggaggcactttggtgtagacgacaggcttatcagtcacatttctagtcgatccgtggacgtaatcagaactaattactgggtaagttgtatacagtctttcttgccctgggttgtcaaaaatgttgttttaacattagcttgtgttttagtaaagcttaaactgatattcgaaacctgattgcagaatgagttatctaacgacgagaaggatcttgttttgagacttaaaaggatattcaagatacaatgaagatttttgagatttgagagtgagggacttaaacttatgtattttttttctttttttgaagtgctgatttttttatttttttttcgtttttaataatatagacaaacaactcctttaatgcccctaaatactttatggaagcaattgtcttttgtttttggctaccaatattttacaaaatattttgatatacatataatttacaagataatacccagactggcttattgtgtaacttaataacatttgaggcgaatctatgaataaagagaaataaaggacctattcacagattcagacaacatcgtcgcattttgattttgaatcgattattttacctacactcgtgtatgagccagtcctccggaataagacaacatctccaggagtctctacgaaattcttcggctctcaaaggtattcacgacggtcttttagctctattctctattgagaacctgatttttccggtgaattttgattattgcaaagttggagaatttttgagatttagaagagatactggcttaggattcgtattcatgtcgagcttattacactgtagaaatgtcgtagattgtgcgtttacttcttccactgttcgtcgcattgtcaatttagggtttttagtgggtagaataagaacgttgtgttcagtgtcacaagtgaaatcagagaatctcgaaaagcaaaaaccatgtttggaatcttttacagtttcttatctcgtggattcttgtggactgtctttggaatctgctaaatcgaattccagattcgtcaaattggtttcgtccaagaaaccagactctgttcttgctctcttcaaggaccatggcttcaccaatgaccagatcaccagtgtcatcaaatcctttcctcgtgttctgtcactgagcccggaagatgtaatctcgcccaagctcatgtttttcagttctatcgggttttcgacctcggatactgcgaaaatgatctcttcttccccgaaaatgctatcatatagcttgcacaaaagattgatcccttgctatgattccctcaagagcatactcgttgaggaagaaagtgttgtcaagtgtctcaagcgtggaatcagatgtttctcattgaagattacacattgtgtgtctcttcgtgtctccatttgtagagagcttggagttcctgacaaaagcatcaagtggttggttcaagcgtctccattcacttttttctctcgtgagagaagattcaacgaggtcttaaacagagtttgcagctacggttttgacccgaaaaaggcgggttttgttcacgctatggtagcctttgattgcacgagtgaatcagcaatggagcggaaatttaagttgttccaatgttttggttggtctaaagaagatttcgtcgcagcgatcatgagattcccaaactgtgtgacggtttcagatgagaagataatgtacacattggagtaccttgtaaacaacattggtctgcaagctcgtgacattgttgcaagaccggtggtgttatctctgagcatggagaagagaatcaaaccgaggaaccaggtcatctctttgcttctctccaaaggacttgtgaagaaggaagacatcaactatttcactatactaaagctgaaaagctccgagttcatggataagtttgtgctgaaatatcaggatgagatgccacaacttgtacaaccctttacaagtaatcgatgagtttgttctattagagaagtgagaacacactcttggttgcggctgaaccttgccgactccgatcatgttttgatgaattttgtgacatttaatttgacatcataaaatgatttagctgattctgtttatggttatggtaattttgttgattctgtttattttgtacaaagaaatatctatgatgatgatactataatgttttcatagataaagctcacatgttgcattatcctttctacgaggatgtgagagttaacacgcaatctggtgcaaaagtaggcattaaatttagctttataaaacggaacacgacaaggattccaaaagtagctctctttttatgtttttttcggagatcattgatttgtcatgacgagagcatttgtacactccaacgcgatcaatctttgtgtaaaggatttgtgtggtgttgatatctttgtttggaacgaaatggataaatataggtaggctctagttggggattactttgttataatttctaacaggttctaactaccaaaattcagtggtattttggtggattaatttggccgattagttgcatatttttagagtttagtctattgagttaagctaattactctcttaaaacaaatttcgtttatgtgatcagtttaaaaaatatataattgttgacacaaattggtaaaattttgtctccgattttttcagccaaaaaaatttgaaacactagtggtgtagtatatatgtgatccgctccattttttcatatttgattttctttctgatttttaatctatcttggaggtttagatattcattacaaaagtcaaatttatgtttttgcttcttagttttacatatccagaaaatttgattgaatatcgtattcactccataaatattattaaaactaaacatattaccttaaaaatgttataagaaataaaattgaataagaacatatttaatgattaatagatatacatttcatatttttatattcatttttttatagaaatacacatgtatgcattttttatggatattactttgcccaatcatggttaaaggcttaaagccataagtgttacaagactctcaagtctcaattatcattattggggaaaactccagttgacagaatttatattaacacatttgcttacaaagagatcccattactatcaaattcccacgaaataaaacaagtcaccacaagtggcctttccacactttcttatctataaaaaaaaaaaaaaaaacgtaaccgcttaaattgtgttgcatgaagcgtgaagcatgaagaagagtttactcacgttactcacgtatgtaagtaaacagaaacatatcacagactatgtgtcccaatcagttttgtcaaaccaaaagtaacggccatagctaaccatcctccaatcaaaaccctagccgacgacttaaacaccggtgctttccccaaaaccgctcctaaccacccaaacatcactaacgccaatgtcaccgccgccacgatcgctcctattctcacgtgatagtctttcacaaacgcagccgccattaaaggcacaatcgcacccaaagaaaacgctaacgcagacgcggcagccgcttgcatgggactcggaagcttctctttctccacttgtcctccgttctctctcttcatttgagccacctcgatgtcgtactgagagtaaacggagacaaactctccgatagccatgctacaagctccggcgaccaaaccggcgaaaccagataagatcatgactttgacgtcttgctttaccgcaccgacacccatcataagtgaagccgtcgagacaagaccgtcgttggcaccaagcacggcggctcttagccattgagctcttttggagtagtcgaaagccttttcttgatccatctccatgtctaggttcaagctgttgctcacgttgtgtgattccatggtaaagtcttttgggttggctttctgtctttatgtttttggtttgtgctgaaataagaaggtagagaatataggtgaagtgtggagaacacacgcctaggttctatttatggagagattgtgtgagtttttagctttttttatttaactttttaaaataatttatgtggtggagtcgacgattaatatatggggagcatcatcaccactaacggaaatactttttattctgtctttttcaaaaatttagattaggaaatcgaattaacaaacatctaatcgtttttacactatgattataagtttgaaacgaacaaatgaactttagaaggaaaaaaaaaaaagttgattgccgcgtaccatcggtaaagataaagcacaacgattggtataactgtacccccaaaaatggatctcaattgaattaaattcaaaaggaacttaatacttttcaaaaaaaaagttacaaataatcaaatataagaagaaaggaaatgtgaaagtatacatttatgtgtctttttcatttcatttgattcgtgaaggacaaaaaacaaatatcaatttgagagaccgaaaggggcatgcagttacatacttacactatggagttgttaagtcgtcgtcaagatcaaagccataatatgcatatatgtcttcttggcaaaaaattatacaaaattaatatataaaaatgaaatctcaacctcccaaacgattacctaatgttacacgaaatgtgttggccaaaagtttattataaacatataatactttagttttcttggttttacttttattaccaagttaccaaattaacattccttttggcagctgtactactatattgactagagaacaccatattcaaatttggcaaatgctttaatctactttcttgaataatcaattgggaaaagaaatcttcaggaacgtcttcgtattcatgtacattgtatttttctttgaaaaaatgaactttttgatcggagtgtggttggtagttacattttttagaagaaacgtaacttggaataatatatcaaaagctttctcaaagtgtcaaattttgtctttttttcttttacataacttgaaacaaatcagtagcgtatatgtcatatttattttatcctatccccttaattttagaacacgtaaactgtgaaagcatttttctagtaaataaaaatgaaacaacaatctcattcttttactttctgtttatttttgttggttaattataccttttttctcgacaaagaaacaatcccaaaacagaaggggggcgaatcaatcacacatagtgtttggatctctggattttcttagagtttgaccaaaagtgatcaacggataatctatttattgataagacactgttatattttggaattgtttgataagtgtaatcatattctacatcttcttttcattgaatttaataagagggattcattaattaggaagaaaaaataggtcaaaaaacatggattagttaatacagctccttgttgataaacggacacataatggacgattaaaatatgaaatagtagaatccaactatcttatatatgaaggggatcaaaattgaatcagatacttttcacactatagattctttgatccagcgcaattagagccgtatacaagtgaaaatcataaacaacaaattaatagtagataatgaacacattacacataaaagctagggttttttttggttatataaataaaaaaaaataaattttttgatggattggtgaattggaaagcacttagagatagatttatggtgagataaaataatagagagagatcataataatattaaagaaagagggacgagtgtggtttccacacgaatagcaccacatttcaccatcatcgtcacttgtttgcacacacactaacacacatacgtagacatctacgtattatgtttcttcatgtatatgcatgcatacgtagtcgcctacgtacatatatgccagcacattattaacattccagaatttacaatttatatagcgcatactaactataaggtaattctttttggttttttttccctatgattcacacactgcattcatataatggacagtccgaaataaatagacaatgaagacattagtcgaaattactaaaccgcttacgaattatgatcacgtatgttttcatgaattcaaagtgattgatttataattcgaatgttggagtacatgttataatgtctccaatatttttcaagcattgtatatattattactattagtagtatacactatagaatttgtagagcggcttgatcaaaagcaaaattcattaatttattatttaaatttgaaaatattgatcctaaatcaaaataatgcatggtaacatatatgttaattgtatattccttattatctccctatatatgtagtgaaaagtatgttattgtgccttttataatgataatgatggatatagacatgcatatggatttcaactttactattgtggtccaagtcctagtcctactgatcatgaaacgctaaatatcatgtaaactcggtatactttcagttattaacagttgaatacgacacgtaattttgctatgtcgatggtgaatctgtgcgtagcggtagcttagatgagactcgaatatataaattttgtagggcttgaaaataaagagttttgtgcaaatatttttaaaatgaaagccacaattcttgtctacgtaagtatatcaacaaaaaaaaaagaaatacaattctgataaatatatatcaacaaaaaaaaatgtttataatcaacataaaactttcaattcttgtctaaataaagttaagatagcagaaattttgaaacttaactgggccaagcataaatgggcttaacatgatgtggattaatgataaatgggcataacgtaacagaccaatgaagtatatgttaatccaacgacccgtttgcggtgtggtataattatggtcgcatatcttttggaaatataaaaataagtagagatagataagtggacaggtgttcattgtccgttctgatccaaaataagttcgtgtcttcgtggaactgaatctttatgaagagtttgccttggcatgggacaatgcttctccaatctgaaatagacaggtctttgtcgtcttggagctgtcttcactcttggccgagacacttgcgcagtcaagatggacacaccagaattaatatccacacctactaatatctttgtatgaatataattaccaaatcatttatgtaaagagatttcggactctctatgtcgatagaaattgtttattccggaaagtctttgagaggctcaaaaccaaaaaatgtttttgaacttatgattattttttgggggtatctgaaaaactaaatgatatgagaactgcaaatcttgtttcaaatagtaagtggatttacgaaaaaggtgaaaaattcaacaatagaggttcaatttaatttcttcactattagacggacaaagtgaatatataaatatatcttgatgtacatatcatttttgtgacattattgatatgtacatgaagatatatttatatattcaattggtccgacttggtccgtctaatagtgaggaaattaaatcaaatctctgctttgaattttgacttaaatatcgtctttacttcaaacagaattttagcagccacctcttacttttctacggtacattacatagagactattcagcaaccaagctggaccggcaacgctagccacaatgatttatgtgaaaattttataaagaaaaggaagaaatatctaagctttagctataaaaggagaaacaaggatatacatcaaaaacatactaaatcatcaacactacaaagaagaaacacactatctctctctctctctcaatacatctttcctcacttctgatcagtgtgatcacgtagagtgccttgaaggagaagaaagaaacaaaaagaaataaaaatgggataccttctagaagaaaccttaagctctaactctaaaaccccaattgttatcgatgatgataacgagttgggtttgatggccgtgagactagccaatgctgctgcctttccgatggttctcaaagccgccctcgagctcggtgtctttgacactctctatgctgaagcctctcgcagcgactcgttcctttcaccatctgaaatagcgagtaagctaccaactacacctcgtaaccctgaggctccggttttgttggaccgtatgcttcgtctactcgctagctattctgtggtcaagtgtggtaaggtctcagaaggaaagggtgagagggtctacagagcagagccaatttgcaggtttttcttgaaggataacattcaagatattggatcccttgcttctcaagtcattgtcaatttcgatagcgtcttcctcaatacttggtaattttcattaatcatggatgtcttataattcatcaagaagtggttttatattcaatgaatcttacctttatcgatacataaatttcagggcacaattgaaagacgtggttctagaaggaggagatgcatttggccgcgcacatggtggtatgaagctctttgactatatgggtacagatgagagattcagcaaactatttaaccagaccggttttaccattgcggttgtgaagaaggctcttgaagtttaccaaggcttcaaaggtgtgaatgttttagttgatgtgggaggaggagttggtaacactcttggtgttgttgcttctaagtatccaaatattaagggtatcaactttgatctaacctgtgccttggcacaagcaccttcttatcccggtgtggagcatgttgccggagatatgtttgtggatgtcccaaccggagatgccatgatcttgaaagtaagctcaatagaacttattacttatatgttttggaagtttatacatggtactagaactttatactaattttattatgtttttatagcgtatacttcatgattggaccgatgaagattgtgtcaagattcttaagaattgttggaaatcactaccagaaagcggtaaagtagttgttatagaattagtcactcctgatgaggcagagaatggagacatcaacgcaaacattgcctttgacatggacatgttaatgttcacacaatgttccggaggaaaagagagatcaagagctgagtttgaagctttggctgcagcttctggctttacccattgcaagttcgtttgccaagcttatcactgctggattattgagttctgtaaataaaatgtgtgaaatgtaaaacaaaatcgtcgttaattatatatttccatctttgttgccattctttcttgatatctttgtcttcgagtaataaaagtgttttaatatgtcatattgtctcttagaactagttttattcactcagacgaagttattcaccaacaacttacaaagtcacaagtgcatattcattgcccaatggtcggctgctttctcttcatgacttcattacctattgtatccctagcagaaaatatgactacctctctaacttatactgtaattgcaaaggtaaaagctagagagaaactttatcttggaaattttcataggaaataagatttttacaagtcaatggatttcttatcaaaaaaaaaaaaaaaaaaaagtcaatggatttagtcaaagttcaaagtatatatagattcgacttaatttcatcactattgatagaagttatttattgtaacaaaaaaaaaaagatacaggattcttatccactttttactcttgtaaacgtaacaacggctgtcatgtttaaaagcttttaaatatataaagctatatttcagttgaaaagaaagaggcaaatatgccaaaaagctaaattgtagtgatattatactgtttaatctttacagaaacaatattttttattccagaaccatcaaactgtcggactgtatctaatcggatacgaaattcttattgtttttttgttgttaaagacgaaatttcttgtaagttttagacagcaaagtacctaaaaagtcaactaaacttactaattaatgtgggttactcgatccaaacaaaccctttgatctagttcaattaagttttgtaaactcttacacatataaactcttaattttagttttagaaatatatatattatatagtcgtatttcataaagataatatatattgtttataatggtcagacaaggactatatattaaccgttcttgacttagacctactcattacatacacaagatttctcggcgactgcatagagtaacatttggattttggttaagtgaaaaaaacgtcactcgtcgtgtaaaagaattaatacagtaattaaccaggaagataagtctcttttggatgtatactaattattaagaactatttttaataagagtagcaaggatagtattaaataattataatatatgtgagtctactgaaattgataattactaaaattttgctaaattaaactttgtgactttcctggaatcaaaccgacgatgaacaaattcaaaatagactaacggccgaaaagggactggctgcggagcccataatgaagacaattgtgatgttacgtgaatttggtccaaatctccaaataaaccaactttatcaaaatggacgcctttaaaagaagatcaacaagttttttttaattaaatatgtgattaaattttgaaagaaataggaattctataaatatccaagaaaaaaaaatcatatttgattactgaaaaataaatgataaatattctatttgccttggttggagcacaaatgatgtattattcacttcgatacaaatttataaattacgtcgacgtacttgtcctcgatgtgaggagatacaaaaatgctcaaggcaatgatttatagtacttcattgaaaaattgagatgataattgttagggttatttattagatgaaaaaatctcgaggttaatttataaaataattacgttaaatattgattgaaaacttattttcattaaaaaaacatgttattttatcgataattttcaaattatccaattttcaaaatcttcaaattttcaaattttaactatctaacaaaacaactctaatttttagtagtctttccataaaagaaattgttcgtaaaaatttgaaggaaatgccaaaagcaacaataatagagagaatcattctccttggcccagtccttggtcgtcgtatcaagtgataccaatgcgtgactctgagtggcacccttataagaaattaatcttcatatctatcaagaaagacaaaaacatttaaaatacataaaatttcgattttattggatagtttagttatctatcaaactgagacaaaaagatatactaatttagatacttggtcagactaatagagtaatagtgatgaaatattagtgaatctctccgttgaacattgactttttggtatatccactaacgtgaaacaagtttgagctgtttcagccgcaaaaaatagctcttacctttctaaacagagacgactcagtcagcccccgagatggaccggcaagccaacaataatatatacgtgaaaataattttaaaataaataaaataaagagagaaatatcaaagcctttaactataaaaggagaaacaaggatgcatcaaaaatatactaactcatcatctcaacactacaaaaaagaaacaaatactctctctcgatacatatttcctcactttgatcagtttgatcacgtagagtgccttgaaggagaagaaagtaacaaaaaagaaagagaaatgggataccttttcgaagaaaccttaagctctaaccctaaaaccccaattgttgttgatgatgataacgagttgggtttgatggccgtgagacttgccaatgccgccgcctttccaatggttcttaaagcttccctcgagctcggtgtctttgacactctctacgcggaagcctctcgcactgactcgttcctttcaccctctgagatagcaagtaagctaccaactacaccccgtaaccctggggctccggtcttgttggaccgcatgcttcgtttactcgctagctattccatggtcaagtgtgagaaggtctccgtaggaaagggggagagggtctatcgagctgagccaatttgcaggtttttcttgaagaataacattcaggatattggatcccttgcctctcaagtcattgtcaatttcgacagtgtcttccttaatacctggtaattttcacaaatcatctttataacaaatctgtttgtcgtcaatgttagaatccttattattaaatcttactttatctatacgaaaatttcagggcacaactgaaagacgtggtgctagaaggaggagatgcgtttgggcgtgcacatggtggcatgaaactctttgactatatgggtacagatgagagattcagcaagctttttaaccagactggattcacaatcgcggtggtgaagaaggctcttgaagtttaccaaggcttcaaaggtgtgaatgtgttggttgatgtgggaggtggagttggtaacactcttggtgttgttacttctaaatatcccaatattaagggtatcaactttgatctaacttgcgccttggcacaagcaccctcgtatcccggtgtggagcatgttgccggagatatgtttgtggatgtcccaaccggagatgctatgatcttgaaagtaagctcaatagaacttatcacttatatgttttggaagtgtatacatgctagctagaactttatacttatgtgtttaaatatgtttttacagcgtatacttcatgattggaccgacgaagactgtgtgaagattcttaagaattgttggaaatcactaccagagaacggtaaagtggtagtcatagaattagttactcctgatgaggcagagaacggagatatcaacgcaaacattgcctttgacatggacatgttaatgttcactcaatgttctggtggaaaagagagatcaagagctgagtttgaagctttggctgcagcttcttgcttcacccattgcaagtttgtttgccaagcttatcactgctggattattgagttctgtaaataaaacgtgtgaaatgtaaaactaaattctcgttaattgtttattttcatcgtgttgccattctgttcttgatatctttgtcttcaagcaataaaagtgttttaatttgtcatggtcccttagaactagttttatttactcagacgaaattgttattcaccaacaactcacaaagtcacaagtgcatattcattgctcaatggctggctgctttctctttgatagttgttgtatccctagcagaaaaatatgactaatttattcttacttgttctgtaattgcaaaaactgaagagctagagagaatataggaaataatattttacaagtcaatagattttagtcaaagttcaaagcatagttttttagtctgaatttcatcactttaatataagattttttacattaaaaacaaaaaagtataggattgaaaatatttacccactgtttactcatgtaattgtaacaacgaccgtcatgtttagaagctctacttatatttcacttgaaaaaaagagacaaaaatggcaaaaagctaaacaaccactatagtaattagtgttgactaaatgttaattaaagcttctatattaagaagtttgggtttttagtactgcatactgtgatttattaacagatttgcagattaatgtagccaaatatgcatgagatttccaacaatttacaattagaaccgttcgccaaaattttaagcagggaggaaagtatcgtcaggttgtggatgtagtcaggtcgtggatcagtgaaggtgactatcgagagcatggagaaagaagtgtcgtctgttgtgaatttaataaggatcgaaagaaattatcggtgatagaattatctatataacaatctcataatttacaataaataataaattcagatattaaagaaaaatgataaaaatatattctttacaagaacaatatttttaaatcttagaaccatcaaacagttatattgtatctaatcggatacgaaatttcttataggtttagacatgatagtacataaaaagtgaactaaaaatttcctagttaatggggttaagcgatccaaacaaaccctttgatctagttcaattaaagtttcataaacttctacacatataaatcataactttaaatttaacactttttatatagtcaaaatttcatacagataattttgtttataatggtcagacaaggactatatccgttcttgactcagacactactcatacacaatttgagatttctcgacgactgcataaagtaacatttggattttggttggagaaaaaatcactcgtcgtgtaaaaaaattaacaacactaattaaccaagaagataagtctcttttggatatattaattattaagattattttaagagtagcaacgatcgatacgatgatataactatttttgctaaatcaaaggttgtgaccgagaaacaaaaaggaacgttgtgactttcctggaacaaacctataaaccaattcaaacaagactaacggccgaaaaggcactggctgcctgaaggggccataatagagacaattgtgatgttacatgaatttggtccaaatctccaaataaacctattttatcacaacggacggctttaaaactattaaagattagcatgttttttcatatattgatgatgatgacaaaaaaaaataagatgtctccaaacttacttgaaagaatttggaattctataaatattcaaaaaaaagttgtgaaaaacaaatttgaaaatagaatatttgatttactgagaatctgagatagaaatagaaaaatgctcaaggtttatatttcgtaagaaattgagatgataattgttagggttaatttaaattaactactgataaaataatttatttaatttttttggtagaaggccttctataaaaataattacgtgaaatattaatgggtatatgcagtagatgaccatgaaatccataatattatacaaactaaccatggacgtatagtacctgtcggaaaccaactttaaattactctcatatccttataatagggttttggttgaggggacaaatagctttataggcaaatagctttactactaaagcttccataacctcctcttcccttacaacaataaccaccactagatctgtaacaccaccgcctcctccgtatttagtattactagatctgtaaacactaccgcctccgtattcaccaccatcatatccataacaccaccgcctcttccgtattcatcactatcgccgtttacttttgttgacatgtatttttattctaaaacattgtatttttcaaagtttcttttaaataatacttgttctttactaaaattacaatgatccgtgtgtctcaattcaaacgatagcatgtaatttttgaataattcatgctatttttttatttgatatgtatattttcctataacgtttgtattttttgataagataatattttttaaagataatgtgcattttactaataatccatgttttctactaaaatcacaagtaagttactgattcatgattcatgttttttttataatcacatgcaaatttgtacaatcacatgtaatctataaataacacatatgtggtttgcttatctctgttgaaaccatttaccatattgtcaaaacaataaacctacgttctaatgtaataaaaataaatagcatgtccttaaatatcttatgcaacacttctatactcaatcacaactgtttctaaatggctatcttttaactaagtttttttttacgtatacatttttaaggtataagagatattgcgtgtgattttaataagtagtggtctaatattgcatgattttttaagaagtagcggtgtaatcattacttcatattgtcttttgttccctacatgtagcagctattgtcggaaagaaagagtttctctcatctgtaaagggtaaaatagttattttgcaggctcaaaaaagttatttacccaacttttctgcacgaacgctattttcttaataatgctgtcaaatttggtcatcctctaatattacccaatattaatctcaaacgtaaaccctttaacaaaaaaaatattaatctcaaacgtatatgaaaaaaccgtaacatgttatttcacccaatcattttctttttatgatacgtcggcgtacagttttgtcattaaaattattttacatgtaaatcttaaaatctcaactatctaacaaatcaactattgttagtcttcggtcttccataaaagaaattgtttgtaaaatttgaaggaaagtgacaaagcaacaacaattgagagaatcaatttccttggcccagtcctggtcgacgtgatcgtcgtatcaagtgatacctatgcgtgactctgagtggccagtggcggatccacgtccctgtgaatggcacccttagaagattttattggttaattaagtaataaatataaatgctcttcaagctgcgacaaaaagatatactaatttagacacttggtcagactaatagagtaatagtgatgaaatattagtgaatctctcctttgaacattgacttttggtatatccactaacgtgaggcaagtttgagctatttcagccgtcaaaaatagctcttaccctttttctacacagagactactaactcagtcagcccccgaggtggaccggcaagccaacaataatttatatgaaaatattataaaataaagagaaatatcaaagcctttaactataaaaggagaaacaaggatgcatcaaaaatatactaactcatcatctcaacactacaaacaagaaacacatactctctctcaattcatatttcctcacttttgatcagtttgatcacgtagagtgccttgaaggagaagaaagaaacaaaaaagaaagagaaatgggataccttttcgaagaaaccttaagctctaaccctaaaaccccaattgttgttgatgatgataacgagttgggtttgatggccgtgagacttgccaatgccgccgcctttccaatggttcttaaagcttccctcgagctcggtgtctttgacactctctacgcggaagcctctcgcaccgactcgttcctttcaccatctgagatagcgagtaagctaccaactacaccccgtaaccctggggctccggtcttgttggaccgcatgcttcgtttactcgctagctattccatggtcaagtgtgagaaggtctccgtaggaaaggagcagagggtctatcgagccgagccaatttgcaggtttttcttgaagaataacattcaggatattggatcccttgcttctcaagtcattgtcaatttcgacagtgtcttccttaatacctggtaattttcacaaatcatctttataacaaatctgtttgtcgtcaatgttagaatccttattattaaatcttactttatctatacgaaaatttcagggcacaattgaaagatgtggtgctagaaggaggagatgcgtttgggcgtgcacatggtggcatgaaactctttgactatatgggtacagatgagagattcagcaagctttttaaccagactggattcacaatcgcggtggtgaagaaggctcttgaagtttaccaaggcttcaaaggtgtgaatgtgttggttgatgtgggaggtggagttggtaacactcttggtgttgttacttctaaatatcccaatattaagggtatcaactttgatctaacttgtgccttggcacaagcacccacttatcccggtgtggagcatgttgccggagatatgtttgtggatgtcccaaccggaaatgctatgatcttgaaagtaagctcaatagaacttattacttatatgttttggaagtgtatacatgctagctagaactttatacttatgtgtttaaatatgtttttacagcgtatacttcatgattggaccgacgaagattgtgtcaagattcttaagaattgttggaaatcactaccacaaaacggtaaagtggttgttatagaattagtcactcctgatgaggcagagaatggtgacatcaacgcaaacattgcctttgacatggacatgttaatgttcacacaatgttccggaggaaaagagagatcaagagctgagtttgaagctttggctgcagcttctggcttctcccattgccagtttgtttgccaagcttatcactgctggattattgagttctgtaaataatatgtctaaaattataattaaaactaaatcctcataattgttaatttcatctgtatttcagttttttgtttgaaatggtcatgcctctctttgtctttcgagcaatatgaaataaaaatcttttctatttttgaattctaccctttaagaaccagtttcaattgattggtcatatgattccttttcaagatttgacgagtcacaagaccagctgctttcatttgcttccttattcatctctcttagttagttgtttgtccctatccacttacatatctctctaataacttttcttcggtaactatctttctagttactaaattgtttcatgttaagtaaattgcaaaggcttgtgagaatcttgctcatgggatatgattgtttatgttatcaatgtaacggacactataatatatttctaatcacccgttgttgaacactggttaatgtactattcgtctctttcactagctaaccccaaccctcctgaagccaccaaaacatgatctcatttattatttctattgcaaattgcaatctgtgtttaggtcaagaaaggctaatccactcggacttgatctaaaataattaatattttgacaaagaaaccttcaacccctaatgatgaaaacattaaaggaaaccctataacaattgagatgggaaacaataaaatatgatattgttcatacacacagattctagataatggaaaagttaatttatgatatgccatcgcaccagtgttgtttcttcccacaataattgcaacgaccaacaaatcgatataatcattcatatcacaaaaatagtgatgctagtaatgtccaaagtgattgtccggttgtggtcaatggaggaatatcgccgttgttgactcagacctactcatacacaatttgagatttctcgatgactgcatacagtaacattcgctcggatactcaattaacctaaggtggtccattatgtgttaaaattttcaaatctcataattataggactaattaaccctatagtatatactgattgagtccagttaatgaagtttgactccaaaaatttgtgaccttcctggaaggaaaattcaagatggggcacactaaggacaattgtgacgttgggtccaaattaaaatatgaaacgtttaaagcgtatttgatatttatcaagtagtataagtttaaagcatatttgatatttcttgccctgtttctttaaactcattcgtcctaatatacgtgtcgctgtatgtatgtataaacttattataatatcacgtcgataaaattgacgagaaaacaaaacaaatgaaaactgccgccaaaaaaagagtatataaataaacagacaattcgcgtgataccatttttctaatgatattaaactgcgaagataagatagactttatgtatgtatctatcaagcgataaaatcaagtgagtctcacctttgaaaattgacttttgctattgaaaaaaaaaaaaacaaacgacgtgaaacattctttagctgtttctttcaaccaaaaaaacaaaaattagctatttcagccggcacaagaggctcttacttttctactagaggcccattaggaccggcatgccaacaatataattaaataaagatggaggaggctaagtcttggctataaaacggagtaagatccatcaaacaatacaacaaaacacacacacactcactctcaatatctagtttttcccttgtttctgatcagtgtgatcacgtagagtgccttgaaggagaagaaagaaacaaaaacaaaggaaaatgggatacctttttcaagaaaccttaagctctaaccctaaaactccaattgttgttgatgatgataacgagttgggtttgatggccgtgagacttgccaacgccgccgcctttcctatggttctcaaagccgccctcgagcttggtgtctttgacactctctacgccgcagcctctcgcaccgactcattcctctcaccctatgaaatagcaagtaagctaccaactacacctcgtaaccctgaagcgccggttttgttggaccgcatgcttcgtctactcgctagctactccatggtcaagtgtggtaaggccttatccggaaagggcgagagggtctacagagccgagccgatttgcaggttcttcttgaaggataacattcaagatattggatcccttgcttctcaagtcatcgtcaatttcgacagcgtcttccttaatacctggtaagtttttatttcattgatgttgagttcttcaataagtcactaatatacgcaaatgaatcttaccatatcgatacgggatttttgcagggcacagttgaaagatgtggtgctagaaggaggagatgcgtttggtcgcgcacatggtggtatgaaactctttgactatatgggtacagatgagagattcagcaagctctttaaccagaccggattcacaatcgcggtcgttaagaaggcccttgaagtctatgaaggcttcaaaggtgtgaaagttttagttgatgttggaggaggagttggtaacactcttggtgttgttacttctaaatatcccaatattaagggtatcaactttgatctaacctgtgccttggcacaagcaccttcttatcccggtgtggagcatgttgccggagatatgtttgtggatgtcccaaccggagatgccatgatcttgaaagtaagcttaacaacttttattacttacatgttttggaagtaacttattacttatatgttttggaagtgtctacatgctattagaattttatactaattttaaatatgtttttacagcgtatacttcatgattggaccgacgaagattgtgtcaagattcttaagaattgttggaaatcactacctgaaaacggtaaagtggttgttatagaattagtcactcctgatgaggcagagaatggtgacatcaatgcgaacattgcctttgacatggacatgttaatgttcacccaatgttctggtggaaaagagcgatcaagagctgagtttgaagctttagctgcagcttctggcttcacccattgcaagttcgtttgccaagcttatcactgctggattattgaattctgtaaataaaatgtgtgatacaaatctaaatcgtcgtttctagtatttttcttttttgttgatatgtgattatcgttgttatttcttattttcatatttgtttgaaatggtcatgcatgtctttgtcttcaagcaatctagcaataaaaataaggttttataatttctcattgtactcttccgagtcacatgaaatattcattcatgtccttttgaatatatagctcacaagtcacaagtgcatattcattactccacggtcggctactttcattttgtttccttcctctttcactcacgggaaatctaactaacggctacttctctagtttaatgtttcattctttctattattgcaaaaccttgtggaatcttgttcacggaaatcttcacatgcttttaaaatttaatgttcaagtctcctccatttatatgcattttaaatagttggtaaataagaaaaggataggacatatagtacaactcaattaaagctaaacatactatatgcttaatttctgaaaagaaatctgagacatatgagtgaaagtagtaatgggtgaccacaaagataagaaagacacgaactaagaaacaaaaactaaggcacattgattttataaaaattgcacatcaaaataaacataaaccctaagattctaacaagagccctaccattaagagagacagaaacagaaaagctaaagagagaatgattacacaacaacactaaagctaagttgttggattaacaataagatcagaaatgtaatcattcttccattaaaaactctgtttctctacagaacaagaaaaagaaacatggctacacaacacaaacctagcttcaccgttaatgtcatcatcatcacctgcacacacacacaatcaaacatttctattaaatcaaatcgttttgtatagaaaaagaattgatgtttttgtttattgttgttaatgtgaatgtgaatgtacctgatgagctgaattagtggaagttggtaaagggttaatggaagtagagtcgacatctccggtaggaagaggaactgccggattactgttgatgaatggaactccgtctttaccagggactgtcactgacgtgatctctgatggggatggtcccggagagaaagctgaaccttctctaggacctaatggccaagggtaagaagaaggagatgagatcactcctccttccgaaaccggaacaggggcagttgctggtggttgcgatggcggtgatgccgcggcgaggatgacttggactgtgagcttctggttgagttggcatgttttgggaagagatgtgttgtttgtgaaggaaaagtagtaagagcctgttcttgatggataccactgagaaaacaagaatcataaagttcaaatgtagatcagtagagtaaagtttaagtactatgtaaaagaaagaattattaattgtcaagatgcttcttattgattatcattgagccctgaacataagactttttgtgtttaatcatttctcaattctgttgtcagaacaaagaatcggatttaaaattctattattatcaattccactgaaattattaattaaacaaacaaaaaaacagaggaaaaacaggggaagaggagctttttgtcaatctcaagaacagagagaacaaaaagggagcttgtaaaagatcacaactttatgaaatttctgagaaaccctagatgaattctcatactttctagcaatttccccaaataaaagaaattcacaagttttgtaacgaattaagaaatgcgtaccgtgaaggaagtggaattaggtttagtaagaagagtggcttgagtaaagttgcagacattgaatgcatctttgtttctgaagatgtagagatcgtatccgtacttatgtctgaaaactaaagtaagatcacatcattaatattaattaagagaagaatttaacaaaaataggaaaataaaaggactggttttgtaattaacacttactaacagagtcgccggtatgaacagtgggggatttccagacagagacaccgtcgacgagaaacgtggcggaaagagaagggcgagagaaaagagagaggaagcaaaagaagtagaagaagagcattgaggtgagatgtttctgagagcaacccatgttttttagcttgaaatgaggagatgcgtaggtttaagggagattctgaaattaaaaagaagtaaagaagcttcaatgatgtctaccctttttatctttagcaggcctctctctcacacatttaggtcaaaagagaggtttagtgtctatggagcttagggagaagagaagaagaaaaaggggtgagagacagagacagagaaagaagtattttgagaagtgtgcagtgagtgtgcagtgagtgtctctgtcttttttactttttatgtgttgaagaaatggagaagattgagaattttgaggactgttttattttattaatttgttccatacctatacttgaaatcaagattggaatttcattttctttgaattatgagtaccagattactaggtacaagtttgcattttacatgacattttgactaatgtaagtctataataagttcttcttggatttattttcctagactacaaaattaggtattgaaaataacatttaatttacaatgttcatggttactaattactttcttggttcaaaactaagaaatggaagacaggtaatagtaatacacagaagagaagtaggcatctctctgcaagtaattttagtaaacggtaaaaaaaggtaccatcatttttatcacgggaaataatgctctggtagtaaaaatctgacgaacaaaagtgtaaccaacaaaaaataacatgtactccaaaaaggaaaagagaaaaagtaacaaagtgagaattatataacaagataatgatggtgattattattcttaaatcattacgcctgtgacttaaccccaacatgtttctgatgatccctactttacaatttagttttataattatgtaggagtagtatcttctatcgtttttgttaattacaaaactttttccatctttaatcaaacgaaaatagaaatactataaccgtaacttttcgactcgatctatatcgacactactttattggctggaagcaattatacacatatctttgttttatgccagaggagtcatcaatgctaatcttatcttttgttaatataatgactgtattattacattaacatttatataacacacacggtcgaattttcttgcccccatataatgttcaaatgatattcgtatcagcaagtaaaataagatattttgctaaaacctacttggttttttattgtcagtatatttccacggtagaagttaaattgtatcgatcaaaatcaataggttccaaacacaactgttgacaaaaccaaacatctgcttgaaaacaaacaaaataacaacattaattaagctcaaggggtttgtctttgcatgattttgtttgtatgttgtgtttgatacttctaagaaagggttttcaaaaaacaattgcagtcttcgaagaatttgtatagcaaataatcggagaaaacaaatggcagcggcacgagcatggtgcaccttttcctttttgtattgaaaaccacacgaaccacacagccttatgtgttacacgtctcgtcgtatttgtgtttagcttttttatgctaaaacgacaactactacatgacaaaacgcgagcttcggccaaacccccaaaaatctcttcccgttgcttttgatggacttcatagtctattaatctttgttaagttggactatataaaagaatagtttacgatactaaatagaggtttctgtaaacttacgtttaaatcaaataggcaaacgataacatggagtaatatatattaggtccacaatggttcaagacttgaagttattgaaaattgacctctcttggcttttatgtttacaagttcaaaacatgcctgccggtttctagccttgagttcaagtttcattaagatgtttatgataataaattctgaacggcataatgtctctgctacctccacagatttacggcacttgttctaacaagttattataaaccaatcaatgtatgattttgtattacaaacgatggtctttcactcttttgtaacagctaacaaatcttatataattagtcttcaactcaattaaatttgacttcttaaagagttaaaatcaatcactgattataaattaggtattgattgaccaattaaacttttagttttgtcacacggagaaaccagaaggtcgagaatataaattaatatctcaaaaattaccaaatgtgacccaaaaacaaaatctttaagataatgaattaacgattagactgaatttttttttgtttgagagaaaaggaatccaagcagagagatgctgacgaaaaaacgcgtggcgaataataatgtacgactggatatttcaaatgaagcgtcaattaaaagggaaaaataataataaaataaaaaaagaggaagaagaaaaaggagcggttgagttgaaatttgctggcgcgtactcgtcaacgtaacgcgcgtggagtgttttcgtgtccctcctcctcctcctcctcctcactaagacaaatattttgaggttctctttctcgtttgtgtgatctgtctgacaagctagaagaatcgtagatcgtgatcggattgatttgataattatggtgaaggagacggagttttacgatgtcctcggcgttagccccaccgctacggaggctgagattaagaaagcttattacatcaaggtttcatttccaatctctctgattcttacggttctgtttttttttttgtttaaagttttgtaattttcagtgagttcttagctgaaaagtgtcgattttgggggtacccacccacgagatttgattagtttccctagttttgtgaaagattgaatctgatgacaggtaagctcaattcttaagagctttcagtgtgtgtggagttttgcaatggtgtctaatggacagaagttctttaatgtttactatgagttagcttgatcgattcagacaattacgaatttgctgctgagtgttggctttttttttgtctcttttctacaggcacgccaagtgcatccagataaaaaccctaatgatcctcaggctgctcataatttccaggcaagttctctgatttttgaatattgtcaagagaaagagtttaaacactatcgtttgaattggtatttaggaagaactcctttatctttagttgaattcttaggcttcttggcttatgatgtttggaaagtattggactggttactcttgtagatttaggatagaggatgctgtctacattttgtgtttaaccattatcccttgtgcatgagcactgggttcttctacaagatgcttgggtttgttgttttacctgataccatgtagagagctgatcaatggatcattgtattgattaggttcagggtacatctctatatatacatacaacaggataactatcgaatatttagagaaaaggctagtctaagattacaacagatattatatcaaagagtatatatactcttctgtatagtgtttgctttggatggtatagctgttatcatagtcaataaaagcatattagcaggactaacagtgacattagttttttggaaaatccggtttccaagaaattagtatgacaatgatctcagtattctttatctttcgtgatctgttttttttctttggtgaatctttctggatgaggtttttgaaaaatctaagttcttatacaggtattgggagaggcctaccaagtgctaagtgatccagggcaacgtcaggcctatgacacatctgggaagtcagggatttcaacgtaagtggcttttcttgtgatagttttatgggtgctttgctgtttagcaccatttggagtttggtgacatggatcttgatcctgttgctgaagaatttggcatgttactcagttcttacttgtggtgttcattcttgcagtgagatcattgatcctgcggctatatttgctatgctttttgggagtgaactctttgaagaatacatagggcagcttgctatggcatcaatggcttcacttgatatcttcactgaaggggatcagattgatactaaaaagattatagaaaaaatgagggtaaacatcatttattgatctatcctgcttaagaaaagtctttgatcaccttccgttcttaacatactatacatcaagcataaaacacgagaaagcatatatctaagttttctcatctcttcttacactctatcgacatgataaaatatatgttcttaagagacaagacatttgtttagattatcagaaggaataaaagaattgtgccatattttctccatttgttcatagattcctaagcatgttagactgcttttggtttcaggctgttcagaaagaaagagaagacaaacttgctcagattcttaaggaccgcctcaacctatatatgacgaacaaagatgaatttactagcaatgctgaagctgaagtaacaagactctcaaatgcaggtacggtgttttgtagcatattgttcccctttcatagtttatgctttctctttcaatcaatgccatatctgtggtaaaaaaactcaaacttatcttcttttttgtctatcttcaacagcatacggggtggaaatgttgaacacaatcggatatatatatgtcagacaagcggcaaaagagcttgggaagaaagctatttatctcggtgtgccattcgtagctgaatggtttaggacgaaaggtcacttcatcaaatcccaagtaacagctgcaacaggttagtgacttaggtacaaaggcgacctcaacaacatcatgttcatatcatatgctagaagaagtagtatgggttacataaggaacattttatttcaactactgaaaaagaaaacccaagaacactctcctagctttctagaacttggtctcctctctaggggggtaatatttagtgacttttctttatctgtcgtcctaggtgcatacgctttattccagctgcaagaggaaatgaaaaggcaactaagtgctgaaggcaattataccgagaaggaacttgaagagtacatgaagacccataagaaagtaatgattgattctctgtggaagctcaatgttgctgatatcgaaagcactatctcccgtgtttgtgagcaggtagtccagctacaactgttcactagttgactgaagtagcattttggtcaatttctgttgtgaccactctatgattattttttggcttaggtacttcaagatcccactgccaagagagaggagcttcgtgcaagggccaaggggttaaaaactctgggaaagatcttccaggtaaatcttttttcattcccttcttggagaatgtagcgcatatttattccaaatatagtttactaaaaaggaagcactgattgcaaaacgctttatttttgtggttatatagaagaacaagatagccagtgagagtgatcctttagtaagagccgaacttcacaaactaaacggaaatggtcaagaacatgatcattcatccacatcaccaaaatctgatgaagcatctcgctctaccgttggacctcaggtacatctccttcctctttagccattcatctactagtatgtttcacataaagaaaaaccaagaaacataaccttgtgtaatctaaatatcttcccttacattaccctcatctttggaaacctttttcacacatcgtgagacacagctgcatgtttgtatgtgatagacagatagagattcaggaatgatttagggtatgttgatggtgtgtaattgattgaaacttgtctatgttacgacttatgagagatcacgagatatgattgtcgggaatgatttagccagaagtagaaactgtttcactcgtagtaacttacagatactaaaaattcttggatgccattgtgaataactaatagccacttaaaggactcatgaaatgcaatgtacacggcattcttgtaggaaccgcaaagcccttatgtggaagcaccgaaacttggagaagagcaaatcaactattacttcccaaggcctgcgccgcctccaggagcacagagacactcttaaactggcaatggattgattcacagatgaacgaaaaggttattttttcctttttttgctatataatataagtctttatgcatatttgatatatttgcaggcgttggtattaccattatgtaatttttattattgttagaagaagaaattattggatctttgaaaaaagcacatgttatctcatcttagacaatgtataatgtttttattctatttatatatttgatgtttggaaatcatgtgttgcgaatcttattctcattactatataaagaacaccttagagaaagagacatataactcaatcgttttcataacttaaaaatctcttacatatacatattttctactgctttcttttgggagataataaaagcctttctcagacaaaagatctgctattgttttgggtaacattttcatatcgaatttattcgtataataaactattaaacgatgttagtttagttttaaacgttaagtttaaaaaattaaatgcatgacgttatggaatgaaatgacgaagttacccttaaatgcaacgtattgtggtaatcagtcatgtgcctatcaaaaacggaaacataaggtcaaatatggtaaacgacaagcgtcaaagtatttactatattaacaaatatttgagagaagaatttttgattataaattaataatcaaaggcatcaaggaaagcatcaatggcggaagaagcttacttgtaatagccacgagtgaagaagaagaagaaagccactggaacaaataaggaagacgatacactcacagagagagagagatacgtgtttctctgtgtgtttctacgctttttggcttttcttcgcggcttccacgaagaagccgaacggcgtgattcgcattgttctccacattgtctcatcttcctccgattttgattccaccattttcagatatattactctcttccggatctgaattgtgttggaaccaattggttctgatttcagatttcgaatttttttaatttgaatccaaatggagaaagcagagaacgagaagaagccatcggctgtatctgacgtcggagcatgggctatgaacgtaacgagctccgttgggatcatcatggctaataaacaactaatgtcatcatctggattcggcttcagcttcggtttgttttcctgatctctctatctctcccattttcattggatctgcatgatcattatcgtttcattcaattgtgtgattttgggaaattgatttgtgatttgcagcgacaactctcacgggatttcactttgctcttactgctctcgttggtatggtgtcgaatgcgactggtttatcagcatctaagcatgttcctctttgggagcttctttggttctcactcgttgctaatatctcaatcgctgctatgaattttagtcttatgttgaactctgttggcttctaccaggtaaagcttctctttgattttgcattttcccaatttctcaatttagcttttaagatggttcttctgatagtccacattgtgtttgatttcaatagatatcgaaattgagcatgattccagttgtttgtgtgatggaatgggttctacatagtaagcattactcgagagaagtgaaggcatctgtcatggttgttgttgtaggagttgggatttgtactgttactgatgtcaaagttaatgccaaaggtttcatttgtgcttgcactgccgttttctccacttctctccagcagatcgtaagcttttttatatcatgttcagtgttcattccttccttattttgcttgatctctgattttgtcaattaagtggtaatctggcagtgactctgccttttcaatctttgaatctttgtttaccactgcgttaagcgtttcattagataagttgtcgtgtagtttgagtattgatcataagttgtcggacatggacagtgtatgttatttattgttcatcaacctgtgagataagatgtctgagtacttgaaactccttatggaaaagtcttaccttgaaaaacttctttcttgatgatgatgttttctgataaaagtgtctctctggaaacagtcaataggttcactgcagaagaaatactcgatcggatcattcgagttgctgagtaagacagctccaatccaagccatttcactcctcatctttggtccatttgttgactatttcttgagtggcagattcatttcgacttacaagatgacttatagcgcaatggtaactatccaaaaatctcctaatcccgtttataaaatcccaactcttatctaattattgataaccatcacacacatacagttatgcattcttctctcctgcgcattggcggttttctgcaacataagccaatatctctgcatcggaagattctctgctacctcattccaagttcttggccacatgaaaacagtctgtgtcttaacattaggatggcttatctttgattcggagatgacattcaagaacatagcagggatggtcttagccgtggtgggaatggtgatatacagttgggcagtcgagttagagaaacagagaaagtcgaaagtgataccgcatggtaaacacagtatgacagaagatgagattaaacttctcaaagaaggtatagaacatatggatttgaaagacatggagcttggaaataataaagcataaatatagctctattcaagagaaacgttttttggttatatttttggttactcatttcccccatcatgtactcttttcttttgccctttttttcgttctttgtctcaaagaacctttttagcctcttattgatgagctctcctctgcagagcacattcttttttctatagaaatatatgattcctctacttctttgcatatatcattggcacatatcattcttgattctgattgaaaaaaagagaaacaaatcatgaaatcaaaattgtgtttttgacatccttttgtagtaatcttgtgttctgtttccgatcattgtttctgtagtttctttctctttccttacctttctgtttgatttgctgtaaatatggatttttctgatgcaataaacaccaaaatgtggacaaagtggtttcatatagaaagtcaaatttcattacaagactgtaaaaatctattaaaacattacgaggttacaagccatctaacgtgaagagacatctctagattccattgagagtgaccacaactctgcgtgctgttggagcatcacggtgttcacagagccatattccctgaaaccccaacatttccaacacaatagctttaaataagacaaagtagatgcaaatgagatcgaagagacatacacacacttgaattgctattaactatagtattgaaagatccattaccactcaacccaacgaagtcagtaccataaatgaagaaacatgaaaacatgtgattgtagtaaattatagtcagatggagaaatttattacctgccaagttcccatgctgagttttccttttgttattgggattctgcagaccaaaatgaacaaacacttgttaagtgaacatccaaaagctaaaataaattgtgctatgtcaaactacggttataatatgattgtagctcacgtgagttgacatccaaacattgatgacttgatatgagctggcatgtcatcaggacctgcaattatttaacacaattcaaatctaattacaacaaaattcatgaaatcagatgtaatgccaaagagaatcacatttcagaggataaagggaacaacatctttgattttatcgtgtgttcatatataaattagctttagtctgatgaaaccaacaactaaccttccatagtatgcctccaaggcgctgaattcccctgaaattccacaacaacaaaaatgatcaacttaagcaccaaatcagtaaattgagaagccagccaaatagagatatacctcaggaacaatcctgttcaagaaagtctcagtatcagcctgaacatctggatcataattctcattgattgtcagagaagcacttgtgtgttgtactgaaaccacaaacaaacaaacaaacaaagaaaccatttacttaatcaacaactcaaaaattaaaacagagcagaagcagagtgaaattacagagagagtgaaatctcacagaagacatgagcaagaccacaattgaaatctgacaagtcttcccttatttctttcaatatctgtttcaatatcgaattcacaaacccaatcaaatgaacagccaaaaaagctcataaattgagtcaattcagaatcgtttcgaattgaaacaaaaacatctacacacgaaagatgaaacctttggagtaataagatgacatccacgacgtagcggtggaagcgtgatggttttctgagcccacttagcaccagaggaactcgccattgaagctctatcggtagccggattagctggagtcaaaaccgatctcacacgcagaggaacaacaccagagaacaagaacgtcgagctcatagctttttgtgttcctctaagcccaataataacaacaacaatggccaacacaatcccacctccaactccaaaccaaaacctcccaataaggcctttcactttcaccatcatcaccattcatttttctcattttactttgcttctgggccttagaattgatttctataaacggcatgtagttcacctctcatttctcaaaataaaaactacatgccggtttttaatgttgttatatttcgctttatattatagtagaatcatgtcttcttgttgttggttcctggatgattacataacggaaacttgagttttccggtgaatattcaatgtttctgctcttcttcttcaacaatttctgagctgttctcttcgtggagtccggtaaacacttcaccgttgtttccatgagggcagatggttccagtgacatatctttagcatagtaatgaacaatcttgggcaacaatatctttgtctcgttgtgtatacgaacattgtttcttataaactcttctttggattttcttagatcccggaatacgcaatctgccgtgtaaacccgaacctgataaacaacataactgtaaaagattaaaatccaagagtttcaagaaagaatctgttaaaaatagtaatcatgagccagttctcttaccggaggatcagtagaaaatcctgaagaaagagcaaaatgagccaatgcctcgggatattccaaggcgtaaatgtgtttgacattacaagttttcgactttcttgatggcgaaaacaatgtctgcaacaactgtttttgcaataattcctagttacaagttatgaaacgtagtgaaagtgaagcaaaagaaacaaagagagtgtgtgttgcatacaggttgtgaaaaatgtgggcgaatgcctaagattgagctttggataatgtaagggtttacgctatagcctccaacatcataagctgcctgaaacatataaaaagtgtcttaagtaacagcaaaaacataataaatcaatcagtctaaaagatgtaaagatcaaaacctttaaaaccgaggtgtttctggcacggttgtgagttccgtaggctagatacgcctgcaacagagggaatcaagaaaaagattgaagcttttatacaagagacagaatcaataagagactagttcttgtttgcttacatgcattgtgagggcattgtgaatgtttatccaaaacgctagcttctcttcgcgtttcattctactcggatcaaccttctcaagtttttgaactagtgatctattatacacaacaattgagtaacattttagaccaacctaattaattgtaatgtcacagaagcaaattgttactgttttaagtatcttatatacctgaagttttggagcataacagcagcgtgattgaaactaccatcatccaagtgaagttctagagattctattacaacaacgcctggcacatttgcttctttgcgttcctcatggcgcgagttcaagctatcaaaagtggctttggaagagacagatgaaggtgaagaaggagaagcctgaagacaagaattgattctggctttgctggagagtgtacaatatacagaacatatgcatcttaagatatcttcagagagcctactcggattcgcaatgttatctacgataagagtagaacccagaagatctccaagagtagtgtgactactagaaacatatctactcttctcctacaaatgcattgtataattcttgtcagattcatcacaaggtttgttcgaggaaaatgcaaatgggggttgcttactcttgcagacaaagcttttaagctggcttggaaactccgaggaggacacaaagaggaacattcagaggccggagaagcttgataatggtagctgaacacactggtaacatctgattgctcggatttgggtaaaaactgattagaaactaagcttgtttcagtgtgaggagaaaaagaagaaacttgttcatcgaaagctgtcctatacagagagagcagatattgttctgtacgcagaatctcaaactcaagtgaagcaatttctttcctcaaatcttctgaagactgcaaaaaacacacaacattagaactaacagtacatttgttaccaaaagaatctatgaacattcaaagctataataaagatcaaacctttggcgtaacgttgcaattagaatcctggtaagtaagtaatctcttctcaattgataaactctgccatgaaaaatatgactttagaaccacaaaagttttgctttttaaaagagaaatgaaattggttgctcagaagaaactaaccggtttagtgtaggtagagaatcttgaaggtgatgcaacaatcacattctgcttcttctccgagttcctgtgaccaaacccatttcacattatttgccccaaattgatttcaacgaaactaaattgcagaaagagataatgtaatcatcggtttaccttggagaagatgaagaacaatcgtgagaagaaggagaaggagaacagagacccatcattttctcgcactttcttgtctgtttgtagagattcatcagagaataatattatgagtatgagtgaataattataataaaattaagaagacatcccatcaaagtatcttcctttgagacgtctcaagagcatatctcgaaaagctccagtctttttggcttgtcgtttataagactccaaaaattgttaaaaagaagatgtttttttcttcataactttccgggaaaatgagcgagaaaatcaggaaagtgaaaccgacatttttcccgggacttcagaccagatacactagtatcccgagtattaatcattctatacaaatcaagatttaatactagtctttatttatgtcagaccacagaaaacttaatattgtttcctctttaatgacgtttattagctcctaataaaaattcataatacactgatacttgttcagtgctcacaaactcaagtacttttgaaataatgcaatgaatcataagaaatgtataataatatgaattgcatagattatggaaaacataaggatatatttttatagtatggtatatattgcattatggagaaatataataaaacaagcagttaatgcagtcgatctcataacaactaggtaagtggggacaatttaacaccatccataaaagagttgacaatgagacataaaatagtagtaactaatattttgtggtcacgaatgacaaattttaaggacacttttttaccatttcattcacaataatatgcttggaaaaaacatttccaaaacaaacaaaaaaaattataagactccgaatataattttttaatagagattttaaataccattgatactgattgagcattatatgtatttagatttaaacaaaaaaaaaaagggacacagaacaagtaacagtcttaaagagagaagtatgaaaattaaaagaattctacgttgagacatttgatagaagatggtggaagtgggactactcgactaggtgtctcatgtttattttttttggatcgttttgtgtaaaagacatatatagttggataagaacaactaaatgaataaaaatagagtggtgaggatgaggcaaattttgttacaaatcatacaaacttccaaatcgagtttcattttcgacgtggtccgttgggtcagaccaataaatgcctccagtttttggcaccactcttcaattaatatcaatgtgaacaaaatgttgaatttagactgaatttaagaggtgcagctttctatgcaatttcatcaaatttgggtatgtatcatttccttttttcttttctttttttagacttcatattggttaatggttagcattcataagagaattgaatatgatcttcagtagggtaattttttgggataatataaagacaaatagttaagtaagacgtaaaattactttgctaatcatttacacaaaatgtcagaaagataatcaattattaaaaaagaaaagtcaaaagagtaattggaaatacatttttctttcttcacaaaaaaagaaacaattatgtttcagtcaccacctaatcttactcagtcaaagaaaccgggcctcactgcctcagctctgaaataggcccattctaaaaatgggctttctatcgcgtcagtcactgtactaaattttctactctgctaacgttttgtttacttggaaaatgtaataactttcttctttgaacaaaaaatttttaataactttcttaacaaagtatctgattaggttacactccgagtctccgaccataaatcggattgcatttcatttggtttcttgatatttatcagattctttatttgacttcattttcgttttgagactttgactatgtctatgagaagcaaatgtgtggttttgtaagtatcatgtaagatggatatattttaaaataatttagagccggcaaataggacaaagcaaatggttagccgtgctggaccaaacattgcctttctccgtcaccatttaagaatttagattattcttatatcgtatctctatcaatcatgatataaaattgatgtaattaataacaaagtaatcttatcaatatcgttttgttattgtattagataaaatctacagtaacttgaacaaatacattctttcaaatatcaatcgtttatggaacttgatctttgggctatagtttaaccgatccatgcaatttgaaaattgtgtatcacaaatttgttcatggttatcgaggatttaagattaagatggtactccattcagaaaaacttcctacatgtgattaattagaaaaatcaataggtgcatgcaactttattagtttcatttttaataattgaattgtgtgactaaattagcttcatgaatcatggatttatgatcggaaataatctgaattttctcaaaacttctcttaaacatccgatgttattatgagaaatggccaaatcgtttgcatgtaaaatagtcataacatttacatttaaacaataagaagagggaaccgtggggatgaaaatgcacgtgaaaatcagactaaaggagatggttgtggagccaactatgtctctatgttagggttaattgtaccctcgtgtgcatcacccatttctatatatacctccttacaaaaaaataaaatcttaaagattttgagaatctataatggagaacaagaaaaatcaaacgacagtactatttcacacaaataggggacaaaagaacatagcaataagattataagtctcacataccttgctggatttcacgattttgcatgcctctgtcattttctgggacgtgggctttctatataatttatcatatttccttcatgaataatttataacaaaaagaaaaaacaaatcaacattctggtacagtgaatgtatctcaagatatcgatcaaagaaggtgtctctgtaatttgttttatctaaagtattatgtgaaatacttaattaaatattgaattgggtgctttccgtagggacaataattccatgattgaatgctgatttgtattagtctatacatactaattgaagtcagtgtatattcccaaacaacacaacgcaatattcaatcgaactcaagcgtgcatgcgtgtgtgtatattataaggttttgctattcccattgagtcttaaattattgtattcaatgagacattcaaataaaataaaggaaatgagtcgactgaaagagagatgtaactcagtgcgatcaaagagacaaaccagacaaagaaagcaaaagagaaaagaggtcctacagtgacactgatttggaaccgaaccagacaccaaagctaaaaccaagatcctctatcctgtttggtcgcagtcgcacattacttttagcatggaggttcacgaggcaccgtatatacgtgcaattgacataccgatggtctcccttaggagtttcaaagaattacatattcataatgataaaatgtagcggagcgtaattagtttcgaccatatggtgaaatttcgtttttgtttgttttagttagttgttggcttagatttttttttcttttactaataatatgtaaaaatatatattctatcactttccttcttgaaaatatgttttgaacaaaaatcttttaacgctttgttatatattaaccaacgagatggtaagaaatactagagtcaagaactgtccactatctcgcatccactccctttcaatctaactaccaaatatatattccatgtgttattgctatcgttatcttatgtgcggctaagattacttctaagatgatcaactacaaattaaagtcgcgaatatctaaggtaattcagttatttgctagctatatgaatatttctgaaattttatatatacggttagatttagtgtgtgcatggatctaatccgtctagtccatgatctagtgtgtacaaatcaaccaaaagaatgaaaccaccactactatagtattttaatctattgtgtcctgatattagtaagaataatagctgatattttgattgatttatgagacttaaaacaatcttggcgcgtcatttatgtgctaaattacccaaattaaaaatatgcccaattctctctcaagaaccaattctatatttttagtggaaatgataaaaattgcatatatattactttaagatttacatttataaaaataaaaacgaacatgacatagtataccgtacttaatttcacgatcgcaaaagaaatatactaagctcttgtccataactaccacccggattcatcatgtgaaacgattccgagtcactcgaaccagtaactcgctcaaacctagccctcaaatacaacatctgatcctcctcttccgacggcaccactccggctccgactgacacagactgcatcatcctcaagaaaacggcgtcgttctccgtcacctttctcctcacggcaaatcccattttccttccgttacaaaacatagaccaaacaggaacatcaaagatcgaagacgaacgactattgctgcttctacgacggtcacactcgagggctatgcgtagaacaccttcctcgtccatttctttggctaaagctgccgtaggaacagctagctcgaggaggagcagcggtgaagatcccacggcggcgtcttgaaggcagaagctgactcggccacgacggtgtccgaagaaagttccacttacggtactgctactctgggaggaggaagagtggtctgaggatgaagacgaggatgaagtggaagagactgaaagggtgtcgttttggtatggttgttgttggtaagtgcaacagtatggaatcatgcattcgatgagtgaacgaagtgttcgtcggtgacggaattcgcgagaacaatccacggaggtaggagtggttatgatttgcatgtggtgatagttatgatctctttgctttcctaaatcaaccattgtcctcatgatttgtttctctctttttttaaaagctaagctcaaacttgatcgagtgaaatgaaagaagagaatattgagcttgtttttggtgaagaataggaagtgtgatggcatatatgtataggtggtgtgtggtaatggagagtggagacttttcgttgtttattcttttctttatatattttcaattatcattaatgtagtagtatactattctttacagtatatctctttttgggtctagtgcaaacggcaattaaagtgagaagatcgaccttatttgtataatcatttaaattcgtggttttttgtgcatttaaatcccagccacaagatcatcacggtttaaatattgggaaaacaaaatactactactataaacaaggtaaaatttgatgtgcaatgacgtgtaatatttacgtgcattaacttttgtctatttaaggaagtcttctacgtatgttcactctcttagctattatactatagtaacttttaaacctaaagttagaaatcaaaattcagagaaaatttctaaataacatcagaactaaatgaaaggactcaaaggaggcttgagcgaagacgaaacaaaagttgtggaggaaggagcagaagtgggatccacgtgttatgttataaaaacgagtgggatccattttgttaatgtaatatccaatcgatgtgtttggaaggaagcgaatggtgcgcgtgcgtcagcccaattgtgaagtcccacaccaacttgacacttccatccatttttcactgttatcatttataaatcgaattatgatttataaacttctctactaacatcaaaatagccaatcaaaccacactaaaaccatctctattaaggatatatcataagaatttctcacaattaaaaaaataaaaataatgaaaatgaaagagagagtgtagaaagtttctcacttgagaaactctgagatattctctacaacccatcatgacaattttcatcttattattagttcaattttttaacaaaaatacttttttaatcaaataatcaaattataatataatattaatattttttttgtttgagaaactttgtgggtttttcatggatggagatgtcctaaatctctggctttatttgctttaggtcatgaattgatgttgaaaacacaattccagtggtcttcttactcacctttttaaaattttcaaagaaaaaaaatacacattaaattgaactaattgaaattacttggactctttttttcttacgatatttatataaattggaatattgttctcgagaatatatatgctttcctctgtcactacaaaaagatttagatgcttttaccaagaaaatgtaacatgagaataatgatgtagggcgtgagggcctaagaataagcatgcatagagcaatgattaaaacccaatcatgctacggtattttttatagcatttcttgaaatgctctttataatcattgcttatatcgaattcattatagttttgcgcaacgaataaaaatatgatgtagggttttagcctaatctattgataacattcacagcatggcagtgtggcaccttgagaaagaaaatttcgaaaatcatcttcaacaacaatttttttgcttttatgttcaatttcctacgtccgtattgttatatattgaagggttaatttactgaatgaccaaatttgacatccttattaagagaatgaccttctcccagaaaagttgggtatataacgtttttttaccatgcgaaatatccgatatagcctctacggatgggcggcaaaaccatattcccgacagcagacttgtagatgtaggggagctagagattgtagggcaatgattacaacgtatcaaaaaaaaaaagcatgcattacttatgcagttactactaaataaagcatgaactatttatgagtgtagatctcaatttagagctttcattactacaactttctaagtttgtactgaacgtttcataaaatacatgcaatttacaactgcagcagcatgtactatgaaaggatttatttcattttttttttaaaaaaataatcattaaaaaacaaaaaaattagtattgaaatggagtatataccacgatattgggctggtaactttttcgggtgagtattgtactggattgattattcaacaaggtgaatgggcttttaccttgaatctatgaccagcagaagtactacgatttggtaaacagcacaagtactacggaaacaacatgtgatgttttaaaatcacaataatcatatcggagcaacttggaaagaaaacataagagaaaattattagaaaaattcccggatgtgacaataaaaagcgcgagcaaagagagatggagatacgtatcagacgcatttaatgcggcgtcagaggatatacagcttccaacgtaatatattgttgtatgtgtaaacccttttctttagtgtagcactttttaacacaaggtttgtgtgcttatgctatacgctacaaaatggcaggtcgataagttgacacgttggtcaatgacgtcaagattacgaataggcaagtgggggcagaagatatactgaatctatacctcggttcacggaaatgtgtaaagcaaagactaagtaaatcacatggttattttgacgataacatgcaatacaaataaagaacacttaacacttcgatttgacattggttaattgtgtaaagcaaggtttgtgtgcttatgctatacgctacagaatggcaggtcgttaagttgacacgttggtcaatgacgtcaagattacgaataggcaagtgggggcagaagatatactacctcggttcacgaaaatgtgtaaagcaaagactaagtaaatcacctggttattttgacgataacatgcaatacaaataaagaacacttaacacttcgatttgacattggttaattgtgtaaagcaaggtttgtgtgcttatgctatacgctacagaatggcaggtcgttaagttgacacgttggtcaatgacgtcaagattacgaataggcaagtgggggcagaagatatactacctcggttcacgaaaatgtgtaaagcaaagactaagtaaatcacctggttattttgacgataacatgcaatacaaataaagaacgcttaccacttcgatttgacattcgtgaattgtcgcttcacgcctccctcgggtgttgggagggaaatcataccgttttgaaattcgcgtggctgcaaatggttaagcaactgttactagaaatatctttagttactgtagccctaaaaaacaaagttaaccttttctataaaagaagaaagatggcaagatatcatctctcacacctctacttcttcctataaagcacacactacgtatccaacaacatcgaagaactcgatcatttctgttttggtatgcaattaatgaatgttcttttggtcgggtttgttgctatttttaaaaaactcatggttgatttatctctatttaatgcaactctattaatgtgtaggtaccgatggtggttataaccgaaataaccgacgatcgttatgtcaggacggtgagtggctcctgggcaatcggagctgatggaacatggttattcatatccaatcacaataatgcagtgaggaggttgagcattggggaaggggagaagttagcatctgtgcgccagcttgttagagaagcgtacggacaggaatacgttgaaggcccactacacctgacttaccaatggcctgattggatggacatggaaactacctttggtgggcgcacgaagccagtaagcataacttcagaggagacaatgggagtgtttctagctatgcgttttgagttggaggacttgagtttgtttgtctccaagcaaacggtggatgatggttccgaagatggtggaacaagtcagacttcaagttacggatttgcagataaaggcaaatcacctttatacgtcaacgctgaacgatcacctaactacgagtccgttgtgtggaaaaggcttatggatgacgaggcggtcctccgctggatgcgttcaacggaaacagaaggtcaaaacgttggagactcttctaccaacgtacaacaacaccctgtgagaccagctgttgaggcagcttccccgatgttaacgactgaaagtatggacacagcgactgaagatggagatcaggtaaaatattctgcgtttattaaattcagccactcgaatataccattacagtactaagacatctatttacgcaggaagaagactcaactgttgttgaggcagatttacttaaaaatctggggttaccgtcaattaatttagccactgaatcttacgactctctcagtgaaggggaagcgtacaacgacgaaaacgactatcccgggggcgagacaattaaggagtgcaatttttttgggccttccgcaactaacttggtggaacctctaggtgtacacttggatctcgcggtacctctgcatgaggctcttgaagacatgtgccttaacttcgcatctttcaacagggatgcagcgccaaccctagacgaacaaggggaagaaggtaccaattacatagcatgttgtttttaagaacaacacatattgcaagagtgttctaataataaccgtcatatagagtaacatgttattcgtataaataccatgcaataaaaatttaatttcgctgaattcctgattagtcgtacgaatacaatcttaatatccacatcatatttgtttagtttaaataacaaattgtatttaatatcatgtaatataatgatatgcttacaaaccaacacatggtttcaatttacgttgatatccctgagatatccctaatcaaaatatagagtaacatgctttaatattgaacatcatgggatatagatattatgttggtcaaagtgttactatttagtcatacaaatacatgctttctacattcacaacatgtgtacagtgtaaataacacacgaactttattgttgtgtaggccgcgtcggaatggaattagcaattcgggatgtggtctacgaaggtgatgaactgtttgttggccgggtattcaaaaataaacaggattgcaatgtcaaattagcagttcacgcacttaatagacggttccatttccgtcgtgatcgttcctgcaagaaactaatgactttaacctgcatttctgaaacatgcccttggcgtgtatacatcgtcaagctggaggattctgacaattaccaaattcgaagtgctaatctcgagcacacttgcactgtagaagaaaggagtaattaccacagagcagcaacaacgcgggtcataggcagcataattcagtctaaatatgcgggcaacagtcgggggccaagggctattgaccttcaacgcatcctattgaccgattactcagttagaatttcctattggaaggcatggaaatcaagagaaattgcgatggatagtgcacaaggatcagctgcgaatagtttcactctgttgccagcctacctacatgtgctgcgcgaggctaatccaggttcaattgttgatctaaagacagaggttgatggaaagggtaatcaccggtttaagtacatgttcttagcattcgccgcatcgattcaaggtttctcttgcatgaaacgagtcattgttattgacggtgcccacctgaaaggcaaatacggtggatgcctcctaaccgccagcggccaagacgctaatttccaggtttttcccatagcgtttggcgtggtcgatagcgaaaacgatgacgcatgggaatggtttttccgtgttttgagcaccgctataccggatggagataacctgaccttcgtctcagacagacattcctccatttataccggtcttcgaagggtaatccttaaaattgataattttaaatgttacatgttatatacagcatatggctcttatttattttagaacacatgctatctaccaatatgccctgctatatacgtataacacatgttaacatgcaggtctacccaaaggctaagcacggggcatgtattgttcatctgcaacgaaacatagcgacctcatataagaagaaacacttgctgttccacgtgtcaagagctgcgagggctttccggatctgtgaatttcatacatatttcaatgaggtgataagactagatccggcttgcgcacgatacttggaatctgttggtttttgccattggacacgcgcttatttccttggggaaagatacaacgtcatgactagcaatgtggcggagtctttgaacgcagtcttgaaagaagcccgtgaactaccaatcatttccttgttagagttcattcggaccacattaatttcctggtttgctatgaggcgtgaggcagctagaaccgaagcatcgcctctaccaccaaagatgagagaagttgttcatcgtaactttgaaaaatcagtccgatttgcggttcatcgccttgacaggtacgattacgagataagggaggaaggcgcaagtgtctaccacgtgaagcttatggaacgcacatgctcctgtagagcatttgatttgcttcacttgccttgcccccacgcaatagcggctgcagtggctgaaggcgttccaatacaaggactgatggcgccggaatattctgttgaaagctggagaatgtcttacctaggtaccataaaacctgtacccgaggttggtgacgttttcgctttacctgaaccaatagcctctctccgcctcttcccgccagccacgcgccgtccatcgggacggccgaaaaagaaaagaattacttcaaggggggaattcacggtaaacgttatacatttggaatttactgtaacacccttagtgttttaaattcctaacaattgctcaatcttcatctcagtgtccccagcgacaagtaacacgttgttctcgttgcacaggcgccggccataatcgcgccacgtgcaaaatgcccatataaaggtacaatgttattttataccgtatcatgctatagatagaaacaacgttcatacaatttttataatatcatctgcagggggtgttgtgtctcgcgtcttcttcatgagttatatgttgtgttatataagcaaggggaagtccatcacatatggatattatgtaaaaggaagggtcacttggtataatgtacatattagcaattagatgtggcaattagggtggcaactaaaagctacgttgagaatgcaatcaagggaccccaattccagtaagtgccgtatagaagaccaccttctacggacaaaggataatgttctgttttttggcttttgtgtagaaaaaaactttatgttcccccttttgtaaacagactcatgatattaagtaaagacgcgagtgtttaattattaatacgtggtgtaatgtaaaattcagatccacagacaaggggttaaatgaggaaatatatgaaacaaatataacgaatagatatagcaccattactggcaaattaaagtccataaaaatgttcagccatcatgaactgacattttatgtcaaggattccaacaagatgaaatcattccaaccataaatcaaaataagatgctattcgagaaaaccacatgtgatgtttagcaattgcgtgaggtaaaaccgggcaccgagagttgaacagttccacataggattccttatgccacttcgactattttctcagaacccaataagtgcttctgcaccacacatttcaccccccaactacgccacataaatgagtgaatatatacactaacaatattggactatatatacatattggctatcaacatctccgtcaataataaaacgtccttcggcctacttacacatgcttgcaagggtagaaatgagacagtatcgtcagaatccagtactcatgcgggtgggtgggctgttcagaaaacaatttgacgacgcattggaggcaaataacccggaagcacattatcttgaagggctaaggtatgcttgttgggagaaagatttagtcatggcaaaaaaacacatttttaaagctgtaaacaaggtagatgaggcgctgtttgttatggctatgttgtctatttgtggtggtgagaaggagctaggtgaatttttcactgaacaactgtttgccctaccttgggccgaagtattagctatgggtgattctttattttcagctcttgaacgaatggctgtgcgccatggtacagcttacaagcttacatggaatggggcccatcctccatgtgtatcaatccacaacatatataatagatgcgaagagtgctacattttcttttgttcaaaagaattctgtcggcgatgttagatggtacaagctgcacccaacgtggaaatctcgtaaccagaagggaagcatcctttaaaataatatgctgttattttatattaacccgcgtagcatctataaatcacattctgtttgtaaaaagtacatgttttatgtctaatgtgttagtcgttatgataatggtgtcaaataacgatattacattaaaatggcgtgatatgtacctatattacatgttttatattgactttttgatcatgttaatctgtctaaggtgtataatccaaaatatttttaaacgggtcattattattgcaaagtttacaaccgggtaagtcctaaatatcaactaagccacagttagaatgcatctatatttaaacgaatcatgaggtaaatataaaacgcacggtacatattagaattgcagtgacatatgtttactacacaaaacaggtgcatagaaagaacattaggtactcaactgttaggtgtctaatatattacagagtcaggtaatagaaggtaaacacactagaacatttgggtcagacaatcccattagctaattcaaaaccggcaatgaaatatttattagcagcagtcaccacatcagcatgcttcacttctttgcaagcctgaatcccaccattggcatgggcttcaattaaacgagctgccatgactccagaatattttacagaatctgcctgtggaatatcattttctctgtgaaccgcaagagatttcaaacgaagtttcttttccccagccattttaatagcaaatcgaaatagatatggtaacatttcagcaaggggcaaaagcactttcttcaattttgtttcacgccataatcctgtatagcagtcgaggacgctaatgatccttgcactcatatcaacacaaagccctacccaatgctgtaaatcaatgagaaatggaatgtagaccacagcagaacctgtaggggtacattcaagtaggtcgtgatcaaacccatacattcccttatcagcagacttgacgaattttgggtaatgcttggataattcaaccacaaatgttgaatcaatgaatgaaacggcttggtgcttttcaatgatattatttgcacaccagttaatccttatgctattaatgaagatgtccataacctgtaaatagagtagaacgcatattaggtgtttaaggcaaaccctatgtttatagagcactatgtaatcttttttacccacatgatatttatcataccattttgggtacaacggtcttgaactcaacaatctcacgcaactcaatggcggaaagtgttcgacaagccccaaaatcaatgtccctaataacagccatatgcataagttttaagtaatatgagtcaaacaaaataaaatagcataaggttggaattaatacccagacatgccatataagcgatttatcttgttcttacggctaacatcatgcccaaaagtaacagacctaccgcttgtggaagaggctattacggattcatgttggagctgtgagcaacgtaaacgtgattagaaaatcagatgttatcttaataatcaggaaattagagtttgcataatcctaaacattctgtgttaaacttaatggcatgtaatttgttctaaaaccttgatgtttgtacgggcaaaacacttacaatatgacaaaactttttaaatatttttttgttatattaggtaaaaccctgaaccatgctgaaaatacatgatgtatcgcaaaatataaccgtgtgcatattaaaccagtgttttgtttttaaaaaccatgaataagtaaacttgacctaccacaaaactacgaaatccatatttaacaatatcttaaccattcatgcacccaaactagacctaacacaaaactatgaaatccatatttaacactagctaaacgcatttatgcaaccttgccatcagggtccacaatatcatttgttggggctggcagggacggttcagatatcatcggcatttggcttaaattggcctaaaataagaaacagttgcatgtaattagtttgttagtggtaacgagagtaaaaaataatgaattatatgatctaacattatcggctgtagcaggtgggtcagcaagtccttctccatctttatctgaagcaccgtcatcaaccattggcccgggggttgacttacattgggcagtcaaatcagactctatctgcaaggcaaacaacagacgttagagccaatacacggaaaaaaaaaaacataaaaactatatgagaaggtttgaactcactatgcatgggatggtgtactgcaactctggctgacctacattgtatgcaacaccatccatgtcaacaagcaccacatatggatcagggaggctgggctcagattcaaagaactcattgacgtctgtgggaggaggaagcaaacactgagtatgactcgctgcagccggaataggtttatcagggctagtttggatatcatcaaggccctctccacctatcccatcaccgggggcatcaaccaagatattatcttgatgggatacagttttatcaccagaaacagacttttccgcaaacatatcgtctaattctttagccggcagagtggaagagccaatgtcatgaatcccatctctagctgactcatcctcagtggtatcagtcaccacccctccaactttgttgatattgacagcttcaggggatacatgtttatcagcagaaacagacttttcagctgaactgttgtctactgctggcgtcaggatggtggctgctgttgggccattgttgcctctcttccgtttctgtttgttatgaaaacaatacttgaattaggaagaactctcataaaatacagaatatttacaaaactgttaaacgtataccagagaactacgcaatccaggcctagtcggtggggataagcgacctatggaagttgtagtctgtgtaggttctgcgtcgttaatatcatgcatcacttcacctaagacttgatcaataaatccagaaccactgttctccttcgactgggctaccctgccattatccaaaacaacaagggaggatcccttcttcccacctaatccctcacccacatctcttgacttaggaccactgtgacgcttattcttcctgccatggctttccctcaacaagctgctcaatctagcctctgaatcagctatagccttcaacatacgcgactccatacgcttgtctttcatgtcaatgtaatttttaatcgaatctggtatgtgaacctgccctttagttttacggggtttagaagagccaggcaaggaagcatcaggttgtatggtatcctcatcaacacaatcataagtgctacatacatcactgttgtcattcctttcatcgggtagcgaatcagggacaacaccacctgaaaacatggaccccttgaatatgtgctcctcttttattagttgcaacatgtagtcaacagatagatcttcttcgtcctcgacccaacctgacttgaaagcgtcaccagtcggtgttccactccaaatagaaacgactttaatctgaaaaacaaagagttagactttagccacatgatattatgttttattacatgtactaaaagtatttatactgttactaacagtgaaatatagattatgtacccatgtgctccttaaaaacaacatgttatttcatcatataaccagatgttgtaatgcataccgccatacgtgacttactaaggtaacagggtatggttattaaaaagaactgtgatcatatttaaaaccatgcagtttttgcataaatcatgatataaataataaatagtaaatcagcacatattaaaaaaaaacttaaccacatgctacacatttacagccatgttatgattattctaaagaaactgtgatcagatttaaaaccatacaatttatacagaaatcatgatataaataacaaatagtaaatcaacacatattaaaaacctaagccacatgctacacgtttacacagaatgatatgaatctataattgtatgtttttgataggaaaagaagaggttttcatgataaaaacgagcatatgaaaattaatttacgagagcagagatgcattgctcacctgagactgccggtcgactttccaaacaagatccaacttcaaactccataagcgctcaatttccgtatctgtttcctccatttctgagtcactatcttcaacggcttcagggaattgcaattctctgattcgaggaacactttgcagtagcaaaagttggagtgcgtgtgggaaaccttgaacggtgatagatttccgcataagtttatcagctccccttgcagtaacactcttcaacgtcattaggaatgacatagtcccccaaggaaaatttagaaacatgtctaaattttctgccatgtccgcatggaccggagagattttacttctacccgaggttgggcataaaacgccatcaatcaaggccagcacagcgtaacgtaaacgaattccttgatcttgaaccactcgcttcttcagcctgccaacaacccactcaacagatacatcactgcggtcaaataggctgtaccaatacttgccaggcgccaattttcgtttccctttcctctctttcatacgaggcggtttgtcgcagttcaaaccggtaacattttgaaactcagaaatggaaaaccgaacaggggatccagagaaaattacccaaatttcttgtttcttcctaacaacaagctgcctcgttagcaaaaagtgaataagcttcccagaatacgcggcgctttcggagaaatcaaataatttcccaaactgagattcccggagaattttcatgtcctccgcatctaacgcgttagcgatgtcatctatcaaagacagttcactgtaggactgcactctctcaccgttgggctcggatccagacctaaacaatcgacggggtaaagagttgttcatcatctacaagtcgaacccttttctgcacaaaatagaagtttataaatcagaaacagtatgtacctaagatttcagttaatcggaatatagattggagaaataaagaagttgatggcgatcgagaacgttgaatagcttaaaccgcatatatttgtgaaattacctgtagcccgatggaattgattgcctaactgcgagattgaatctaaagaaacgatatgtatgagaaacaatatagatttgaaatagatattcggagagtttgcagaatctatgggtagagaacggaagacgtttcctctcggaaaaccagcaaatgaagcggcgctaggtttttttttggagctcctgatatttcaaaaaattcgataataaatcgatttctcgaaattaaaatctatatcgtttgcgtccacatacagcattgctcttaccaaggttttcaaaattcaaatttctgcaatcatacgcctatacacctatatgtcccctaaccaagaacacagttatagggggttgcgggtaatttcagatacgtctccgacagacactatagactcatagttagtttctatattattattgatttcatggtcatctagtgcatataccctatattgaaagacttaatatttttaggaaacaaaaacaacgttcatttatccacatagtattgaaagacttactattgaaagacgtaatctttttgttaaccataaatcttgataaatagaacaaccatgcatagattatttacacaaaattacatatttaaaagcatgcatcacatcagtataagtaagattgcatgcagtccaatatctcacaacgtagattctcttgtcttggattaaattatggggtttattgattaggttattgacttcataaccacagatggggtgattggaaagagataatgaccggagttgtacaatacttctaaattcttgatagtcagtatctaatgattctaatcaatcaactttttctttggtggtactgaattttgccaatgtcaatttttttcttcttttttagtttttttagtttgatatagctcacatacaagtttaaacaatattgataagatgtagtatcagaaataattacaatttaagaaataaaataataattacaattgtatgttagaattcagaactactgttaagagacttatatatacaactaaaaccaaagtgttactgcaaaatcagtttttacacctacgacaagtcacaaccactatatactctcttatatttgattaaacatttagtaaaacaaggtaaatgataaacaaacatgcatggcacaaaactttatttggttttggatcatatgaaaaaggaacaaacatgaaaagccaatatatatgtaaatcctgtgttcgcatcaccactttttatcctttcactgagattgtcggctttcgtttcatagtgtatatatgtccattctctcaacattacagaggtttttggtacacatttttgtaacttaatgaatatcgcaaagatatatatgtatataatcacggaatcaacaagttgcatgatttctattatatatcttcattcattattaattgaagtcatcagaaaatgggtttagttcacataaatacactacatcagaagttatatggatatgttagatacttaagtacttaacaaagataagttttaacccaaaaaagagagggtaatatctcaggttttctagttaagggtaataacatcatcttgaaagtttctactttctatgcaaatgttaaactctccttttcggaaacggatgatgaaaaacttcagttttttttaacgtttcatttactttgtaattttaatgaaagtaaatcataaccttatggctcggttgtatacgtagcttattaactcataataaagtcacaactcacacgtaaagtggaaccatttcaccgcccaaatgtccaatccataacctaaataattatgggctcgtttcttaatttctttgctattcgtctcaatagtttccttattatatatatctcttaggtatacattaataataatcaataacgatttttgtaaattgtcatatttgtcatgttctaacaagatggctgtttattactacttgtgagctagataagcatgatttgagtggtttagtcaaatcaacggcatactttggagagggggaacatgcttttaaattattgtaatcaaaaaccactttaaaactgttacctagttttgtatatcaaattattaattattgttatcaacaacgatcttgatcactgcaacaatataaggcatatagagctagctatagttacttcatattcttatatatatgatatataacacacgattagtgggaaataattaaagctttatgttttctgacaatataatggcttcatgatggcatgaattatcatatgcatgtttaattatgtgcactcagttagtggactctaaatacatactattcaatattttttatattatacaacatattttgaccagccaaaagcctaattgactggtaaatgaaatacatgtgataccatgataatacattaaaaaacattaattatcaatcaaggcactatataattaacaaaagttttgactttaaacttaatacgtgtcccctatcatatggtttaaaatttaaatcaatactagatgattccgttaatctatatcaaatatgattccgttaatctatatcaaatatgattcaaccttttttaaggctgttatttatttgcagttttgcatgatgtttcatatgcttttcgccgccctccctatctacattatctgattgggcaaatacattacttcaatgggcctatcttaggcccaataatagaactgtgcatggtataataatgggcctactgtctgatttgcgcgtagagaattaaaaaatcgttatgtgttttgttttttttctaatatttacttaacacaaacatctatatatctgaaggtttgtttataatgtgtattatatattatcgtagttcgacttatatgacaaaaccatcacttgcttactaatagtttaataatcagaaacagcttaacttaaattaaaagacgacgatattaagccacgtacacaaacaagacacccaagtggccaagccatgcgtacacaaacgatacttaaatagtgtagtatcgaatttttttgttttgataaataagtgtagcatcatttggaaaaaaactaatttaattttagcgtttttttttttgtatagcaaattctatccttaatcggaaatcaaattccgtaaaacaatttgtttttttacccaatatccacatgagtataagagctaaatttttatacaaaatagataagtcgagatcttatcaacatatcaaagatccgtgagaaatcttgacgaaagctcatgataactacaatacattgaaaataattgctcgaatagacagcgattttgaaagtgaaaccccttttcaatatatgttataagctttacgccccaaacattaactaagctttccgccccaaacattaactaagcatgttcaaaagaatttgacattttgagacaaacgtttttataaacttattagtccaatctagttattgtttttagaagtgtgcatcattatataattagataataccatgtttgtgtgcacaaaataaagaattactacaaaaaaatcaaactttattttctatataaatccattttactctctgatgttttgtataaactaatgaggaattaagaaatttattatcggcttggtcttgaatacttaacctctctacaaaaatctcaacccaactaattattttcaatccccactgatttcagcagagagttatcttccttttttggataaaatcctttgatattatatattgatctttttgataaatggttttgtagcatgttcatttcgtgaatgagaaactcagatgacttggctagggtctagaccagtgatgttaagaggccctgaccgacaagccgtgcatgaagtttttcatgtatatttgagaagtatttgtttgttttgtatggtttttgtcattaaaggatgtatggatgatgagagggaaatcaaataattaatgattgagttgttgttttttttattaaagggtgaacgattgagttgcttatgaacgttatttgcctatttttgtgcgttttttttctcaacgagtttgtgaataatgaaaggaatatcaatgtgtcattgaattgttttcgtatcgtgttttgcttcttctgttcttctagtcaatgacgctgtatatgtggcaggactcttacttattctaccaaattttgctacaaattcacacttatattaatatagaagactgtgctctagtcctgtgttggtagaatggtatatcttgtgtagttcatgacaaaacatatctttttctacataccaattatatcaatcaacaagaagtcttagaaacttaagaacattttaatttatttactaaatgagaatttgattttggtgacttgggggataaagagctaaatttttgcaatatgtggaagatagaaatcccaatatcttacgcattaaatttcaatatcaagaccagtttattttaaatagaaaaggtatgatatgttttaaagtcgcatgtgatctatgtgcattaattataagtttgaaaatatgttcatcgaaaaagtttgaagcttatccaaccggaaccatatttcaaaaactagtgtatatacatggttttttggtcaaaggaggaaactattcatacattttagaaggtgcataaatatataaattgaaaatgtacgtatttaaagaatcactcaaatctcgtgtagggactcgccaaaactaaaactaattcaataaaacaaaacacaaaataacaaacgaattggagagttgacttttttatttgtctatcaatggattcaataaggcgaaaacacaaggtccaataaggcgatttggtcactcgtctaaagacttgacgccaattttttgggtacatatcaacggtctaaatctacgtggcaacatagacctatctctcttctgtacacattagtatctttttttcattgtcaaatgtactaacaacatgactagaacggaaaatgcaataaaacctttatggtaaacaagaacagtttatacacaaattagattcagtaatcctagaaaatagtatatactaatatataacaaaattcttatcatactaattagtgggagaaaaaaagagtcataccgtatttatttccttttaatcaattacttcctaattttatatggtaataattactgagaaattaatttagttgtatatttttattttagtatatgtattaacattgttataaaagaattgatatagttaagtacacctcgcctacatataacctgtcattgtcggaaatttgcaagtcatgtcggaggatttgctattttagaagcgaaaagaaagaacattgatatcttaacgttcacaccaattaccaaataagcacccacaatgttcatatcatcatatgataccaatacggcctctttttttataaaactgtggtttcatagtgcctagtggaatctatatactattcacaccacctctctcagttgaatatactttatctatagaattctcttgattacatcagatatttattgcttttagtttatattgcatggtcacatactatttaatcactatattcattaaacacgaaagcacaagtgcacaactcaacatacagtatgctgaaactacatttgtaatgccataaataattctatgctagtaaaagatcgaggactaagcaaaactaagatgacttat

SEQ ID NO: 992 - DNA, 108365 bp, Arabidopsis thaliana
gaattcatcttacaatagaggataacatctttaatcttctcatctctgtcttcctctaccatcgaactacaaccggaagaattagccggagaagattttattgagtggatggaactgctcttccttgtcactttcttagatcttcctcgttgctcaccttccgccgccacgtcaaagcacatacacagccgcataaatggtttcaggaatccaaaagttcttccacttgtttttggttgtgacattgttcaaagatgaaaactacaaagatcgctcaagaaatggaatcttaagaatacgaatccacgacggtggtgtctagagtcgagagatgtaaaatgtagaagatttaagtgtatcttttagtttcttacagattagggataatgactatatataaacatacaaaaggtaattacaattttgtgttttgattctttcgttattttgtttctataacaaaaagtagggcattttctgaaaattagaaagttttggtctttctagagattttttgaaggaccgtgatgtgtgttagtaatagtaatagttatttccttatttgaatgagcttattaatgtattttactaatttgttaagttttgaattgatgttaccggctaaatttgagaattcaattactgttaccacatttgtgggatacaaaatctgcggtataatatcgttattcaaaaacaaaaagaatgaacatttattgttgagaaaaatattggcgaaatcgatgctatcctttgattgaagcaatcttatagcattggtaagatttttgtttccaactactagcttttgctaagaataactatccgactttatcgctatcttttcgacttttttcgtttgcaatatattagcaaaataaatcatgcatgtaataataatataactgaaataatgataaatgatgttataagaagaaagaaagaaaattacataaatgctgcaagagtaacttgtctgtccaaaggtatgaaaataaaaaaggtagctagggcccaaaagcccaaaatacatgctgcaccatgtttctaggtcaaagcagcaacgcaatctcgagtctcgttatagtattccacttttcattgcttcatcacacgatcagatctagatcaaaggtttgggacatttaccacaacaatgtggctcttcctatatcaatcagctcaatgacggttttgtgtcttattctaataatctatatataaccgcttgccattccaatgatgaagagggtagaaatctcgaagagcaaccttttcgtaaacttgttgctctttagattttgatgaaccgcacctaagttcttagctgtcgaatctagcgcctaattaagcttgcctctcaagtcccaacgttttcaacccttcgatagatagcgattagcgaaccaacatgaagatcaatattaattggtggaataaattcacaaatatgagattttaatgattagtcaatgtagttaaaatcataaacccaaaacttttatgataacaaaacttgagtaacaagtaatattttttgtttgtatcaactaaatatacgcaagtactcctatcacaattaagtcaaaatcactttcgagtcaaactcgaattaataatacagctatgatgaataaatgccatccggaaaaaaagaattaaggtttgacttcctattatttcacaatttataagtaatttgtactcgtatatatattttaatcctaacagtactacattatcgtcaacccaaaataatattgggatcggagcttaccatagatctagtttttaaggctgcccaatcaaacttgtaggtggtgatcgacgatgataaaataacaattgagggttgttttaataataataaaatgctaaaaaataataaatacagaagagaattctacttgggggaataagaaagaatgaggattcaacttcgtagatttgaagggattgagagaaataagagaagcattggtcgacacgaaggtagaagcacgtgttctcccgtgcgtgtggcccttaatcttggcgttaatctatcttattaatcttactacattattatggttacaaaatctatgctcttaacggttaataatctacatttgtactttaacttgacagataacattttggttagtaatgaaaataatacaagtattccccgctcttccaaggcggatcatactcattaaatacaattgttttctcttttcttttcttaactatcagtcaagatgctaaattatttgtaacaacaatatagttgaattgatcggacaaatatcttttgttagaaactcgaacttaattcgttctttatttgctatcaaagactatacgtattatgcatgtaatagtaacttattggatttgacggtattaattaagtaacttggcaaatggataaccaaaatgatgtcaataaatcaataataatattgtaccgacgcttggaagtgttaaaacgatagaatgtagaagagagtgcaagtgatcaaatgttacgatgctttgtttactaaatttgtggtgtcttgcggttcacgagaacaagatgctgagaatgtaagtgactaaatcatttacacacatactgtatataatatgatggctccacgataatattttaagagagtgtaattgtaggatatatcttacaatatcaataattcatatttttcttaacgtaaaagattaggtcaatcaaacaaaaaaaagaatgaaacgatttgcatcatccaaattaataaatattaagacatattttaaacaataagtttttgttttccgataaactttgaaattatgaaatgcatgtactcgataataatactcttatgtaaaacaaaaaattatgaaatgcatgtactcgataatcaaagttgaactagtgatggctctcaggaacactcttacgtaaaaatgtgttggatagtttagtaaccaagagaaaacgtcaaaatgattgcacaaattcatagactctaacagacgatgaagacatagtgtgttggaaggggaagggagatcgcttcaaatcaactttcaacacgaaagaaacttggacggccataagagaatcaaaaccaagagcagagtggcaccaaggagtttggctcaaccaccacaaaccgaagttctctttcatgacttggcttgcagttagaaatcgtttaagcacgggagatagaatgttacaatggaacatgggggtgaattcatgctgcgttttctgtcatgctccagtggaaacacgaaatcacttgttcttcgcttgtcaatattcagcagatgtatggactggattatctagaaagctcttatctcaacggttttcaacagattgggacatgatcatcaaactcatcacggatacatctctcgggaaaggatgtttgttcttggtgagatatacttttcagctcacagtgcactcgatatggaaggaacggaatggtcatcgacatggagaagcacccattccctcctcccaattaacccgccgtctcgataagcaaacccgaaacagaatctcttctattcgcgagttaggagatagaagatatgaagactatggcgatttagtttggctcaagataacatagacatctctcatttttctaaatttgttaatgctctcaaattttgcttaaacacaagccgcacttaatgtaaaacaatttttttagaataattttacataatattcaaaaaaaaaaaaaatggtttgtcaggaaaaaagtatttttttaattcttatgaaacccaaatttcaggtcgaataaactaaaaaatcttagagaaattcatccaattgtttaccaaaacttaataggaataaatctaacaaggaccaaattcgaaggtaacttgacgaagaagaaacggaaaagaagacgcacggctcggcaaccgcccacgtttacttcgaaacaattcacacatttatcgatgcacctctgcttccacacacacatgctcttcctcacctctccattcacacatacacacccgtatatatagagttacatgaactcaattatacaccaagtgcccacttgctagatctcacaatctttcacacccaaaaatcatataagagtacatgaaaaatgttgccgtacattggacacaacagctaccagcagcaccagtttccgttgccggagatggaaattccggagaagtggaagctttcttacgaacaagaggctattactgctccggcttgtcctcgttgtgcatcgtccaacaccaagttttgttattacaacaactacagcttgtctcagcctagatacttctgcaagggttgccgtcgttactggacgaaaggcggttctctccgcaacattcctgtaggtggaggctgtcgcaagagaagtcgaagcagacagaacagtcacaaaaggtttggccggaacgagaatcggccagatggtcttattaaccaagatgatggattccagtccagccctcctggttctgatattgatttggctgcggttttcgcacaatatgtgactgatcggagcccttctagtacagataatactactggatccgatcaagattcaccgataacaacaaccactcatgctttagaatctttgagttgggatatctgccaagaaactgatgtggatcttggattctacggggaattcaataatctaactcagaagaccaaagaggatcaagaagtatttggtcagtttctccaagaagatcgagaggagatcttcgagttccagggtttactcgatgacaaagagattcaagagatcctggaatgctcattctcagaggagccagaccagttagtttctcaggggagcttcatgatcaatggtgataactggagttcaacagatcttaccaggttcgggatttgaccaggaaggagaagatggtgtctttctttttgatcacatatactttaatttattaaatatagaaaagtactatttacactaaaactgattcttatattgttcataaagttatatcatacatgaacaatcccacaatataggatccgtggagtagattttactgtatattagtctcgaataatggatacaacttacactttctatgttcttctgctttgcattcttctatcctttcagtttcgaattttggaacatacctgtaaaattcacaaatccttactatatctatatgttaaaaagcaaaatcttgacagttctacatctcgttaagaaagaaaggaagtttagtttgcacctctatcagaacaaaaactataattaacacttttcatcgatcttttgttagttccgacatactacggacctgagtctatggaacataattgatatagaacaagcgacttgcctgaaaataatgctatttgtaagtacaatcatgtcttagctcatgactttgtttctgggtgccactttatgctgcaaccaacacttagataccaaatgcaggatatcagttggtcatcaaaggctatagaatcgaagaaaaatgtatcagatttcagtgtaccttggcttttgatttgatggtattggttgacagctaagggaaagatcaatcgccaggcttagatccctacgcacatatataacaggttaggttttactttaagacttctctgaaatatgttaaaagcagtaacaacgaacctcccggttactggtgagttactgctaggccgggaatcatcaaattgaccatgatagaccagctcaaatggtctacgaccatcctgctccatttgacaggcgagagcaagttgagatagagttgataaacaaaacaagacacaattttcataagaagtattaaatgtttgagcttataaaggaattcatgatttatctactcccaatccaacaaatggctatcttaagcatatatccataatactatatttcaaatacaactttgtgagttaatctttacatgctttagcagaacaaaattcatagaatacccaaaaagtagacactgcaactgacttatctgctgtcaaaatatatgatcacaaattaccttcttatacaagaaaaactcaggtgtacaaacagctccaaattctcttgcaacctcttgtgactgaggcaagagagaaaatgtcacaagaagatccgaatatgagtataatcaactaacaaccctgaaaaaagcattgaatagacaaaaagatacctcatcatataagtaaggaaatgggtatttgaaaacttttgcatcctctgccatgaactcaggcccatcctgtgaaaatgaaacgaaacttaaagaaacctcatctcaacaattaaataagcactgacactacagagtcacacacacaaacctgaggatgagttaccacagaatttgaagatattgcaacaacagcaagacctttctgcagaacagaacaatatagctaagattcatataccaatggatataacaatggagaagcaagtgttcggtaccttcatatagaaattgcatagctttacaatgtctttttttaaatgaatcacaaacgggcaatgattgcagatgaacattacctagcaattgtaacagtatcatgatgaacacaagaacagagctttaaatacaaattatggcaaactgaatcaaacagattaaagatacactcaccagtagagacggatacagttcaaaatcttctaatttccataagtttccagtgagcggctccggaagctaaatagttcactcataaacacacacacaaatctctataattagaaactccttgttttttatgtttttccagcgacgcgcatatcacagttttacctcaaaattgggagctctagctcccagttttactccggctgactcagttctagcggcgcgaaccacgaggcgcctcggcgatggtgcattgactctccgccgcagattactgaagtccaacctcgacggcgagaatgaagaaaacctccgggaagagactgctaatgcagttcgtgaaggaagtatagatgaagctccgtgtgtcacggtggttacgacggtggaggcagccattgtagtctctggtgatttcttcaattctaccggagccataaaacacgcgtcagtatcttagacgtttctagatgatgggccgaatagagataaggcctagcccaatatgttagcacaaagtaaatgaatatttcgagaaattaaattgtatcttcttttggtccaagcccataaacccaacattattttattaaaaaaacaaattagtatatctttttttcttttgttttactttttagtttttacttcttctcaatcaaacactttttatatccgaaaacagaaattaaatagttattgatggccgactaaaaaagaagaccaaaaaacaaaacttataaagtactattaaattttagcatctagaagagaaaggaataagccgataacgtaatgtcttaggctcttagattaagtgattgatttattttaaaacaaatctacaaaagtatttcaattcatgatacaaaaaatattgtgattaattaaccatgatatgataatatattttgtttctagtgatgttagaggtgacgtataggccttttgctttcaaaacttgcaatatatatgcgatttacttgtacataactaaatgtatataaatcacacacaataacaaaagtttacaaaacattagtgaattgttaaactacgaaatttttataaacttccacccacatatttggaactcgttggaactaagataaattaatctctcataaagttttcttgtttctataattgtattataaagaatgtttatcaatatatatgaataagttctaaattgtgtaattgtatatatgcgatatggacttaattttcaaatgataaggcaccttctttataagttataaatttataattaaaggatattctctaacttttcgtcgtctattaagaatgtaatcacattagggtcatgatcgggacttaggaagactttatacgctactgcaaattcacgttttagtctgatagaaattttagttttatacaattaaaagtataatagtgttagtggattagtttttagttttgtctcttttgtttttgaaaagggttgtaagtttgtcaatggagggtttaactcgagtactcatgaaccatatatgatgcggtggtacgtcaagagtggagatataggattagatatctcgtagaaaaacaatttaaattttcttataatttacgatcttaaatacagtatcgtactgagaataagttcttcttaccaacatcataatatgtttactttagatataaaaattgttgagaaatatttaaaatcgtaaaaaaaaacgaaatcaattggtggtatattacaaaaccctttttcgttttaatatattacaaaaccttgttaggttttaatcgcttaagagcttgtttttatttattgtgatggttgaaatgtatttatattttattgtatgtacttatactaaaggtacttaaatttttattgatataaagtacagtgtgagtaatgtttgatacaggagaaattgtcgtattatgtaatgtaattgtgaagcaaattgagctttacatgaatattcaatatctcaaaactaaatttcaatgtaaacctttcacataattatatactaaaatatctatataacacttatataatatgtatagtggtgtaaatgattggattcatgaagaagagctgacaatccaaacaattaagaaattgagagaagattccttttatttcatccttgcatgccttatgatcagccagcacatctaaacggaaccctaaacccattaatcaatattattagtgttttcaacagttagtttaatcgttgatatcaaccattctattttatttaaataattggatcgattagaaccataaaacaaaaaaattgaggtcaaaaagtgggtcaccatcatcataatctaaggaatctaaagcgattagtcgattactattttcatgccatacccatatattatatgaatatatgcataacatatatatgagttataccctctttgctgttggagtttacttgtctccgcttctaacccaaaactatattattattatatatttttggtttaagccaaaactattttattactttcatcaatcatattataacgaggaacaattttagcatattaaagttgaatgtcttttctttttccttatatttaattcttctctttataatacaaaaggtaacaccaacttgataaagtctttcttttttttggggcaaatacttgatgatttaaagtcaaagcgatgttttacattaatatatatataacgctggtcttgtaataaagtagaagattacaaagaagaaacagagagaagagatcatgaagagaaagagatacgagatggagaagaagaagaagacagagattcaaaccgccattgaagagctctctgttttcatcgtaactaaacctgcagataagactgaggctacacatatacccttgaggcctattctctccttctgcagcttaatcatccaagttcttggtatctttatttctagttttcgtaggaaattatattattttgattaattgtttcatcgattttatatattttcctgagaaactgaagttcaaggacaactcaatgattgtcattgtcctgagctgcttgtgttttggtgcttgcagataagataggaccgacaatggctgttcttagacaagacattgatcaaaatattcaggtaactaaagataatgtaacctcatgcatgcatattaagacaagacaaagagcttttatttatatttttatttgtcctctttattgattgaaactcatcacatcatgtgtacgtatgcatgtaatgtatggtggccggtgggtctaaactaatatcaataaaatagtctatataaaaaatctgttgaacttttttgctgataagaacgcccaatagatatcttctcaatgcttttgttttgggtaaagatctcttcaaataattcaatgtcaggcttgtaatcccttattgagtctatttttaaaagactttctagaaaatctcttctttccctctttttctcacacttcaattatcatttacttatgtatttattatttgttgatttgggtggtgtagagattagagaaattttatgaaacagattcctgtgtttactcgaatttggctgagattctgaagaaagaaaaggaggagggaacatccaagatggttgcttagttgtggtagagctcttttttggctcactaggtaggtatattcacttcttcttttttttgttaaaaacccttcttcttttttcccggcgatatttaccttaattaatgtataattcatcacctaattacagaattctcataattgatatgcatgcacattaggattgtattctaagttctaattcataaactgcacttttcgtaattagtttgtccgatccatcacgaatattctctctattagcactccgtactactagttacaactttggactttaccatatatggaactaatgattagttaatgtactatttagtgcttaattaggtgtatgactctttcttactatattctattacataggacaatggattttactgcgggtttactacgattgttgtcgaaagagatgtcgtcgaaaatggaagaacttgtagaagaatgctacatgacgactttaaaaccgcatcatggatggatcgcgtctgctgctttcaaagtatacaccgtgatccctctcattctagctatgtcatacttactaacatcattttcttgttatatcccagcaaacttattttttattattatgaaataggtatgaacatataaattaaacttttcttgggaacatatattacatgtgttgatatcgtgagaatatgtaataatgaaggtgtgtttgaagctggtgcctgacaacaagacgttcatggaagcgatcggtgcaagagacgagagctatgataccttaagagaagacattgataccttgagctcattgttgacacctattctcaaagaaatctactttgttctggtaattaccattaacttataatgtagtatttttgtttatatattatacagttaaagtcctttaatttatacgttttcaatttttcggtttatatatgtatatccatcaattgattagcgtgcatggtgtttcaatttctgtttcaggaacaatacgggttgagcagattaagatcgatgtaggtaatggaatttagtggatattctcccaaatgataattttacttttaagaaaaatgtatatatctatgtatatatgtatatcattgttgtaagatttatttatttaatcatccgaaaaccaaaatgatttctctttctaaagttagagctagatatatgtacatctctgtatcacgtgtataaagatgtgatttcttctgtacatgtcacggatcatgtcttaagctttgaaaggactatgcaaatatagaagtgaaactgtaatgcacatcatcgatcgggctctcatatgtctcgtagtattgatattggagtctattgcaatattaaaaacatgtgacatgatgccaatgcaaatcgactaatcacaacacgattttgagtaaaatcgactaacacaacaacacgattttgaacacattatttattcttcattaatctcgtataaaatggtaaaaaagattatggaaactgatgataataaacccattacattactatataggctaattacatatggaccatgatgtggatctgggcttttaaaacttccatgatctcataacaaagtctcttcctcgctcacgtcgaaaacatctccccgaagtttcttattacttaccttgttcaaatcgttaattgtcctttaaaacttcgatctttgttcaacaaaaataatctcagactctcggtcaacggaatcgaagcaaaactctgcctctagttccgtagaattcaccggagactgaacaaaaatcccgtgagttttttagttttccgttacattctctgtctcaattctgaaacttttcacatgggttgtgctcaaatttcctttttaatggttgtcgagatttatctataaagtcaatgatctgggtttgatcaaagtctcaatctttctcttaaatttcgaatatttgatgatcccacgagttagtctctctaaatctgatctggctatgcttaatccgccacattgttgctctcaagctctggatttgattgtatcatgaaaagttatccaattggatcgagtaaggcatttcatgcgtactcaagaagcggtgatttcgatttagaatcaggaggaactatcagaaaatctagaaagcctaagacttcgttttcgaagatgatcaaatctcttgggaatcgtcttcaccacatgttcaaattgcacccggttctcgttttcgtcgtttgtgtctcgtttggtatcacagttctgatacttgtatcgtcgatttacgggaaccgtttaggatcaacggttagttattataagaagaatgatttggatagcgatggttatccatttgctaatctgaagaaccttgtgatggttgctggacattctgtttatacgagtagtgattgtggtaaagttgagaaggaggattcgtggttcttggagtcttatcagaagaatccaggtcaagctgcaacgttcttgagtcatatacaagaaggtgttgaagcagcagcgaaagatgatgagtctttgcttctattcagtggtggagagactcgtaaggacgcaggacctcgtagtgaagctcagagttattgggctgttgctgagtcaaaaggatggtttggtgagtcttattagtttctgctctttattgacttgatggcaaaaatgtggttttgattgtttggcttgtgttaatgaacaggtaagaatgaggtgaggtctagggccttgacggaagagcatgccagagacagctttgagaatcttctctttagcgtttgtcgattcagagagctcacaggctcttacccacagaacataacagtaaagccttttgctttcgaattttgcgctctttagtgagcgaatggttttccattcttgtgatattaatgtatccctcatgcttggatcaggtagtgagttatgattttaaggaggagagatttgcgcatttgcatcgttcagcaatgggatttccggaatcaagatttttctacttaggaacaccagcttctctatcatccaaagaaggcgctctaaaaggcgaggctttggttagatcacaatttcaagaagatccatacggatgtgttggttcgctttggcgtaagaagctgaatcgtgaccctttccataggactataccttaccctattggttgccctgaaattggaggattgttcaggtactgtggttcagctccttttcctggctctctcccatggggctaatctgtataagatctatacttaaagaggaatcaatacttgatcaaagagcttgttggtagagaaactctttttctttttgttactgtccaacatatttagattatacagaaaacttcagaatctttgtattctgctttcatgtgttgtcgaaaaaccgagaattttacttgtatcaaatgcaatttacgtaaaataaaattttgacatttctatccaataacagatctctattcactattttttttatttggtaaaaaaatccatgttcagtcaaaggaaacaagtacacaagtgaaagaaaaaagaatagtaaaagagtagttgtttactgaagtaacaactgccagctctgtctcaaaacggtttgttgttctgattgttgggtttggaggaagaagatgatgatgtcctggtttttgcaaaatccatcaggtctttaaaaaggatatcctctggtttatcatctttctttggtggagtaacaggagcagcagaggctgttggattaagagagagattccgggattgtcccaaaagatcatcgtatgaagattcagaggcactgcttgagtgttgtggaacattatgctggaagtattctggcctcttgttggttctagcagacattgagggtggatacttccggggctcctgagtctcccatggagcaggaggcaattgttcagtttggtcatagactggtttggtgaataaagcatgctcaggggatttgctctgaggaactggttcatcgaaaataggagcagaatagtcatggtttgatgattgggatgtactcggaggctttacattctcgaaggtttcttgaggtttgtagacatcaccactgaggaagtccatagcaccagaatcaacatgtactggcctcattgaagatggtggaggaggaagaatagggttgaaattcccttgtccagtccctcgtgcactttctcttttcgacctgcagatatgagttcaatgagttctagcaatcaaagccttgggattcaattgaaacgagtaagggatgatggacattacctatgagctagctgtaaaaaatcatcatctgactcatcatcatcgtcatcatgattgatgctaacaagcggtattggagtgggagctgttgcaggaacagagtttccctttgccttatcatcatggtgctgaagaacgcgctgcagattgtcattcagtgccaacccttgacacataagttcctcatctctggaaaaaggaaggagcatctctctcagtattaacaaaatctataaaatggaggagacaacaggtggatgagggagaaaacaaacaaatccttacgaagtagtattcacaagagccattacacgtctttgataagtacgacattgctcgaccaagtcaactataagttcttccttcaaaccctgtcacagcatttagaacagagagtattaaaaatcagatcaaacaacaaagccattaaacctaatcatgttactattctacctctggatgacttggatcaagagccccaagcatgtctgtcaaaacatcaactgatccctgagcgctttgaatctcttccatgctgaaaatgtgaagatactaaagtctataacacggaatacaaaataattgaacagaaagagaacttggaacaggaaatctacaagaagagtatacctgagtgcagaagcatcatcactttgcagagaggcctgaatagcagcatcttcatctgatgcagttgcctgagcaacaataggctgagtctgaggtggagtaaagaacggtacactgctctcggttcgaggtgggaattcaattccagcagactaaagtgttttcaaggcaaaaggataatcaaaactcggagtcataatattaatatatacataaaaggctcgagtactataccctgagttcattataggcattgtagtactgagggaatcttccgccgcttccaccaaaagcttcttgccatgtatctaataaactaagtatcttctccctcacagtcaggtctggctgtataaatttgataaatttccaggttaagcagattggataacagaattgaaatataacaagcaggtaagagaatggtaaacaaaaaccttcttcttcactattttgaccatatcaggtaaaatatctcggtcaacaatgagctggtacacactctcgccacaattcttactcaaagtttccaaagcctgaaccaatcccccaaagaagatcaatacaataaagagaatccaaccaaagcattgtatgagtaaaaaggtaaacactcacataaagagcaagaatctggactttagaatttttacttcctaaccgtttcttgagcaccttcactgcttcttttgcttgactagagaaacaaaacaaggtcaaaactttaagcatcctaggctcctagcctagactcaatcaaatatcagtagatctctatagtcattaaaacgacttaccttggttccatgttgataatgtcacacagttcaatgttgatagcccaatctggaccgatcagcatatcgtttgtagccctctcagcacaagcagccgcattattcgccatcgcaagattgctttttcaatcaaatcctaaagttccaagtttcctaatgaacacaggttcaaaaaccattaacataatctcttaattccagatataacatgcaagttaaagatcaaacactttatcaatatcactgtgatcagactctgaaaacaaacaaaggctatcacaattcacaaaccagcttgtaaattagaccagatcacgaagccagaagcattcaattatacaacagactcttaaaagaaggcaattcaatagatacacaggacagattaagccatcaaataaccaaatccaaattcaaggacaaaacataaataagaaagtatgaatcaaagtattggcaagagtttcaaattaaacccataatgtgtctacatctggaaaacaaggaagaagagaacacaacataaacagaaatcataattgaactaaaacaaaggcaaagacctttacctgactatagactctaaacttgagaacagatgatgaaagacgaagcgaaaatttatgcgtgtgaagatccaaaagttgaaacaattataagggttctcagaaaaatctaaacttgtaatcgaacacgatcggagttttgtgtcaggtcatcatcagccttagccgtccataaaatcaactgcgacttctttgttctattatttttgcaagacaatgcaaaagttttgtgctttggcttttgtctctctatatgataaagtaacagtcggtgacgcaaattaaaataagaatcttaattattcttttcgttaacattagtggaatataataagtttaggtcgtaagtaatgatcattagccaatagcaactgtataccaagaaatttcccaaatcgctttcattgttgacttttcttatcgcaaaccacggtaaacgcgtttcccaaacgcaggaaatgaagacgcgcgtttggatggaacaacaactccaaaacaaatattctgtctcataagtccacaatgggaccactctcgtaccaattctttcacagcagctttctctttgaacaaaaacatgacactccttttaaggcaaagattgttattattggttttaggcttttgataactaaaggtaaaaaaaaaatcaagtagattctaaacactaaacaccactgtacattagaattcaaaatccaagagttgtgagagactaatcagtgcacaactgcacattaatctctatttacataacttaaaaccatatccaaaaggatacttaggcttttgcagaagcaaaaatttatcggaaaagtgatcatctttgtgtccgttctctgagctgttcctcctgaagattagactgcaaacactgactcgagtgtatgcgtttatcaagctctgcttcttaagccaataaatctttgtttcagatactgaggaattagtttcttgaatgtaagaaaagagaagcagctacttttttcatccctgcaaaatacagcagacagtttcaaacatcaaacctcgagagtttcaataaatggcaacaagatttgcataatgagactaggaatcattcagatagatattcttgaatcaaaacttcactaaaattgtagtctagacagtttcatttctaacggggaagataaagagcttcactcacaccattcacactctttcaaaaggtcatcaactagacaacaacattttcatacaaccaacaagatagtaaaagactcacgtgatgaaaaaacacaatgaaaaagtggaaacaatcaaaagtcagctttttcttttcttggcaaacaaaaactttcatcaaatcttattagcaaagcaaatccaagtagtattgcgtaagtaagatatgaaagatgaaaactttgattcttcagtttgaaaacataccttaagctgcttcggctcctaatactgttgttgctactgctactaccactcctctttgtgctcgattcagacattctattccaccattctttatcctctactttcacagtctcctcagagatcgaaggtctcggtgaaaccttacaagcctcatcctttttcttcttcttcttcttcttagtcgtatccttcatagctcctaaactaaccagaaacataattttgagaagaaacccactattatttcctcctccactcctattcggatcaacccgtttatcactcttcgtcttcctcacaactttactctgcctatttgctctcttaggcaattcatcgaacaccttccgttcattctcttgattcaccttaacttcaacaagatccttcaatgaaagctcgtaacacgactcaggcatcttactaaccatttccataagctcccgttgaccacgagcaatagcctgtgctttagaatccggcgaaagactccagtaatcttccggccggtgaaaaggaggaggactcttcgggggactggttctccacaaagtaggcgaacagacaccggaatctgagtgatcatcattgggaatactcggaaaacacaaatgggtattgaaggatttagcagaagaaggatctaacatcgtcgatgaatttgcaagactggatttttaaaaactcaagttttattgagaaacaagtttataacgattaacaagggaaacaaacaaaaaagatatcttgcttgacccgttctataaggattattgtattactaagagaaataaagtttcttttttctatctttgctattggggctttaatttaaaacgtcacgttgttctcagagtggttaaatagtccctatttaatatgaggacgttgttgttgttgctgtccaattttggggtttaatttaatttgcagatcgtattcgtaccggatttgaggaagtgtttacttaatggattagagttgttaaaagtcaagtgcttctagatcatcttcccataaaaagtcatcaactcttctagagtaattgattagtgtactcgtcaattgtcattaattgatgttcgagcatgctcacacttaaacaggttagaagagtatattttgtttcacgattatggtaaattcttagtattacaattggattgacaataaatagttgtacaattggtaaactttcaggagcgttgttggcctttgtaatgttttgagtcttttaatgtttgtgaaaagcataatcgacgattaagcgtgttttagacttttagtactagaagatgcgtgtttcattactttattccgttgcagatttcaagggaatctgatatactaatcattcaacgtgctcctcgtttatggccgtctatagttgtgaaagaaatagagaattgactttgggatgttgttccaaaataatgttatgaaatttagtagcgagaggcccaataaaatcttagaaaggcccaaaaaaaaatgggttagatccactcgaaagtggagagccttaaggtcaggacccgaaggtcaaccccgtctctgtcagaggagatgccaaccatctctcctttctatgaacacaatcgaatccactagtctttctatatatatacacaaaccaaaaactaccaaagttccgatgcggtattatttatatgagtttgcaagaaaaattccactactcatgccacttttaagatttcttttctgtgtcgttaattttggacacgtgaatatattatagtaggaaaaaatcatatcatataaatgaaaatataatagataatctagcattaaagttttttagatattgatgaattttttataattagtataccaccacttttaatatatttgtctaaatatcaatcatttagttagtttaaatatgaaaaaaactttcacaaattaaaatatggccaagaaatgatagagttccacgcgtcaactcttttctatttttacattatgcttttaaatggatgagcagtataaataatacatgtacatcttaaatcttaatcaatcaataatacaacctatagtatttacttttaaaaaataaaaaatacaagaagtagagaaaacaaaatgaggatgaagaagatcatgagtgtggtgtggatcacgatgctactaatggcgttatttacgatgggaggcgaagcaaagtcggacaaagagtgccaagtgttgtgccataagcactgtctacccacttcctttgttgcagagtgtctcaaatgtcttggaatatgcgggaggactccaccggttgcagttggaaccatgaattctggtgaacacaaataacaaaaatatgatttttatcttataatatagggcgagacatgtctaggcttccttatattgttatctttatcctaaaattcttataattcaatattcccatttaaccatttcaataagatatcgactcctaaatttcaaacattcgtgcgtacttaaatcggtgataaaacatttttagattatataacttgaacactttggaacataattattttagttagctatgatgtcattgatttcgactcagatatgaagtgttgaacattaagttagactgaaaaagtgtttaatacaatggtacaattagatgtaatggcatggaactggatggtaaaatagttttgctacaaatgagcaagaatttgaggtaattggtttgttcaacaaattgaacaattgtgtggtatactagtatgtcattaaataatgtggaatttgctcaaaggagagcatatcacacacactagttgattaagagatgcttccacagaatcaacgacaatctgaagtcagtaactctgttcccacatttttagatacgaaacacacaatctttaacaaaccccctactagtgatgatgttagtccaagccatacatgatacataccagtttaggtccaagaaagctttactgttaggttagatgttacataccaatgaatctttaaataccaattccaccatcatcaaatcgtttatggtgattgttgtgtaactttcaactacactataaatggaaaaatgttttctcgtggtatcaataaaaaagcttttttttttctttgtttttcacggacgtcatggaaaattcaaagaaagatataaatgacacgcaagtaggtgactttacaattttgctatcgttggataaagatcaaaattcaataaaaagcacaagtacagtttggtttggttgttgaaaaaatctttaaatgatttgctaatgtaggtgttacaacttctgtcaatatttcattttgatttttttaatttttcaatagtatttgtccactataattagtgtaaaaactaaaaatcccaaaaagagaggaagataaataatcattttaagaaaagaaaaagaagttggagatggatacggatgacatgtcaagtccgacaaggaaatacatgcacttgtcgtccttctaatcctttgcccttaaacatcgttaaaaacgacaacttctctcttcttcttctctactcttctccattttcttctcttcttctcttctttgtccattttttgacagatatggcgatctggtttgctagatccaaaacccttgtttctagcttgagacataatctaaatttgtcgacaattctcataaaacgtgattactctcatcgtcccatcttctatacaacttctcagttatcttcaacggcgtatttgagtcccttcggtagcctccgtcatgagtctacggccgtggagacacaggctgatcatttggttcagcagattgatgaagtcgatgcccaggtatatttattagccttttattttttttaataatcctactttaccacgtgattatagttgttattttaaattgggattagttcataaagataagctgtgaatcacgcacgagtcttttaattgtgtaaagaaagaaataattagttcttctgaaagcagatgcttcggtttaaaggcgtttcaatccggttaatcattcccaattttggatttcttggtttataagctaaatttaaaccaaatttaggtgaaactggttgcctaggatcaaaaattcttgcaatgagtctcaaaaactcgaacgtagaaaagatattaaagattgaagattattcagtcttagaaagttagaattattcaaatttacttggtgtgttggttttgatccggtatgggatgatcgcatagtacaacaacaacaacagttcacatccgcacaagtcatggtaaaggtagggaccacgtcgcatgagaagtaaaagtggggacctcaagttacacgtatgaataatactaaatcaagtgctatatgggtcccacttgtgtagttgatttgagtacgtgtacgtctcattcattagtcaatagtcactgcagtctgaatcttccaaaaaacagacactaaatttcactatgatccctgtaattattaaactttcatatatgctcccaatatgattagttcttaacacattaaacctaattgaaaattttccaggaactggatttcccaggaggcaaagtcggttacacatcggagatgaaattcataccggaatcatcttcaaggaggattccatgttaccgggttcttgacgaagacggacgaatcatccccgatagcgattttattccggtacagaaatttcgagaatgtatatcaaaattgatatgagtttggtttagttctaaccgataataatttatgactgggaaggtgagtgagaaactcgctgttagaatgtacgaacaaatggcgacgctacaagtaatggatcacatcttctacgaagctcaacgtcaaggaagaatatctttttatcttacttccgtcggagaagaagccattaacatcgcttcagcagctgctctcagtcctgacgacgtcgttttacctcaggtaaaccgttgcgttcacctccactaatctcatttgcttctgtttgattgaaccgggaagttcaatgtttggtacagtaccgagaacctggagttcttttgtggcgtggcttcacgttggaggagtttgctaatcagtgttttgggaacaaagctgattatggcaaaggcagacaaatgccaattcattacggttccaatcgtcttaattacttcactatctcctctccaattgcgtaagaatctctgaacattaaccattttgattgttcttttgtttacatgtttttgctgaatctgttttctgatgttgattcttcagcacgcaacttcctcaagctgctggagttggttattctttgaaaatggacaagaagaatgcttgtactgttacattcatcggagatggtggcacaagcgaggtttataatctttattaattctcatttctttccataagaatcaacatttcaagaattgaaatttatttagtcttttggggtttggttgtttgggactagggagattttcacgccggattgaattttgcggccgtaatggaagctccggttgtgtttatatgtcggaacaacggttgggcgattagtactcatatctcagaacagtttagaagtatgaaactaacttaacttcctctgtttttcattacaaattagaccaaaacaaatcctctgttttaatgtgagcttatgtggtttgattacaggtgatggaatagttgtgaaaggtcaagcttacggtatccgaagcatccgtgtggacggtaacgatgcacttgcggtttatagtgctgtacgctcagctcgagaaatggctgtaacagaacaaagacctgttctcattgaggtaaaaaaatcacactagagatttatctcaaagtttacaactcttgaatttggtgaaataagattgttgttgcttttgttttgcggcagatgatgacatatagagtaggacatcattctacatcagatgattcaactaagtacagggcggcggatgaaatccagtactggaaaatgtcgagaaaccctgtgaatagatttcggaaatgggtcgaagataacggatggtggagtgaggaagatgaatccaagctaagatctaacgcaagaaaacaggtagagattctgaaaaccgctacgttatattgatgttgagattgaaattattttaaccgttttaatcggttgtgtgtgttttgtagcttctgcaagcgattcaggctgcggagaagtgggagaaacaaccattgacagagttgtttaacgatgtatatgatgttaaaccgaagaacctagaagagcaagaacttggtttgaaggaattagtaaagaaacaacctcaagattatcctcctggctttcatgtttgaatctagaggaactgtgtggttaaaatacctcatatagtatcatgtccatatcgacttctcattgcagactatttatattgtccacgtatcgaatagtaatcaagtatcaatgtagagaccagcatttggagcatcatgaaatggccttgagaatgttattttcatggtccggctgacccttaaccggttcaaactggagtaaatgagtgaatgttaatgctcgagaatgggtgaggctccgttaatcgttaagaaaaaaacgtgcctacctagccaaatgacatcttcctcttttgtgtttagcacaagtgaatgatccaaatatcatctacctaatatgacccataaaatagtatgtgattgtctttggatgttatcccataacataacttaaatttgggatgcatgcatatattatatacttcatataaaatgagtggacctcataagttgcggtttcgatttttatcaaaaacaacagttgtccactttttgattttgacacacccacattcaagcatctcctttcttctatattattactcaaagaataacaccccctaaggataacaccattacacaaatcaattctcagttaatcatttgtttcaatatatgttagtacttaagaaatattcgaatagttttacgtattcaaattttataaattcaatgaatgtttaattaccaagtcattttggcttggaatctattcaattattcaaaaaaataaataaaaaatactgcattttaacgtatcagccagtcaatatattacacgtgtcataaagcattacccacacgtttctcctgcctctttccctttcatttttttttttcattttttttgtttcttctcttgttgttgttatcttcttctagctagctctgtgaaacacttcaaatgaacaaatatatcaaataataatagtgtaattaagtcggaggaaaacaacaagaacccagaaagaggaacgaagaaactaattcaaaggtatgatcttttattctttgagagaattatgttttctttgtagcaaatcctctggtcttacgtttagtcactgaatttgttccacttctggaaaaatctagacaccagagcaatctatgaactttaatttccaatcactaccgtcttttgaggttgtaaaatcggtaaatggcagatttttcactctcattcctttgtggtgataggatcaagttcaccgcttcattttagtcattaaacaaagatggtgatgggaggagaagcatccatggaactggaccagtgttttcagaagatgaagatggaaggaatctcgatcaaagagtggaaagatatccctgtggagcttctgatgaggatcctttcccttgttgatgatcgtaatgtcattgttgcttctggtgtttgcactggctggagagatgctatctcttttggcctcactcgtctccgtctatcttggtaagaatttctatctaacttataaaccctttttgtatttaggactcttctctgtgttggtgttttggatttgaagtaggagttgagtttctagagtctttattgtatcttgtgcttagggtcatgttgatttattgtctatttgtgtaagatcagatctttttttgttgcttttgttttgaggaacattttagcagtctatatatgattgatttggctagattgaagaaagtgaaaaagctgtttaaatttttgatggaactcttttaagatgatagatcagttttcaataggaggtgaaaccaagttctttaatccagaagagtggtctgaagatgactcttaaatctttgaaccactagaagcttgttcttgtcacttccagtgtattcagattgatctctgtctactacactctttgatgttgtttcttatttttatactaggtgcaacaacaacatgaacagcttgttcttgtcacttccagtgtattcagattgatctctgtctactacactctttgatgttgtttcttatttttatactaggtgcaacaacaacatgaacagcttggttctttctcttgttcccaagtttgtaaagctgcagactttaaatctaaggcaggacaaaccgcaactagaggacaatgcagtggaggccatagcaaatcactgccatgagttacaagaacttgatctcagcaaaagcttgaaaattacagaccgttcactttatgcacttgctcatggttgcccagacctcacaaaactcaaccttagtggctgcacttcattcagcgacactgctattgcgtatttgaccagattctgcagaaagcttaaagttttgaatctttgcggatgtgtcaaagctgtaactgacaatgccttggaggtgaatctttgtttttctttaatgttctctcccaaacttggttttactcctttggtcataagtgtggcagagttgatagaatttgttcatgttgttgtgtgcaggctattgggaataactgcaatcagatgcagtcactaaacttgggatggtgtgagaatatcagtgatgatggggtaatgagtttagcttatggctgtccagatctcaggacccttgacctctgcggctgtgttcttattacaggtacttcacatagttaagcttactcgaagctaagatcattagttttccctctgcagagaactatcattggataaactgcattgaaataaacaaaactagtaggttgttatagatggactccgaaagccattgatcttgagactcaattcggtttgtcttgtactatttcgcagatgagagtgtggtagctctagcagactggtgtgtccacttgaggtcactggggctatactattgcagaaacataacagacagagcaatgtactcgctagctcaaagcggggtaaagaacaaaccgggatcgtggaaatcggttaagaaaggtaaatacgatgaagaaggactgagaagtctcaacattagccaatgcactgcccttacaccttcagcggttcaagctgtttgcgattcatttcccgcacttcacacatgctcaggaaggcattcgcttgtcatgagcggctgtctgaacttaacaactgtgcactgtgcttgtatccttcaggctcatcgtgcacacaatgcggttcctcatcctgctcattaagacagaggaatagttatgttgtatatataaacatcatgttgatggagattagtattataaacgaagtagcttttttaaggtttatgtgaaaccttagaagcttttgagttgttctttctttgtcttgaaagatcttttgtatattttggtgctatgttcataacttctttagtaagacctctcgttgttaccactttactattgaaagtagaattcctcttaccaaaaaagtcgtagctaagattgttaaaatatccacaggttatataatctttggcttcgaatggagatgtttgatgaggattgtacaaaaatgggccttttcaagtataaaaattaaaaagaaaggtcctaccgggagtcgaacccaggtcgctggattcaaagtccagagtgctaaccactacaccatagaacctttttgttcaagatttaatattcaggctatatgtaccaatattataacatagttttttcaccctcaaaggcaagatccgtcttccatttttagtcaaacttcagagtcagagaacaaactttaaatcaaaacagatcttttttttaggttagttgtcaaaaaatttattgataagaagaggattttattttatttttaagacgattatttttactttaatagaccttcaaaatagcatgatatttatttttaagacggttatttttttttttttgggacaagaagctgatgtcttattgaaattgatgctatctgagattctgagcaataactgtaattcataaatggggtttatattatgggcctacattttgtcttgccctcaaaattaaagtgtagtgtgatgagaagtgacgttatgctgaaaacatcataaacggtatttacgcggctccaatttgaagttttaggtcgaaatgaaggaatagttgttgagatgattcacctaatatagtttcttaacacttcacagcttcgtttgtcagtctcagatttctaatttcggacacaaacacaaaacgacattgaagcaatattatgccttgtattaatcatatccctacgaccctaccatatctatgtgactatgtcgtgcttcattttttcttccgtactcgtatatactcgtacgtaagtacggaaagtgttatttcggaaattaaatattatggaaaagttaattaagaagttttgaattagagtacttaaggaaatcttataatgacaaccgtgtgttgactcaatctaaagactactttcacacatagcagatcacttgccaaaatagcaaaattgattacaaatcttccaacatatcctatgattcactacttagagtaatcaacttaaaattaaacaatttaattacctaagatttttagtcatatatatatgtgttgacacttgacagagtaagtacagctctgcaattgagttaataaattacacactacaacactgacaacagcaacaacaacaagatggagaaagaaatcaagattctggttttgattatcggtgcaggaccagccggtttagcaacatcagcttgtcttaaccggttgaacataccaaacatagtagtggaaagagatgtttgcagtgcctctctgtggaaaagaaggtcttacgatcgtctcaagctccacctcgcaaagcaattctgtcaactccctcacatgccattcccctcaaacactcctaccttcgtctccaagctaggtttcatcaattaccttgacgaatacgccacacgtttcaacgtaaaccctaggtacaaccggaacgtcaaatccgcgtacttcaaagatggtcaatggatcgtgaaggtggtgaacaaaaccacggcgttgatagaagtttactcggcgaagtttatggttgctgcgacgggagagaatggcgaaggtgtgattccagagattccggggcttgtagagagctttcaaggaaagtatttgcactcaagtgagtacaagaacggagagaagttcgctggaaaagatgttttggtcgtcggatgtggaaattctggcatggagattgcttatgatctatctaagtgcaacgctaatgtctccatcgttgttcgtagccaggtgagtctacattacaaatgaacttggttatgagttgtaacaattaatccgaataacaaacatttttatcgtgtgtttaaatataggtgcacgtgttaacgagatgtatcgtacggataggaatgtcgttgctcaggtttttcccggtaaaattagttgaccgtttgtgtctattactagcggagctgaggtttcggaatacttcgagatatgggcttgtaagacccaataatggcccatttctgaacaagctaatcaccggccggtcagctaccattgacgtcggctgcgtcggagagataaagtccggcaagattcaggttgtgacgtcgattaagcgtatagaagggaagacagtagaattcatcgatggaaacaccaaaaatgtggactccattgtcttcgcaactggttacaaaagcagcgtttcaaaatggcttgaggtatttttgcaacttcagacacaaaaacagagaaaagaaactctgttcttggtttttaatggctctgatgtgatacacaggtcgatgatggagatctgttcaacgagaatgggatgccgaaacgcgagttcccggatcactggaaggggaagaatggtttgtatagtgctggctttgggaaacaaggcttggctggtatttcaagagatgctcggaacattgctagagacattgattctctggtttgtgggagaagcagcaagaacaagctttccaaataaattagaactttttttgagtttttacatgtcaaaacacacaattattgaatattgatacaaacaagtgaaaaaagaagataacattattgatgatacattgcaagagcttcgattgtggacagagtaatcagaatctcattattttgtttcccctagagcgtttctgaggttagagtacttggtttcgagctcataccatgaatccaagttcaccaaacggttaaactcttcgaaagttatcatcttttctaagtggtctttggtggttcctttctccttgagaatcttaagaacatcgacaagagctcgagtcgacgcatagagcgaggtaagtgggtgtgcgatcaagtgaaaacccatttctttaagctcatcaggcgtatgcaatggcgtgcgtccaccttcaagcatgttacacagtctgtaaccttttgtgcgccttccgatttccttaagctcgtcatcgtccctcggtgcctcaacaaaggaagcatcagctcctgcctgcacatttttccaatctgtctctattacccaccattatgtcttctcaaaagttaaagctttaataacacaacatgatttagtagtaacctccatataaagattagcacggtcaatggcgtctgaaagtcctgtttttgcggaaagtgcacgagcatcagtcctagcgattagaaaaaagtcagcatctccaatagcgtctcttgctgatgctattttagcagcgtgttcctccgcaggtatgacctgtttccaaattagaaaaataataatcatctgcactcatggactataaagtaataagtttcaatgtatagattttggtagcaaacgatgagggaatggtaccaatacctctttgccacgcatatgtcctacacaaatgacaaattgagagagcaaacgagttaaaaccattattggacattttgacaatagcttataggtttgcagaggatgaaacagaaaaataacgtctcttaccacacctctttggccatgcctggtcctgcaagaaacccgaaattagatgagtacaagtcaggatgaagaaactgtttttgtagttactctaatgaacacaacaagtcaacaactaagatagcacaagaaagaaagattaacacaacactatgagtgattaaatctaacacacatgaaaatacattaaaaaaagtagagactagtagtttacctcaaggaagcaaccagcagcacctgctgcgattaagtccttgacggttctttgaacattgagagcatttcctccaccagtatctgaacattaatgtcaaagaatatatcttttgaacagaacagaacagaacaaacttctgatattttccaaatcacttcaagatattgaaaaatgaaaattgcaattatctctacgcaaatagagatcaaagtaatcaactatggttaaagtcatttagagcagcaagagaagagtgtttgagattgtgttcttgcctgcatctgcaatgattggaatctttggagccgcagcacacactgatctcgccgttgctgccatctccggaggtctaaaacgacaaagcaaaacgaataaaacgacagaagataaagtttctactaaagaagaccaaaaaaaaaaaaggcgcacgttatcaaaccgaaatctggttttcccaaagttacggcggagagggcgtaaccggagattaatgcggcggagaatccggtctgctgcacaatagccgcagataatgcgtcgtagactccgggaataagcacagcaccttgctcttcaatcagacggtgaacacgtgactgcattctcaccgtcggataaaccgatctgacgccgcgagggttttgccctattttagctgaaattgtagggtttgagctaaagagtgaagtggatttggccgccattaacatcgacattctcgaagctctgaagatagtacagaaccgttggagagtgaagaagacaagagatcagtatatatcaatcgtaataaataagaagaagagaaagtttactttaattcaacgatatccacgtgtcatatgattattagctattaattgtactgaggctcttaatccataatttaaacgaatcgtgttgatatgaaagttataaagaaaaaccattgttgcaaggagagactatggttaggtacgcacgtttattggggttagttatggtcgtggagttatgcgttcatcaattctacttccctaacttcgtttgtgattcaattcaacctcattatactttaaagaagagtttggtaagtatgttcctaaactgatcaagggatttagaccgagatcccttgtgtggagttgatgtaggacagacttgttcgtgaaactgatatcctctcttactcccttttattaggtgtgtgtattagccatgttaagcttaccttgacgtatataattccttttgtataggaaaaaagattataaacaaaattatggtcaatttcaatatacttatacaatgcatatcaaccaaaaatatcattatattcagaaatttcgcatttactttcgtctttatcaactttaatttgtattttcagttttgtattataacccatatattattttcttatagaaacctactatattttaaatctatcgtttctctacaaacttgggttaaaagtgatgaatcatgattatttttaccaaacttgggttaaaactcatgaatcatgattattaattatatatttactttcagttaaaagtgaagtagataaccatttagacaattaattttggttgataaaaaaaatatatgcaatataaatcacatatatactcaaagagttttctctacatttaaggtgtctagccatgaaagttttttttacatcaaaagatattaaaaatatttatttaatctaaatctattatatttattgttacttataataaatgtaaataaattaaaggtttatattgcatattatttttgactttatagtagccctgaaagttcggtcagaaccgattaaacagaaccgattaaaccgaaccgatcaaatcttatcaagtggtacataaagtattttagatcgtctacttgtcacataatcattcttggtctttgaggaagcaagacaaccatgaagaggaatggtcttgataccaaaaaaaaagaataagataatgaacggtttaaggtaaatatgatagtccacataaacaattgcattaatcaaatagtataatcaaatgataatctgatgaaatttttcaaagaattgatgattaatgctagtattacttgtgaacataaattgctcaaacaattcaatgacttgcaagactaaacacaataatattcacatgtttttttttttttacatctcatgattgatagatttattaatttgtttttattttaatatattgttaaatatgttatttaaatgtttgccatgcaatttctttatcaaaatattactttttaaatctatgttgatttttttgttgatctgctagcttatgtaatgtatcttgtttttaagttgattattgttagtgaattcatgataatgtaaaatcttaaatacagtttatcttccataatttaaaagagagtctatgtacttatgtggaaatcccataattttcctcaactattttactttttcttttttaattctagtatctctatcaccaaacacttttgtttctaaatatttatctttatttttttaaaatcaattgtcaaacacacataaaaggttttcaatatataaagttacgaattttaaatatccgaatttttcttaccaaatttgtatattttcgaatttcttttttagacaaatttttccttcaattaaaaactacaaaccggccggtacaattgttctaagagcaaactttgcaatctcatcagcctcacgattgtggcttcgagaaatgaaagaaaagctagagaattgaaatttagaagatagaatcaggatatttcgaatttctattatactaaaatgcattgttttgttataattgaaaataaaaataaaaatagtaaatcactaaataatatgaataaaaatcgttccactatttttcttgccattgccatttacataaattgatagaaaaatgataaacaaatatctaaaatgataaaaatcgttccactaatcaaggattttccatcaaagttttactttaaaccttgcttctttatatatttgcttctttatttaaagtttgtatatttgcatctacaaaccagctcaacccaatttcaattatgggcttgatttttacacacaggttacgacatcttgtcttcaatttctctgtctcggcttcgtcgggcccaaaagctctttgatttgtagaaacgtggagttgtttgtttttctctatagagtatagactacgactttaatatcctgattaatactctacttgtattctttttgttggtaacttttctttacaaattccactgatcatcattcaaggatttccttcttcttttagttactttcaactctaataacttttacttcttctttttttattccctgtcctaagatatattcccatccgtgataccttgagagttaagacgaaacaatactagtagaataaattagatcatagaagaaatctatgtagacaacacggggatttcaatcttttgtttttaaattaagttatctagtgcaatattagtgaaatatagattttgtccttaagacattttatccttatatgaatattaatatttgatactaataagtaatgactaaattattagagcttttgaaatcatgggacatgctgtcggagactaataaatatgaatccaaaacaaaattccatggcgcagccggattttgcatgcgtttagaaccaaacatcccacttcctagtgaaaatcttttcttaattcataaatcatggagaagtaactgtaatttacatatgtacccgtaagcatatatatatgatcagcaatttgactcgtataaattttcagagttcatatttatgaggttagagaattgcatttgtaccaaaacaaaaacgaaaatgtaatctcagaaaaacgtaattgcatttttaacaagctttcatttcaaataatcttgaattccaaagaaggctgttgttctgcagaacattattctattcacactttaataattcgtcaaaagaacaaaagaaacaacaaccaactagctagtaacatcatttgtttaaagaaacttccatttgaattccaatatggtaacattatagcatacgaaagcaccttagtcaatgagatttgcacttttcctttggaaaattaagttctgtataatggttgaatatataatattgtgcgtgggataatccatatgtgtactacaaataaaatgaaaattgtattgtaacaaataaaatcagaagttacgtagtggataagattgagaaagagaagaagtcctatgtgggtattgcgaggataaggttgataaagactctgcgtcaaatgtttagtatcctcattcttcatcatattttaaataaaatacaaaaaaattcttaaataaaataaacaaattgagattagattctttacatattgcttaatgatcattacttatgcggtaaacaatcattttatttggagactttatatgtcccactaaacttcggaaacttgtaattataaattatcgcccaatagtgtgtaactcactaacttaagctattgctaaataacatattttaaagatattcaagttaggatcagtgtttaacgtagaattgctgttgtggattcacagttgaataagaattgtaatcaatctaattaaaccggacctaataaacaaatgatgttaagaaataaaaaaaaattgtcgatttttatgaatcataatttgtcaaaaaaaaaatatccttgaagttttgttttggattagtataataaaaaaacaaaaacagtaaagaagataagtaagataacgataatacaacagaaaatttctggtaaaacataaagtactttctcaagttttttttttttttttgttgataaattatactttctcaagttgacaaagtagctttgaatatttcataagaatcaacacgttaagctgcactaacagcatgaaatcgtgaatatttatttagaccaaatgtcaattagtgcgtactgtcgtaggcaccttcgtcaccccacgatcgcttccgtcatataattttcaggaatatccaacggtttgtgtttttcctcttattaacggtttgtgtttttcctcttattactccaaaataaatatcataagacaaatattactttgcactaacaaaacaaaaaaaaaaaaaacaataaatcaatactaccaaaaaaaaaccgagtaacaatttaattggtcaacagaaattgatcaaaaccaaatcggacacggaactgctaattatatacagtagtattcttttccaagtgagatataaatcactaatttcagttaccttctggaacagtagagctagagaaaaattcaaagacttttacaaagtcttgtaagcaatttaccctaaacaataagatattggtattcttcagaaaacaatcaaaattctcttcatatcatttttttttgttcgttcttcttcagaaaacaatcttcattttttttgtttttgaattttttttggttcaagtaaaacctaacaccacacgagtctttaaaagtatgaatctttaaagagtaaacacatctttaaacaaagaccacaagacacagaataaaaccagaaaaatcagaacccaaagccaaagcgtttttatcatttctgtcttcttctgtgtaaacagtaagaccccaaaggtcaaacctttaggctttgtttcttcctttaaggcttttttccgacgtttatatcagatttcttcttgtcaatttcttcatttggacaacctccataatccaagaccgacccttttcctctaatctctcctggtaattgacttcatcaaccaatttttgtttcctggtcctttagtcttttctctaagctttagatacttgtttgattatgttgttttgctttactctggactttaatccttatgtaagctgtttaaaccagtcaatttgctattaagaaatagatcttagtgctctgattgttctgaattgggactatggaagagatttattggttaactggttatggtattgagaattgcatagatttggtaggtatcagaggaagagtttttttcaattgatttggtgagagttacataattttttttttcaattctcaatggatttttgatgatagtctttgctttggagaatcagctctgagatttggatcataaagtttcaaacttgctttatctatgatgaattagtaacaaaaggcttaaactttaggaatgatctcttgaagctttgcatgatttaataagcttttgttagaatcacagtgcttgaggtttttctgtgtgtgacattgataagattttgacatttgggaacgttgtagttgcagctgaatggtggaacaaactgtggttagagaacatatcaaagcgagagtcatgtcattagtgaggtctgcagagccatcctcatataggaacccgaagctttacacgttgaatgagaatggtaataacaatggtgtcagttctgctcaaatctttgatccagataggtcaaagaatccttgtctgactgatgattcttacccaagccaaagttatgagaagtactttcttgattcgccaactgatgagtttgttcaacatcctattggctctggtgcctcggttagctcatttggctctttagactcatttccttatcagtcaagaccagttcttggatgttccatggaatttcagttaccgttggattcaacctctacttcatctacaaggcttttgggagattaccaagcggtttcttacagtccgagcatggatgtagtggaggagtttgatgatgagcaaatgagatcaaagattcaagagcttgaaagagcgcttctcggcgatgaagatgataaaatggttggaatagataacctcatggagattgacagcgaatggtcgtaccaaaacgaaagcgaacagcatcaagactcgcccaaagaatcatcgtctgcagattccaactctcatgtaagtagcaaagaagtggtgtctcaagccactccaaagcaaatcttgatatcttgtgctcgtgcgctatctgaaggaaaattagaagaagctttgtcaatggtaaatgagctgaggcagatagtttctatccaaggagacccttctcagagaatcgcagcttacatggtggaaggtctagctgcaagaatggccgcttcaggaaaattcatctacagagcattgaaatgcaaagagcctccttcggatgagaggcttgcagctatgcaagtcctgtttgaagtctgcccttgtttcaagttcgggtttttagcagctaatggtgcgatacttgaagcaatcaaaggtgaagaagaagttcacataatcgatttcgatataaaccaagggaaccaatacatgacactgatacgaagcattgctgagttgcctggtaaacgacctcgcctgaggttaacaggaattgatgaccctgaatcagtccaacgctccattggagggctaagaatcatcggtctaagactcgagcaactcgcagaggataatggagtatccttcaaattcaaagcaatgccttcaaagacttcgattgtctctccatcaacactcggttgcaaaccaggagaaaccttaatagtgaactttgcattccaacttcaccacatgcctgacgagagtgtcacaacagtaaaccagcgggacgagctacttcacatggtcaaaagcttaaacccaaagcttgtcacggtcgttgaacaagacgtgaacacaaacacttcaccgttctttcccagattcatagaggcttacgaatactactcagcagttttcgagtctctagacatgacacttccaagagaaagccaagagaggatgaatgtagaaagacagtgtctcgctagagacatagtcaacattgttgcttgcgaaggagaagaacggatagagagatacgaggctgcgggaaaatggagagcaaggatgatgatggctggattcaatccaaaaccaatgagtgctaaagtaaccaacaatatacaaaacctgataaagcaacaatattgcaataagtacaagcttaaagaagaaatgggtgagctccatttttgctgggaggagaaaagcttaatcgttgcttcagcttggaggtaagataagtgacaagagcatatagtctttatgtttcataaaacataattatgtttttactgtaatcttgggttattgtgtaactggttaaatcatctccatgtattattaccagaggttaggggtgatcacaggtactaaaagctaatctaacacttatggaagaatttttctttcttttttttccctattatataaaaataattagagttttggttctaaacctatttgctaagtgtgaatgagtctttacatgttcatatttcagttcaaatggttaaatttgttaaggttctcacttactattaggcttatcagttttaactcttaaactcaaaagctcattagatccataaaactcacaaaaggcatcgtcattcttcatcaatcactagtgtatcagtacgaaactaggaaacgttacatttttcagcatcattttttttacattccaacgaaacgaaaaggaaaactctagttaagcagagttaatacgaaatcacataaccaaatcatcctcaaaagctcttttaaacttgaaggtcttgctttccattaaccacattctgcttcttctcatcatctttcatctccactgacttctcatctttctgagcatctgcagatttctctcctttgtttccacagtagatgaagtatagtatcaattgcagtgtccctaatgcacatccaaacccatttgggatcttcgcaacaacaaaaacccaaagttagaaacaaagttttgatatttaccaaagaaaacaacacaagaaggagaaattgtaacttactgcaacaaaagggtcacgaccgattagaccatagacgaaccacgaagtaccacagaggaagacaaagagtgacaaaaagaatggcataaactctacactcttcgtctttaccaccaatctctgtaaatcaatgaaccaaacacaaaatttaacaaaatgaatccaaaagtaaagagtagaactttaaaaagatccaatcctgagtttgcttaccatgatggagagtggagaagcgtacatgatgatggagaaaacagtagctgcgagaccacaaaagagttttctaccgtttccttgaagagcaaagagagagacgagagctactgttgcgaatacagccaaaacgcaagagaagataccaaagatcttaattttctccttctttggtgcgtagaaaagaaagattaacacgtagactgtttcgatcactgctcctgtgccattgattgtgctcacaagtgtgttgtcttttgacacaaagggaagtccatacctgaaaaaaacagagaaacgcagaaacagaggaagtaagaaacagagctatactctaatggaagattaaaaacgtaaaagagggaattttttttaccaagcagagaggagacagttgaggagagtcattggataagggataccagagaattgttcagtggatttgttcttgatgattctcttgaatgttatcctaatttcattcacgaacaaaaaagaatcttgagttttttttttccagaacagaacaacaagaaatcgaaagaatcataaatcggttcactatagaagagagaagtgatacgtacgaaggagccaagaaaagaaacagagcagttgcatttcctgtaaaaagtagaaaaacgacaaaaacggattagtagtactctcagtgatttctcatggaagaaagacgaagaagatagaaagacagagagagaggttgaggaaatgagttgctaccgaaaacgccgaagatagtgtgagcgatgttcatcttttgatctcaaaggtggctaaagattcttctttttttcttgttcgtaagctgagagagaaagtgagagaatatgagctaagtgttttctatcggcaagcgtatatatatcgagattcagcgtgtgttaaccgcttcactgtggaacaccaataattacaaaattaataaaagtataataaattatgaaataatggtattaaatattaaattttaaaaatacatggttctgttattaatttttgtagtatgaataaaatttgaaaaaaaagttatggttaagaactaatgttttgagaaaacctaagttttaaatttgagttaattgagttatttcttatataaaaaaaaaaaagttcccatgattttgaattctagtgtatatatacagattttttcttgataccaaattaatttttggaacgaggttttttatctgttacttgtttttacgtcctcgagaggtgaacctgactctttggatcgacgtttcttttgtagatagttatagagatatggttaaatacttaaaaatgaaataaacacctaaaaagagcaatgtcttttcttcttttgttttttgtttgatactaaaagtagctctgaacaagccagagtgttctgggcttgacgttgatatgtgactcgaggcccgagcctgtattttctgcggggcagtggctagtggttcatcttctccatgatgtgttactttttttttttcgttgccctctttaatagagattctagataaaatttgacagtttaggaagtttctggttacataagcgaaaccaaacctaacaaactgtcaagtttatttaagggcaccaataagtttcactaaatttcagttattctataccgttgaaccacagccgcaggatatactttttagtatagtgagtgatctttttggaatgttttctagtcaccacgagttagcttattcagctttacccaaaccatatcggttcattcatgatcattttaaccggagtaaaaccaacaaaaagaacattaggttatgattgtgaggctaaggttaatggatcaacgtcggtagatgagttgattattgaagatgaccaaatttgttgaattttttttttttgtaggaaaaaatcatgaaattggctgttctcgcgtacgtgttcattatatatttttaatacgtctagttcaagaaaacaatttagctatgtacgcagtatttagctaaaattcaagaacctatcataagtccactgcaaatctaatttagtttatgataccgtatttcatcaaatggcagatttttatcaacccattttttcttttttgtcgttggctacatcaatatttgttgagattttgatatttacctagaacaatgtgatctaattactatatgaaggcaaaaccaaaatttagcacagtaacatgattactagactgctagatgattcagtctgcatacttttatgctctctcatcttttgtgagttgaaaacaccttttaacttgttatccacaatagtcttacttttaaatccgaatctaaaatgcagaagcttgaaaatctttggatgtggacgaacaaatgccattatatattaagctttcactaggtaggcacaaattatctgataattgtaataaattatcaccaaaaacaaagaaaatcgaggattgaggtttggtttgagtccgacgtcaatgattgaaagcaaaagagtactgaactagagagaaaaggaaaagactatcagaagagtgaaatgatgatgacgttggtatcagcaagcaccacatggcatggcacaactcttcacacgagtcacgtagctctttccttttccagacatattcgaccttccttgtccaagttgtcctctctttcaaatttgtttttttaataagaaattggaccactattgtgtactttttggttagaaggatcgttaatatcgaaaaaatcagaatgaatggaacaagcggaataaataattaacattttctcgttttattaaattttagtgtattcattcattttcgattttattttgtaggtgatcacacatcaatatttaaataagagtttgcctaatacatatatacaagtgacctaacgattatgtaactctagagacgatgaaaaaaaagtcacctaacgtaacttctactaccttaaagataagctctagagacgagcaataaatatatacaatctctcgatatcgatcatcatattcttgatgtaacaattcagcagataaatttttcttttttaatcgaagttcaaagagttttcttgatacgatcgaatcaaacgataacgatatatatatataagaagggtacttacattcatcgattggggacacatatttatgaagagattgattataactcctcagaattaaatatttacttgccctcaaaggtaggggaatttaaatattagctttccctcaaaggtagggctctcttctcgacctttctaactttctatgcttaactgcatttctttgaaaattttgcacgttgtaatgtaatagtaataatgtctttgcactgctcttacctacttttggcttctagcttcttatgatatttttgtattgatggacttacagtaaccaccaaattgtatcagtcttatcatcaccaatcaatcatcacagagttgcaagttcgtccacgaaactttggaatcattcacctaagttttaaacttattaacgcttttggtatatgccagatttccaaagcaaacaaacgattcagatcgtacaaaagaattgtgttaggaagacgccacattgttgatgttccatagccacactaaacttaaatcatattacatgatcccaaagcggactggcttcgacaatacgtaaaaccttagaaataaaagaaaattgcaattgaaatgaacttaattcactagaaatgtgcacttatgaaaacgaaagatgtgctacgtacatagcgtttattcatcccacatctctttgtaagtccacttgttcgcaacaacaatgtgtgttgagtgtcaacagctccacatgatctgcttttctttttggcctgaagatgaaatatctccacgcatagagcctttacctcgccacgaagcaaaccagcctgttcaaaaactcaatgatattgcttacgttcagtcactaagagcttattaagcaaagtcactctttatcgactggaatctatttataatgcaacttttttcttttacctcggtccgcatgttgctagcgtttgcaccataattggccagagactgagcagctaaacatctttcatcgctaagcataccaagcagaagatgtccacatccaatacagtcatgccctatcaaccgaacaaacgaacattagaagaaagtcacatatcaagattttgaatttgacagatacaaaatttgtcagataactgaccaagtttccgagcttcctgacaactcaagaatgtacttagcacggagtccaaatgggatatttattgccctgatttccatcttttcaacctcaataggctcattaagtcctcgttgcctatctatttttattgcctccacacgcacatctttggcattgattcctatggattaatcaagaacctttgcagcaatatttcgggggccaagtagtagacccacaagtatgtgatcagtcgttacatatacgtggccaaacctgcgggtttcctctttggccagcattatagctttcattgtttcctcggtaaaccgctcaaacaacatccttaggaaaagtcttgagggttttcttaatagcagcagctctttgccccgagattcaccgtaaagctgcggccttcctagctgcgattcacttggaaaggctgcagttgataagggtagacaatagatcataagaccaccatatctatatctctatatatgtatagggctaaaaacaaaaacaaaaaaacacaacactcttgaagtataagttaatccaaagctaatgttatttgaaacacaagaataacttcctcagcatgccaattcacaaacacagcaagcaacacaaaggaacagtttttgttagttctctaccaatcgaagccgagaacaacctaattctcatggcacccacctaatttgcgaaaccctaaatacaaaaagaatccattcttccttttttttcccaaatcatattcactgtgcccaagccacaattgaagcagaaaatcaagttacaaaatccatagagcttactttaaaagtatgtccatagcgtgacctagactctttttttgtgtcggccgtcagagtcttgtagaagaagcaaagaggggaagatgttaggttttggttagagttacaaggaacatgcctattaatttaaaggatactcactagccgaacctaatttggctttaggtctcatactcactagccgaacctatttggctttaggttttttcagttttttttgtcaatgagccatttccccattttattagctgaatttaggtctttgaaatatctggtaaaaatgattatcaaataatgaatttctatatattattctgcaatcttcacaatctttcatatttgaatcgaagctaaaagagttttcttgttacgatcgaatcaaacaataacgatatatacaaagaaggcacttacactcaacgttcggggacacattttaatgaagaggttgattatagcttcctagaattaaaaattagcttgccctcaaagttagggctctcttctcgacctttctatgtataattaactgcatttctttgaatacaatttgcaccttcgagtgtaatactaataatgtctttgcactcttcttacctacttttggcttcttatgatccgtttgtattgatggacttatagacttatagtaaccaccaaactcgtaagccttatcatcaccaatcatcacaaagttacaagttcgtcctccaaacttcggaatcaagttcataaactttttaatgctttctgtatatatttcctgatttccaaagatcgcttcaaacaaacgattaagctcattcaagaagatttccatgggaatttttttacaatcgaatcaattgttcaaaagcagaataattgtgttaggaagatgtcaaatctttgatgttccatagccacaccattatttgttacttaaaatagaaagttcctatttactgtggtgagctgtgtatacacggaggcttgtttttggattaacatcaccgatcactccaagaaaacagatttggactcgttctgatttccgtgtggaactctgtttcgtgggatcatattattggttccttgtcggtagattactgaacaaaactttgtccttccatagacaaccatctctttcatctatctggatccttctattcagccaaatcacatgtcggccgaaataaaactcagtgtcctttgatccgtccagatcaatctacaggtaaaataatttacaagcagatcaatatagtatgcactgtgcttgatcaatatgtggatatgattctgatttctcaaacgatagctttgtaacatattactctgccttcttgttgtgaccagtttagtctctgcataaatcttagatcattcccatgagagatgcttttgtttatggtactataaaccgtaaacatcgaagagaagccatcaattttgttggttcgtcatttttctatcaaattttagtcaaacaaattccactgaagagtgatatgtacaaaaaaatcaagttcacaaaaaaactgtactcaaatgtatcattcattttgtttcgtaaacacaagatattctagtggaatgttgaaaccggtcaaggtagaggcataggaggtctccagctactgaactggaccagttctctattcacaaaactgccattgtgcagccaaaacgtctcagtcgattgctggaaatgtctaactttgcgttgaagctcccatagaatccctttaaccgcactgcagggtgcggaatctggaccgtacacaaacaaacatctaatcttccgacctcgggctatcattccttctatgtctctatctgaaagacaagccgggaagaagttcttaaatctcaagaatctgagcaaatccattgatattggcgaagagaaagcggttctgaagtaacttaatgttacctgatattgaagctaagtaatcaagaaactctgagcctattcgagttgatggccatttgatcgatacttgggcatagtcgataacattctggaaaggcagctcggcgtggtcagataaaagaaccgggacacattcctgaacaagcacaatcacaatattacacaacgtaaggtaagtaataaagaaagtgaaatcaaaagttggggtaaagagaaaatagagatcagaccacaaagaatgattcataaaagcgaagtgtccatgatgattccccacgaggagcgaggcagaacttggcattcctcagatgttcaaaatatgttgtccttccaaacttttcagttccgctaaacttcaaatctggacattctagctgttcacaaaaccactcatgagaagcaagcaaggaaaagaaaacatcgaaataacaagtaatagcttagcagatcctcgatggaaaatgaaaaacgtgtataagtagtctttgaagaaataatgtgagactaaccttatctggaaattgctttgataggtcaatcaatttaagtcgaccagccttcccttgtgcacgacctaaataatttgctaaatacttcctctttgacagaggcaaaggctgaacatcaggttgtccatttttagtcatagcatcatcgacgtttcctggtatgattatatctttccatgaattaaaggcagttgtgtctttcttgtcagtccggtcagcctgcatccacaatcattgaagcattcatgtttctgtaaaacaaactctaagaacctagctcaatgattccattgtatgattctacaagtaggcacatagaccattcagtttattcgaaaccacccctaaaaatgtccaatgaaaactctgaaagccagaagagacagatatggaccaaagaactttcacattagcgcttcactaccaaatatacttcaaaatacaagaaactcctaagcagagagcaagctaagtacctcgggagtgaggataatagagcggttgataaatgttgaccaggatctaaacaagtgagctccagcaccactacaatagcataacaaagaaaagtaatgtcaaagttagtataaaaagaatacagttcatcgagaaaactttatatactattgattaagtgccacatacctcggaaaaacaaatatatgatcacgaccaccagatcttcggaaatacggcatttgactcaaaacctagtgaatccgaaacaatgtcaataatacatatcactgtaattcgaaacaacaaaataaaacatcagcatcaacaatttgaatgagtgagtgatgatttcgttaaccttgacataggtctgattgatctccttgtcattaagacctcccaacattctcacacatttaacataagctggcacaaagaacaaatccgcttcatctttcttaatcgtcctaaatttggactccaaaagcaacttgtgaattttaacctatcatcaacacaatcgtaagaatcacaagtagctagcaaatccacacttaactacattgctatttccagaaattcccagattgaatcgttaattcaatgtgaaattaagaaagaagaagataaatcacctgagatccccattgacctttcaagcatgcggtggtcttaacactaccatccctaccgtacaacagctctttaagaccgtcgatctcattctcatcataaacgtagatcttcagcgagaggtgagacccataacctcgctccggccaccgtataataccgttatcagttttgattccgtaagaagaagaagtacgacggagatcaatcaccggagtaacggaattggattccgagaaccactgatcgaaaagcctagtgacgaagaaggtagagacgacgagaaaaagagctccaatctggtgcgtgcgagtgcagggagtagcgtagtgactatacgcaccaaaatttctaggcttattactagttaagctcgccatttctatctctctcactgtttcttcgttttgcttcttcaaatgttttaaggcatttttttttgttttcgcttagatcttgcatagatgatagatgacgagaacataacgtttggtgttagtgaaacggcaacgttctcatggaaataaattaatttctgagaaaggcccattatgggctcagaagaagagttcgtatacggcccgacgttcctatggtcagtcccatctgatcttgttttccgcaaacctataacaatcttctaatttaatttaatgtcttaaatttaaacctataacttctgttttgtcggttgtttactaaatctacttctaagcccataataggcctatttataattttaaacgacccattatgtattatcaaacgttatacaatctaggcgtttgtgcaagttcaaagcaaaaaaaaaaaaaacttttattgataaaatgggagaaaaaaagtgttcataatctttcgtatttgttgggtagtaaacagagaaccattgagaagattaggaaagattcaaaaaccctaatctcttattctcattttcacaaatacaactgtgtatgaataagaaagagagattttcgagtgtttgagactctttctatggtgcagtcaaaacactcccacattgcattgaaactttagccgatgggcgttctagtgttactctcttctttgaagataaagacttcaatccaaactggttcgatttcgatggtaacttcaagtataagtttcatcatctcttattcttatttttgtgagtcttggatagatttactaaatttttctccttacatcatacaagattaataggagaagatctggatttttaccactgctccagaatcagttcatgtcctgctttgcaagaaagatccacattgcccgcttgcaggtttctactctctgtctttctctctctcttcaaacgttagaacaagaacaaaaacaaaataaaatatgctatgttataaattattttagcttacataacaatttctaatgtcaatgaaacttatttttctttatcaaaaaaacaactaaattctagaagaaaaaaatcgtaaattcaaatttggaaataataaattacaaacgaatttgttttatttatgtcttactataatagtttatttggtttcttttccgtttcttcttcgtcaagttactttcaaattaggttctttgatagatttattcctactaagttttggaaaacaattggataaatttctcttaatttattcgacctgaaatttgggtttcatacgaattaaaataatacttttttgctgacaaaccattttaatacaagaaaataaaataaaatacaagagtctatgaatttgtgctatcattttgacgttttctctcggttactactacactatccaacaaattttacaaaggattgtaacatttagtgtttctgagagccatcaaagtcactagttcaactctatttaagaggtgtgattaacgctttaaacgcggtattattatcgagtacatgcagtacataatttctaagtttatcgaaaaacaaaaaaaaatattgtttaaagatgtcttaatattaaactagtactcactaataaaactcaataaacgtaaatatatagtgttattaattagtcaaacaaatgttttcggaaaaaaagcataaatgttctaaactttctttttaacaaaaagaattaaaatacatagcgaacatgcattaattaatctaaagatggctattatgattaagttgttattcataaggcaaaacaattttatacagcgtcgattggttgttggctactaaataccatttttttttttttaaagaataatattttgcaattgaatctcttttctcatcttgtaatttgatttgcattgtgatcgtgaccttctatctgctctgccttttccttaacttcttcttctttttccacacgctaattgataatttatttaaccaaatttgggtataccttttgttgttttatgtcaccatcatacactactaaggttctcctccattgaggaaccaggagccgtgtgtagtgtgttatacaaatcagaaatatttgtactttgacaaaaaaaaaagctttacgaaaggtggtttatattcagatatctccacgccatatatataacgatggcaattaatgtatgcatgagcggtgttcatgttgttaagcgttcattactcatacattggttgagatcatagattcatagttggaacatatctgagtatctgaccgtttgtacgtacgtacgcttttgcatgacccacttttggaaattcaatgtgaatatgtcaacagattttaaaagagatatatcataacatatatgactgtttgcctaatgtcgtttatgtgatacaagtcagaaatattaagagacagagagagttataaaatggaagtcctttattaattataagagagagagacatcttaatcttaaatcttttttttattactgattaattagttaagagtgtctataacagtgaaacgacaacggaagtatctatacatgactaagcgaaaccacgacggaattgtctatatattacgtgcgcaaatttaaacgacaatgtgtaactaaaataacctaggaaacagcccatcgggcttagataccgttacgggcaagccatttagatagaagggcttcctcaactccttcgtcggaaatagttgctacgagacggcgtatatcatcgccggttccgacgaacgcgaccggcacatccttctcgaggttttcaggaatttccatgacttggtgaagcccgtcgtacatatctatgtcggcgatcaaccgttcgtttgttgggtaatgtatgacttcgatgatgtcatatgtctgcgctttgccgtcatcggacgtccatgacgtcttgataatctctgccacgtggtgcttttggcggaatagatttatcacctttgtcaagtactgtgtcctcagattatgtaggttgttggatacgtactcgtcagctaacgccgatttgcatcccctttccatgtcccttttcactccgtcttttttgaaagcaaattctaatccatggatcttgatcaattcgttgagagtcttggctgcattggaacgcgaattaagagccgctgatatatatgggcgacgcgacgtctgcgaggaagaggaagacattttgtttggtaaatatctttcgtaaattttcttagtctttttgtttgctctgtgtaaattctggtgagttatgtgtttagtccttgctcctccgatgctctgtttttataggcaaaattaatttaaagacacacgcaatacacaataaaatcatacctgggatccactagctaattaaaaagtagtcgctttgaaatgtataggaacgagaccaatgaacgaggtataagtaatccgacgatgtatctactagactactactcgctttgctttataggcaaaactggcaatggcattgtgttcacgtctctctaatttgcatattaactcgagggttaggtggaactacggaaatatatttacaactacacgaatcaacattcccgtttaagtatcttccccaaaactgcaacgttgaaaaaccaaagaaactgaaaaagaagaatctctaatcatcacaaactcaacacttagcttgtatatatcatctttcgttgttaagtgttattttagtttaaaacatctctcaagttattataaaatatctactgtttttatagtcacgaaatatttgttcgatagtaaattacaaccttttccagatagtacgtagatgcatgcagtgtacgtaatatacaacttttccgagataatatacaaccttttagatgcatgcagtgtaataattaaattatatatacaaccttttcgaaatagtacgtacgtagtctagaaaaggttacagaaacattgtcccaatgctcatatttttcttactcaaccattcaaatgtaattaaacgcattcttccgaatttcatttattttcatgtgcacaaagagattgagtagactttatctttgtgtatatatgatccaaatataaagatatatatatacatctcatagtttacccatataaaattacaaatcagtattcagaaaaatgtttgaggaggagataatggcgcaccacgagcaaaatcaagtagagctgtgctagtatcaccactaccaagctatatccatctatcaacttgcaagtatcaaactttatgcattattcttttcaagattttaaattttcctatttattaatttattttagtacaaattaaagattcttttcatttatttttatttttcttttctgggctttgattttaatttgggcttagaacccatattcctatttgaccaattgcatctttgatgtgattcttttttattagcgtgacgaaaaattagtaaaattacactgtgcggtggcgtttatttaaactacgagcaagcatctataactgaatatatggacatacatttgttaatttacacgtgcattagtcttccctctagagctcatggtcttagttaaacttattcaggatcaaattatttattcatctgatagattaggacacgaaccatcgtgaagagttccggtgtcgccgatacgatcggatacgtgtggtcagcgacttgtttcccactagataatgcttgattttttggagtagtgataacgaaaacaagttgatgaaacagagtaacaaaaacagagtaaaaaatagagtacttcgattgataaaacgtaatttgatacaatgttcataaaacgcgatatcaacttctcacttgcaagagtctccttgagagaacctccggcaaaatgatgaggaaaagtctagagagttctagagagaattacagcttaggaattcagcgtaaaaagtacgagcataacatgttgctttttataaagtaaacgttaacaacgtcttccgtcaccatccaacgtcggtaacgccaagttgcatttgccagctcacaaacacgcacgtgcacttcttcttatccatgtgtgagctgaccttctagatcgctatatcatagtttgagtagccgttattgtgttgttgttggaatatctgtcgttgttgtgcttgatgttgttggagtacgtagctgccgttcttgggttgactgtgctggtcgcaggatgtgtaaaggagcgttagagcaaaggttgtattaatgttgataaccgctggtggtgtgtgtgtttggtgaggcgtttctcttccatggtcagcatcgagcgagcttcaatgaactttgggtatgaagaagaagaagatgatgaaaatagagcggagataggatagatcgcgtctgataccatatgtaataagattgtgaaaacacagtagagaattatattcataagataatgttaatatatgttacaataggcttggcctccaaatatctatacatatttgatcttgttgatattatttctatattgtaggatatttatatgtatctaaatgatattatctaacaaaattttggaaagggatcacaaaagaatgttggccatcctacgaataaaaatatacatatataaaagaaatgacaaatatacatacataatatattaataggattaataaaagcttctctagcgaatatgaaccaaactgggaacataattatagatgacaggctctttataatggtcgacttttttagcataaacttccgtacatttatagtcttcaataacgtaaactctatgaaccccttcttttttatcacaaaatacaacgactttgttctcttcgtcctgaatgaagaaattaggcaggttgaaccgaatatcaaagttttcagcatcaattctcatgagtttgctccaagacactttttgtccatctatcacagatcccgtcatccaaatttccacagaatatggatgacgcgtttgatgtaatatcgaaattctatcatttttaacgaacatagaaagatgatcttcacaaggatatgccaaaaaaggcaaagaaagacgtccaaacatctcagctgaaaaatcaaatgtcacaatgacaccttcatgcgtattttcatctgcaccaatccaataagaattcccattcaaggatacccaacgagtaggaaattcaagaagaaaatcaatttcaacgttaagaactctccaagagttagacgtaaagtcatatatttcaacctctaaatatttcaaacagaatttacaggaatgccagctggctgctggaaacaacaagatcttgtatcgacgatcaccgtattttttatcgcacccaaaagcatatccaggagtattagtagtacgtactttatgtatgtgtcgttcaatccactttgtttgctttaaacatgggttccagactataatttcaaaacatcttgtgaggccgaagagtaaaccgtcgcaatgaagaacttcaaacacttcacatttttttttacaaatacattctgttagattaagtttacaactagtaacgttgtaaggtacaatcccgtttttggagttcacaactaatcgtaaaaaaattcaaatcaaggaataagataaacatattttgtttcatggcattatcaaagtgtttcttagaaaatccatgatcgtcaaatagagaattccatcgtttgcaagtagatcggagtcgtatgagagattttgttggaaccctagaaagtatttcatctatcaaatcatatggtagattagataacattttctctcttttatctaaactcttatacaatgactacaatttagatatattgtgtgcaaagagtactaatatatatataccagtcgttgaaggaaataaactaatcaaagtaaactatctgcctacagttattatatcattgaatgaaatctaaatgatatagataattagatatcatatcactgaattcttatatattaatgatatagatatcatattagtgttgaaaaagtaaaaaaattatactttttctgttccaccaaatttgatgttgtggaattttcacacaaatcaagaaaaagttatttttttatatttttaattattaatttaataatattaactttatttttattttctatttattggtttaaataataataataataataatttaatttatacataacatcaatctttatgaaaaaaaaaaaccacaacatcaatctttgtggaaaacatggaataatattttaggtaggagtgaatttttttttaatattgtgtgttgcaacactgtaatttattaatcattggtgccaagtgttttacgtatcattagaaatattacttaagaaataagagttttgacgcgtggttagttttctaattgtgcaactactaaatatgacatctccaaaaaaaaaagaaaaatcaatattttctcagaatatgctagctagtaattgaatttctatcaactactgtatataacatttccaaaaaaaacttatctcttaaagtaaaataataataatgttttacaataaaatatataccctttttcaatcatatttgaaaatttcacaatttttctttttcttttatataaatatatattacaaaatactagttaagatcttacaacaaagtaaaaagataggagaaatatatattattgaatcattcaaatctgattcatttccaaatatgctacaaggaaagaaaaaaattggtttccaaatgtgctcttctccggaaattatcagctcaggcagtcatctatagcatttagcgacagcgaaattatgttttgcataactccattcgtttgtccccgtttgttatcttcaaattggttgaccgtgaaattcgcaacataatcactttgagacgtcatcggaagtgttggcaaaggttaatcctcctctggattcgttagtcaccccaagtctttccttctctattgtagccttgtttttattcttttttgtcttggctactctttcataggttctactcttatttataatgatattaacatatttagcaacaaacaaaaaatgtgctaaaaagaaaaaagaaatggtttcacaagtcagaactataattttaatagatagttttatatgttttcaactataatagttttacttatttacatctataatgtgttatgctataaatgtctaaaccgtccacttagctcttaaacactcttgagcattggtaataagtgaaaaatctttacgttggaaattttaagtcgttgagtttaattgtataaaatctgtattttaatttccaacgtaaagccgacaacacagttcatttggaaaagtaagtgtaaattgatgataatataagttactttttgtcttcttcaaaatatgtttcagctataaattattctgatttccgagttttgttttgaaaagtttcataataactaccaaaaaattgtgtaatctaattgtgatgatttctgacaagctagaatgcttttgaatttactaccacaaaatcagcataagaataaaccgaaatatagtagtgaattaacatcatagggatgaatttggtagacagatgaattaatggaaagggtttaaattgttgctcggatgctattctgaagaagaagaggatggttttgcttcaacaacaggtttgcctttctctctaagtttagcaatggaagccttcatttcttctttacgcttcttactcgccaataccttggcctgaactccggtcacggtcgggtctttcttctccttaggtggtggtggaggcggccgtcttgctgccgccattgcctcctccttagcggccagagcgttccaactccatagcgcaccgcctagccccaccaaaattgtcctgcatagagattcttccatttatgattttgtttaggaatcttacaacgatcacggtactaaaagcaaaaaccggagtcaaagtggatgtgaggttgatccggtccaaccggtctgatcgaatttggaaaaaaaatagttgtttttaaaataaccaatattataaaatattaatcagtaaaaacttaagaaatatgtacgtttgccaaatggtaaacatatttaaacaattttacaaatataacataaatttaacaccgatttgaattaaaacagcccggtccatttagcccgttttgatttgagaagagtgttttggccttttgggttgatgaacaatgtgcttttggaaaatatcagtgcggattggatttttaatcatcgacacaaacacttaagaaatctaatctagtacaaaaagattgtaattcactctattcataaattggttttgatatatatataaacaagcataacaacattcttagactttgattaattttttccaacagttatctatttgatcacctgcgattaattggtggaactgcaaggacgacgggaggagcctgcggcagtgaccgcggcgatggagaggagagtctggcggcgtgagcagccggtgagagaggaacgagtgaatgtgccaccatggctaattcaagaaaatgtaaaagcaagagatgtaacaaaaattggtaaacacactaatagaagatagagtgggatagtgttgtagtagcattgcaatttatatctgcttgttcattggttggatttggataagacatcaaaatagattatttttttctgtctaccaagaaaataagactttcaagaaatccaaaaacgctgcgttttcctttttaatgaacaacactttcaaggtccaaaacgcaccgtatgtcgttattctgtttttcttgttcgctttttaattgcatttcttttcttttagaatttttgaagatttgaaagtataattttttaaaaaaaaacatggcaataattaagctcccgtagctgtattcaatccaaaatatttcaaaagcatacagataaaaagtagactttgaaaaaaaaagttaagtatgagagttatgatctacttgatcatcacaaacctacaataaacaaaagaaagtgggaattgtctcaaacaattacacaacatatctgtttacacaaacacatcttcaacagaaacaataataaaaatcaaatgtttctccttaaagaaagataaagcaatccaaatcaatcaaaggattgccaacttcttcaaatattggaaccactggttccctatcttttgtgattacttctctgataattgtttggtcgatcttagaacttatgcgatgtattcgaggctctgatctgttgctcatatgacaaatcttgcgaccagacagatctaaactatctttccttacacaagaagagaccgtcaaactagccgcggctacaccaaatctccggcttggagatggtgatttcaagaaatttccctcatatcttctgcttggagatggagatttcaagtactttcccttggttaaggagtttgatgaagaagagataacaactctttcttgatcttgacgaaagctcttttgtcgtgtcaatgaacgatggtttggtgatagctctcgagttctcttagaacaatttgatcctcttttagaatcttcatttgctctgtttggtgttgttgaattccggcttggtataaccggagaatcaaaccggctaggatatctcggttttgtggttttcatagatagagaagcttctcgtaaggaattgattcgagcaacatgtgaattctcttggtaacaagcacgcaagaaatcattggagaaagatctctccttcgaaaccgaaactgaagaggcggtcgaaagtgacgagtttgatgagctgagagaagagttgcttgtggttgaaggttggattggagagaaagatgccaacttcacaggagaagggggagggattactttacccgggatattgataaacttattcgggacagggataggatgaaaccggtttttctccggaagattaagtggagaaacacgacttggacaacgagacatgaacatcttctctggaacagaacagtacttctcgtgaggttcttctgcttctttgaaatctttcgactttggagagcatttgctgatacaacaacccattcctagagtttgatttcaatacttttttcgaaaaatctgtacgagagaaagtaactattaaaagggattggttacaacaggaaatggagatgcttattgtatataatgtgtattttgtgtgtgtgtggactttttagctaggcgtgatcctatattaaaaggattaaggaagaaaaaagtggaagagagaaaaagtgaggtagtttttgaattttggttggcgggtatgatgaagcagccgttagtattattaaactgttaccgtttaacttcaaatacaaagcccaataaaagttggacttattttggaagcccagatccatttatgttagtctataaacaacagtctcgagcaacaacacaacacaagttactaagttagtaagttacacatttttcaggcatgggtgcgttatctcgaggttatatatagagttaattatcaaatacagtatacttacccttaatttacgtgttacttaaatatgtcaaacatataatgtctattatagtatagctgcgatgaagatctgactctctcttttttttccctcatgaagaagatctggactctatacgcaacaaaaagttaagcctaagaaagaatattttattttgggcgacaataatagtatatgttttttgtttatatccttgaatttgatagttaaggaaattattactccgaacaaagaaaactatttttagtagcaaaacatgaatatgctttcatgtccaataaaaatcggagattcagaagcaatgacacaccggcagcaacgaaactggacttctgccacgtcactaatgacgaaaacctttctactatggatctttggtaggcccccaatgtcctaattgaagttgacacgaaggtttgtgtttgttgtgttctttattcaacacctcgtggtctcgagtcttatttctttttcttttttgagtttttttgtttctctagtactttgtcaattacatgtttcgactaatatatattaattgtttttatctttcgttttcaaagaatctttaattcacatatacattcaagacaagacataaattgtacgctgcttctttaaaataaagttgtaaggaagtgttgttgacaaaaatatatttgtaatggggtttcccaaaacacagtatatatagaggaaaatagttactcttttttttttttgtcataggaaaacaattactcttgttttcgtatatttgtgtttttggatgcgaaatatatagaagaaaacattgttttatttccgatactttggtcaatatatatttatctgttaacatccaataatttcaatatatttcaaactcttaacttactgacaattccaccaagtccacatataggacaagttttggtcctacgcatgtcatgcataatttgtacccgtattaatgtcatgttaaatattccaaaataccccttaactttttcatatttacttaattactatatggattaatggatgcctattatagtattaccgcattatccatttaattgtgtttgtatatccactattttctttttctttttttggttttaatgtgaaatatatccactgccttttcgtcacttttcttttcttttctttcttaaatcaatcattatcacataaactctgaatttcgagacagcacgtttgcatattttatattcaaaactacaatcacatgatgataatcaccatgaaaacagagtatgcttttttttttcttaaaatgataaaaacagtatgtaccataattaatcacaacgcatcatggtcaaatatagtactacttggttttacatagcaagagtattaaagatattaagcccatcattcatcatctccctttctcgtagactgtaaaaagaaaaaagcaaagagaaaccaacaaacaaggaaaaaacagaaaatctttagcctaattaagtttataaacaacagaaaaacagaggaggagaagaacccatttaagatcttgacggctaaaatatctttaaacaccacgaaaaagaccgatcagtagcgagtgggatacacgcgcttgccgtcatggtcaccgtcaccgtcacgggatggctgagaactctgtttaccgtcgcaggatggacggaacaaagagaaaatggctttggcggctttagtcttcaccaactctctctcctttgggatcacactcccttctttcttcttgaacggcttcagttctccggagctcatcttcttcagactataagtaagaatgtatgtgtttgtgtgtatgtatatatctgtgtgtgtggctttgtaatttttgcagagaagcagagagtattgggtttatatagagaagagtgaccactgttgatcaagaattacaagacttgtgcgctaagttgctccatgttcacactacgtgtcagctcttatttgatgtatacatgttatcaacaacttctacttagtattttagcaactaatgacgaggaaaataaagtgaaacttacagctaattttcataacattttattggatatttatatacgtaacttaataatcaacccgccagttcaaataaaagaaaaatatatattattataggaaaatttcatgcatccccttcattaataattaattatcttgtattaatgtatttcaattttcatatattagtgaaaggcacaaacttgggaactaaggctcactctcccatcggtgcaaggaacttgtaacaaaagtttttatccaaaagaagaacttgtaataaaagtttatatttttgttcacggctcttttctgattatttaattaatcaacaattagtgaagttgagaaacaacaagtaaagctaattgttaactgaagaacaagtacaagaaagtccagtgaatgtgactactagaccggtttctaatcttagctgtatatagtgttttcactcttttggcatttaaacatcaatccaaaatgttttatgcgttccaaccaccgaatccatctaaattttcaatacacgaattcatattcatgactaacttgcttgattaataacaatattttcaaatcctttttgacgttgactattgaccaaaagtttttttttccttactgactaaaaagttaaatgcactaaaagaaaaaggtctcgatcattatatagccgagagagaccttgtagaaaataagtgcgtgtttagtttgatttgtcgatatagttcaatgaatctaacaatatcaaaacttttgggccaatcatgtctagatttatagttaaaagcaagcatcctatatatcataggctgttgctatatatgtgtttatttcccttttttagtaaatctgatttgttgatctctttgttttctttatggtttatttccttatgctcagtccaaattaaccaaaatatatcgtttgatcgtaaagcattacaggcaggattaagccaaaggtcatttttatcttgtggaatgtggtagataagagactataaagattttgttgtcaaagatgctagtgtgaagtgtgaacgttgaacgggaagattagtaggaaatcataattataatttggaagattcttattttggaaacagttgtggagtcaaagacaatttttttaatcgcggtaaagtaatgactttctttttaatgtgaagaccaacgaccgaatgtcgagataattagcctgctccaaataattgtacttctcttctatagttctatagattcgaaaactgtagtaatctatcttgatatcagtgttaaagatctattgagacatatattccagtttaagtctggttcggtttactaaactcaactatggtctagggtattcgtattatttaagttttctgtaagtttattaactggaatgaagacaaatcttctccagttttttttttttttttttttttgtctatgttattttggatccgaaatgcgagaagatcatgttctacaatgtgttacgccatggtattttgagtatattcagcaggcactaaccaaaactgcatttcgaaccatttatgtcattggtcaaataggcttgacatattagctctcgtgggcctaaaatgtttcctacctggtacaaatgatatagtaaacctgcagatttcttatgctcattgtttaattttaatgtgttaaggtaaataagttatttcaaaatctattttcttataagttataaaaacatgtaatacattttggaacttggttacaaaaaatattatcgaaattgtagggaagtttccaaaaacagttattgaaattaataaaataaaattttcattatataaattcttcattcgtcaaaagattcagtatatgctatatctgactcacggatagtacaacaaaagcccacgcacatgctttaattccacacacacagaacaagtctggtcaaagcattttgtgctgctcagctgtgctcacaattagtttcacgacaaaacctaattgagagtatacccctatttaacatttacaaatctcgattatcgagacatcacggtggcatattgaattagagtttatcaatgataaacaaaaggagtgaataattacgactaataccataaacacaattaaccgtcacaatcatcataatttgatttttgtttacaaattaaagaaagatatcataatctttcgtcacccagcccctaccggaaactgaatagtagagaaaacatttaaatctttaagaagaaagaaagagagaagcataattatcaaaagcttataattatcaacgagaacaccaacatttagatatataaaaaaaaaacataaaaagaaaacccataaacgatcatgacggcatatatatcttcaatcccaagaaaatggccgatcaacgatgagtaccggggtacacgcgccctccgttacctttgccgtcgccggtagagtcagagtgccggccacaaccggatggcgtgagagcagagataatggctttcgcggccatagtcttcaccagcttcctcgtaacgggaatcacactcgctacttgtttcttcacctccctctccgccgtagaactagagccttctcctttagaactcatctttaggctgtttatgttgataagtgtatgtgtatttgtatatatgtgtttgtttgttgcttttgtaattgtgaggaaccatgcacactatggctcgggtttatatagaaaatatgagatgagaatcaaacttctgccataagtccattttcaaaaataaatgaaaaaacttaatttctaagttgctccatgtccaacgtgtcagccacccattgctgcaaagaggaaatttagttgatatcttgtacttatgatttaagtttaagaaaaaaaaacaaattaagcgaaacttacatttaatttccataacatttggatattttctgggatatcagtggatacgtggaaccctgaagaaataaaataaaataagataaaacattataatagaaatttccatgcatcgccgttattttgttaattaatttatatttatttacttggctgatgagttggcgccaccatgggaatgtagtatcagtcttacgttagtacaaggcaacgggaagacaacattcgacatatatgtttagtactttattatttgttattcgtgcctcttaagtcttatctaaaaagcaataaataattatgttaactacttactgttatatttttttctaatgatatgataataagtgatgtcttactattaatttatcatatactaataattaatgactttttactgttaccaaattaatcattaaattttaacgaatgatactaatcattcgataatttctttgtttagttaaatgtatagttcagtacagtaataaccaaaacatcttctatttcaaaaacctaaaatttataatagaattttttaattgaattgtcttttaatcataacgtttctgctgttttggcgttcaaaatgttttgtttcacggagtaacatatttacaaggaagatcaagagatgtgaccttgttgaaaataattgtgtagagacaataaacataacaacatatgtagattcgattttgtacaatggatctagactatatcattttttatctaatcgtgtcaaggagaattaaagttaggattttgagtaaaagccccttttctacatttgtttctttgtttttcccataattgttttttgttctttctgtcaagttttaaaaactttttttttttgtttgtgttcagaccacaccatatacctgtatatatatatgcttggtccttaggaacagtacaaagatctgccaaggaccccattttattttttggaaattcacgaatgatatgatctagaactagagactttattgtcaaagatttagatttgtgtggaaaaatgaaagaacatgatgattgatgaagattgaattaaagagaaaacaaaattatgatttttattagtttcatttttatttttatttttttgtgcaaaatttttattagtttcatatgacaataactacaactccagataactaatggctagcggctgtgaatttgcgatactttttccaaataaaaattaaatcaaaacgaaatacaataatttgagagattccgattaacaatatcgtgaaacagctgtagagtaataatcaggcgtgaacattaaagtaatgaagtggttaaccaataatttattagttttcattcatatatcaccatgattatatttaataaaatggatgaaccaaagacaatctttgtgtataagtttataattttttacatcacaatctatatgttagttaacgaaatatttaattttattagacttccagaataaactattgaactggcaaattgtcacggtgcaacttttttgccaagaagacgttaattggtttataattaattaagacgaaacaagaacatatagtacatgatcttacaacctctttcttatgaaatagtttttaattgcatttccttttttttttatatataaataaatattgaatgttcctaagaaattatcaaggtggtgtgtcatcatgaggaggccaccaacttggaaattaaggttggatttccgctgcaaacagctaaaaggatttgaaggtgggcaaacgaaattatcaattaaatcatcaactcaagacgtgataattgttatgaacatattattagtattgtaatttatccttattacagacataacggcataatattatttccattggtttaattaaacgaccaacgattatattgtctgcgattctacaaataattctcatttcttttattgttttaaacattgaacgtgttatatctgtggacgaattttgggaaatgacttctaataatttggtttggtaatttttagttaatgcattgtacttaaattctaggtttagcagatctcatcaataaaatttgttcatatattaaaagttcagagagttttcattttccaattattcatttaactttcaataatttttcaccaaaaaattgttaatttagcacgaaatgttagtgtattcccgcaattttttcgtttgtaaacaatgttccatcggcttatttaaaccaactaagtaatatactgttgttgacaaaataaataaataaattttgaatattaaatgagtaattgatttgacaaaaaaaatgatagtcaatattttgtatgtttggaccatatagacagtgatggcacataaataatcttctaatatattcgttctttttttcttcggaagcgactcgcgtgactctgttcatattttttttattttgttaacggaataaaccaaaactacatctacttgttccttaatcgaccagtttttattttcctatgagttgtttcaattcgatcgaatttaaagaacagaaatatattgttataatgtttttctgtctttcgaagtgttttagttgcagcttattgttttttgtttttttttttctttttgttaaaaggttttagtttaaaatttagtaaaccataaccccaaacttaaaaacattcattggtatttaaaatctttaacgcgtttaaagattctcgatctttttaaattcgatttttttttttttttttatcaatcattccccacgtggcccgggcagatatgttaagcttcgtatctaagaaccagttatgctacaattagttaattaattagtgactgaaagccacttatgcttgtctgggttaatcatcaataaatatatatggaccaaattggataggtcttccatttctcccttttatttctttccactttcacctttcggccgttaagaagtatccctaattccctataataatttatgtcttatgttacgtaacatattactgtcattataaattttgtcacatatgaaacatgagtgattagcccaaaaaaatatttacggatcggtatgaacattattagtagttccaaattaaagctcgatctgacggctttgagctaccttgatttttactggcattataaatttctaacatattgactaatcattaattatcattgattagttaattctataatcatcatatatatatatatataagtttaatccaacatatttttttaataagtttaatcaaatttatagacgaatagatagctagaactacgatggtaactccatttccacaaaacagtacttacttttagttcctaaattgatagatatgaaacaaaaaggttagatgataatgaacaaactgataaaattgaacatttcttaaagtctaggagcggtggacctgaatctttgagaatgaccgtgttgactcgttttttgggagatctacatatgcacctcgattgtttcaaatatctagttattattaagtgaaaagacgcaaaaacatgtaatataaaaagagtgagaaaaagagaaaatcatgtaatatgatttagttaagcgttaattaaaaatgtttctagtggcaagaaagaacactaagcaaattaaataggcaatataataatgcctttgattggtagatattttacttatgtagtatagggtttaactatttccacggtaacttattatcaaatcagtcatccaaaaaggaaagaaaaacaaaataatagtaatagttttgcagcaatatttcaactttgtttttttttttgtatcacttaaacttacaatactttgttgcatctatgaattaatcctgatgatgatgagccatgtccatcggtaatagattgagagtaacttgtctattactttgcatgaattgtttttacttaattcttgtaagttgatggtcattctcttaattttaatcagattattttgccattgataaattaaaatttccgtatatagaatcttttaaaattttcaacaaaaacagaaaagaaaaagcaaaacaaccaacacgcacatatgtctattaaaaatcaatgattatgtcgatatggctagatccgtacatatagtaaaaaatctaatatacttgtattttaacgatggttatttcagaatcttacagtgaacgttgaccaaatagattctgataaacaggggcactgagcaacatatataaatagggaaaaatcctttttctcagtgtacgtcaaattaataatgtctggataacaaaactcgtagccttttctatattcgtgttatgtttagcttttctctaaataaacatcacggttcactaaaacatattttcaggatatttcctataacatttattttttctcggctatatatatttgaaagaactttaaatttgtaatgaatgtggtggtcagatcatgatggtctatgaatccagactaaaatctttcaaccaaccagtagggtcgttaagtataatttattagattaatataatctgttattatattccgaagtgataactaactctctttttgttttttgggtttggattaccaacttaatcatctataaaggttttcactaattctaaacaatcaatatatgagcgaataaactaaatttccgattactaattgaacactcattggttttaggcttttaccgtttgaagcctctcactctcttctcacgttttgatttcaatgaaaacaatatagagatcacgcattaaacattaatcgcagtaaattataataagtcttatcttaacactaaaacgccaggaatcaatacaaagaaactattgaacttagagaaaaaaaaaagcatcttatattagtacaaactctttccagaaagagagatcattcggtagacatatacaatataacataatctttcttaagactcataatgattacccccgaaatatcattggaaggctaccggagcgtagactgcacgcgcttgttcctcggaagctccactatttgcttggactttaaaggagatcgagatgaaaagagagtcttcataatcattgacttcaccagcatcctcttttttgggaacacactcccttgtttcggccccaaccgccactctccatcctgtatcgccaccacctccaccgctttttctaccgtgctcatcgatattcactctctatctaatcctctcttttcgtcttaaggagagaaaaaagctcttagatttgccctcaatttattacttgatgagacttgtggtacaagctaacatgtaaaaacaatagtttattatatgaatcttgctatttccctcacgtggccttgtataataagttttcatttgagaaccaattagttatgctgcaactacgtataaaactaattgagatactgattaaagccacttattccttttccaagttaatcatgatttggattattggcttcactcaccttttttctacctttacctttcggccgttagataatttattaaaacagtatcatattacttaagtatacataattccgcacatgaatcacgagtcataactcatagtttttcgtttgatagaaacactgtaactaactgaaaatctaataaggtagcaaattaaaacacaaatgacgcgtgcattcatatgaatgatagctaaaatgaattaaaaagtacttcaaattttcaattcacacatctttttcaaatatccatgtggaatgattaaagtgaatacttccaaatttactcgcccgttttcaataaaattatgtcaagactttttttttcgagtactactgacgaatgactagtaaatataattatcgtaatatatatagataattatcaccattcatcatccatatggcattagtattatttgaaaatagtcaaaataccacgaaagttgcaaatatgaaaaggtaggctctggcatcctgtggttcccttcatcttaatggcttagttcaagatttgtttctagtttaagtgtttcggttattgagaaagcggaaagaaaagcaaccaatgcgacaatgttaagaaacaaactccaaactcctttatttcttaaccaaaagttacaattcatgagaagatgatctagaacatcatttctagactcatcttctaaatctcacacacgagattgtttacacaaattgcataaagctctctaaacaatgagagtacctatttataaccaaaaagcagtaaaagatagatgcggatattacctcagaatatcttctttattcttccttcgtctgacgtgtcctctgtcacactttctgtgctgcttctaatccacctgactcactagcagcttctagaacctcttctccacctgtcccttctgtagcttctagaacctttgtaccatttaaatcatcagaacttagtgctttcttcttcctcacgtaaaccctattgagcttatcaataccccccccccccttcggaactcagcttgtccccaagctctattgcaggaaactgttgccgcagctcggtaagtacttcccatgacgtctcatgagttggtaagccttgccactgaaccaacgcttctaacacaccttcagctgagtaacgagtatctaacaccttctctggcaccaatacccattcatctgaaggtcgcgtgttcgatccacgctcaccgcaaatttgttaagaaacaaactccaaactcctttatttcttaaccaaaagttacaattcatgagaagatgatctagaacatcatttctagactcatcctctaaatctcacacacgagattgtttacacaaattgcataaagctctctaaacaatgagagtacctatttataaccaaaaagcagtaaaagatagatgcggatattacctcagaatatcctctttattcttccttcctctgacgtgtcctctgtcacactttctgtgctgcttctaatccacctgactcactagcagcttctataacctcttctccacctgtcccttctgtagcttctagaacctttgtaccatttaaatcatcagaacttagtgctttcttcttcctcacgtaaaccctattgagcttatcagacaacgcatagtctgaaaaaccatacagtatatgttgtcgaacccaagattttgggccatatcacggttttaaaggcctattttacttagtcttacaaaagtgataaaaagagagttttgaacgaacctaaatcttaatcatcatgatagtttttgaacaataaaatcaaagatagtcttttatttaatggacttgttcaagacagggtcttagccatttgtcttagcaaaaacttctgaatttttcctgtggaagtcttgggaagttcctcctgaaagatcactttcctcggaaccatgtacttaggtaacttcgtcttacaaaactcccttatctctctctcggtcacgggaaccgaaccatcaccattgttatcacacttcaagctcacaaaagcacatggtgtctctccccacatcttatccggtttagccaccaccgcagcttccttcaccaccggatttgtatacagaaccgtctcaatctctgcgctgcttatattttctcctccgcatatgatcacatcttttgaccgatctttgatctccaagtaaccatctttgtgtataaccccgatgtctccagagtagaaccacccgtcctctctcatacaagccgcagttccttgagggtctttgtagtatcccaacatgactgagctgcctctgaaaacaatctctccaaccgaaactccgtcgtgtttcacactctttcctgtttttcgatcccttacatcgacttccgtgaatccgagtgttcttactccttgccttgacttcagcctagctctctccaatggatcaagatggtcccacttaggcttccaagcacatgacacaaccggaccgctagtctctgttaaaccgtatgagtggctgacgttgaaaccaagtgactccgctcgggagataatggttgctggtgggggagctccagaggtcataacctgattcaaaggtcataaaaccgaaacagagagaaatgttcattcataacgttttcaatcacaaaaaatctcaaagtaaagcttaaattgaatagacaaaattaaccggcagtgaaccggttttctcttcatgtacctgaaccgggttcttgagcggcgtacttaatggatagttaattagcatgttgagaaccataggtgcagcacacatgtgggtcacattgtgcttatcgatcaagttgtaaatagtcggtgcgtcgactctacgcgtgcagatgttggtggctccaaccgctgcggtgccccaagtgtaaccccaaccattggcgtgaaacatcggtagagtccacaagtaaactggccggtttggtactgaccaatcaagcaaggagctaacagtgagcatgaaaatcgctctgtggctaagtaccactcccttgggagacgacgtcgttccggaagtatagttaagaaccattggttgccattcggtttgaggacggatccacttgaatcttgaatttcctctctccataatttcttcgtacgtgtcaagaaaatctgatgcggatgaagaatcgttctcttggtcatcgtccaggaggacgaggtgaggtttctcgtgttgtgtgaataatgaaactgcttcaaggactaaggatatagaacggtggtcgacgaaaacgagtctggattcgctgtgacgcaggaggacagagagtgcgtgtgcgtctaagcgagggttgatgttgtttaagatggctccggacattgggacagcaaactgaagctcatagacggacgggacgttgggacccacgacagagacgacttggccttgtttaattccgatagaggaggaagttagagccgatgcgatacggagacagcggttatgtgtttcggaccaagtatgaacggtgtttgcagtgtggaggatggacggacagtcaccatagacggaagcggctcggtctaagaagccgaggacggtgagtggagttgagtttgatgggtgtggaagtaagagttccattagttagctgcaagaaactatagtatcgttatgattttgtgaaccactcaatgattttaaacttgtcttctatgaattctaagaagaggttccccttttaaagttgagttctgtcttttttattcgttgtatggttacattacatatggcccaacaaaattaggttgataaagtgacaaaaaaaaaatgaaaaagtgaattaaacaagtaagctaaattttcatagcttcttaacatatcaaagtacaattggccatgagagaatctataaaacaaggttaactataagaaaatgttggtgggcaaaaaataaagagcctagagacagtttacataaatttgagatgaaaatcaactaacaaattaggtccaactacttctacagttttacacataatccaatattagttttgaccttacctgtcatttatactaaaacatatcctaaactgatcatttgtaaagcttacttattttagtaatttaaccaacttaaaagctctataagaaacaacacattgaatccaaactcttactcaactcatcgaagtatgggctaaatttaggtttaatagtacatcgtacttgggacaaacaaacaaatttaggtttatgtcccaaaactatttaatttctatagtacggtatatttcaaaaatctatcatggatttgtttttgttataaacacatcttaataagacaatctatcatggatttgtttgtttttgttaataagacacaactttcaaatctcataaatatcaatccttaagatgtgtttataacaaaaaagttacaaagccaacaacacatgattttatcaaaaatattactaatatgattctgtaagataaatattaagaacttaccattaattcgcttttaagatactacatgaattcttaatatttattttaataagacacaactttcaaaacctcataaatatctatccttaagatgtgtttataacaaaaaaagttacaaagccaacaacacatgattttatcaaaaatattaataaccctgattctggacttcaaatcacagtcgaccaaaatgatctaatttagcaattaaaaagtttacattttaaaaacaaaaacacaagatcatggctacatattcaaagttttagttcaaaccatagaaaacataaccatgcgaattggtcaaacaagtatatttggccttacgaaaggcccaatacttatagcttaaggcccaatacttagagctgacgacacacattgcagcaaaaccgatatcgttttctatatacttcatatctctcttatgagatcacaaatattttagagagaatggttgtatgaacacaaacgacgaatgagatcggcaaaatcttagtcattgacgaagaagacgaaaataaagaagttaaacaaatatgtcatggaccagttcataatcacttggatcttatttaccctccgattttcctttcttagatcttctctctctgttttcgtactcattagcttgcacatcaggcgattctgttttgaagattttcctttttgttctttggattgatttaatggtatttcgtacaagaaattgactccggaactagatatagtcgatttttctgcttgatgcagaagttattctgaaattggttggagtgacactctgttctgaatagttcttcatatagtttcttatgaaaatagtagcaagcttgtttggaaactaatcccttcttaagggtacaacaataatacaacacaaaataaatgtcattctttacttcattcttggagattcttcttcatatcctcaataactcaagcgaatctttaaggcagagacttagccatttgtcttagaagaaacttctgtatctttccagtagaagtctttggaagctcctcctgaaaaattactttccttggaaccatatacttaggtaacctcgtcttacaaaactcccttatttccctctcagtcaccaacccattaccattactatcatacttcaagctcacaaaagcacacggtgtctctccccacatcttatccggtttagccaccaccgcggcttctttaactactggatttgtatacagaaccgtctcaacctcggcactacttatgttctctcctccgcatatgatcacatcctttgaccggtctttaacttccaagtaaccgtcttcatgtataactcctacgtctccgctgtagaaccatccgtcctctctcatacacgctgcggttccttcagggtctttgtagtaaccaagcataaccgaaccgccttttaaaacgatctctccaacggaaacaccgtcgtgttccacactcttcccggttctcgggtccctaacatcaacttccgcgaatccgatggttcttactccttgtcttgatttcagtcttgctctttccaatggatcaagatgatcccactcagccttccaagcacatgacacaaccgggcctccggtttccgttaaaccgtacccatgaccgacgttgaaacctagggtttctgctcttgagatgatggctgctggaggtggagctccggcggtcataacctgatttcagaaacacaaaacagagtttattcaaaagttcaccaaatgattttcaaatggaagtttttaataaaccaaaccggtattgaacatggatgtatttaataatacctgaaccgggttctttagcggtttacgagacgggtagttggttagcatgttgagaaccattggtgcggcacacatgtgagttacgtgatgcttatcgatcaagtcatagatagtcggcgcgtcgactctacgggtgcagacgttggtggctccaaccgccgcagtgccccatgtatacccccaaccattggcgtggaacattggtagagtccacaagtaaaccggcctgttcggaaaatgccagtcaagcaatgagcttacggttagcatgaaaattgctctgtggctcaacactactcctttgggagatgacgttgttccagaagtatagttgagaatcataggctgccactcggtttgaggacggatccacttgaatcttgaatctcctctctccataactccttggtatgtgtcaagaaaatctgatgcggccgaaggagacaaagaaccgtcctcttggtcgtcgtctaggaggacaaggtgaggtttctcgttttgcctcatgaacgagactgcttcgaggactacggagattgaattgggatcgacgaaaacgagcttagattcactgtgacgcaggaggacagagagtgcatgtgcgtccaaacgagggttgatgttgtttaagatggctccggacattgggacagcaaactgaagctcgtagacggacgggacgttgggacctacgacggagacaacttggcctcggtttatgccgagagaggaagaagtgagagccgaggcgattcgaagacagcggttgtgggtttcggaccaagtgtggacggtgttagtggtgtggaggatggacggacagtcgccgtagacagaggcggctcggtctaagaagccgaggacggtgagaggtgttgagttcgaagggtgtggaagtaagagttccatactttgatttttgttaatgttttgtattgtatgggtatgaggtttgtgaaaaggttagggggttggatgtatttataaaaatcttcaaaatgttttcaacttcatgaaggtggtgttggagtttaggtcattttgttttatttttggtaactataattgatcacttctggcccacgaaatcagcttgatgaagtgaaataaacaaatcttctttaatttcttaacttatcaaaatactaaatttggttaataaataagaagaaatctctctctttttttcttttaaccaaaatttattggtgagtgacgtgagtatataaaaatggaggtgggcaataaataaaggacaaagtttaccaactaggcaactaacaaaagttggacggacccaacgaactctctattttataaagcttccaaaattgtgacgacaagttcttagttgaactacggtcgaaggagctaactgaactaatgtttcatcgttccgaatatttattatattcattagtagaatatttttttttttcattcattataaaaaatgttcatatgaggttaagatgatagggaattatatatgcatgcatggatacatcaaatcaaacgagtaaattatttatggataatcaatctaaaatattctcgcgtgatgttagtttggtattacacatttggtactaaaaaagagcatcttaaattaaactatttgaaaaccttacacatatcttatagcattgatttctagtgtcaacgtccacactccacatgatgttagttttgcgtacggttatgagtacgcatttgtgaggattggttgagcgacttgtactttctcatatttatgtttgagtgttgactgttgagtattgatttttttttcttctccaaataactaagtatatagatatgatatgactcatccacgcaatattttccaaattaaaacttttgatcacatgaaatattaaaacagttgttctaattagttaaccatttttatagttttatacatacgatcaatactaataaaaaaaatagatctttaacaaccatatttcattgtacactgattaaccctgaaccctaaaaatacaagatgaataacacatcaacccaaactctagcttaggatatgtaaaccaacaatttaaatttaactctaaactcttttaaattatatatatcgtccactagaaaacaagattatttatagaaaatttggtagttataaaacaattacatatacaaagacacaactgtacacttgtaaccaaaattgaatatcaagaagtttgttcttatcatattaattgtcaaaagctgagtgattcttgtgacattgtgagcctgactgtgagtgtacacaaaaacttttaaacccaaggagatatgaatattggccgtggatggtaagatgattaaatgtagataaattttgggtagtttagaagttatatccacatttaatgaatctctgcatcacccaacacatacggatcctttaatttcatatgcacagaatcaaatgccaacctacttgccaattttggcatcatgatggttttctcatttgagataaaacttttaggtttttcttgagtagatagatactagtacttgtttacccacatggtctagcttcagttaaaaaggttacatatgtcatgttcgaaaattaaatacatatgtttatcaagttctgtagcatcacatatataatatcttgaagtccccaaaaatatttaataaccagttgtaccatgggaaccaagaaaaaccaattcatgtcggtttaacaagattagagaatcctaaaacgaaacaacataagatattcccaactaaaagcacacgacataaccatacgaaataaatcttcaattcatgattatggtatcaagcattatatactttgaacaaaactgaaataattagcagattacattgaaactgtttacaaaacttcttcacaatgatcatacgctaattaaacagtttttttgccacaaacttcttcacaatttttttgtaataaacagtttcactatattttctcttcatctctttcttggatttatttatgttagtgagctactaatctgattttgcagaaagaattaagaaacatatatacgaagccatttatgaagttagttttcatttgcaaattccgttttggtctgttaatatggctagtgttttttttcttcttttaaatgggtttgaagggtttattatatatcacgtgtaaaacagttgaccataatgctaaaaattatgcatcatacagagaaactactaaagaaacaaaatagtcaaatattcagctaattataacagaaatctagtcatatcgtcacaatgatcacacgctatactatttatcgccacaaccttttttctctccacatggcttgaaattgtcatagattatgttatttctgacgttttgtgcgttcatataagacttggattccctagaacttttaagtcgaacaatttgataaacaaacaaaaaaaggcaatcctttggacattttagcttaagctggattgaaactaatacactgaaaattgataatccatacatatatatctactaacggctttagtgagaagagccatttcattaccaaaattaataatttatcatagtataaaagctagacagtttatacatcaacacatcggataagcaaagatatactttacatatagtgattgcaatttgcaaataacacatcaaacatgtaaaaggactacacacacatgtcacatgtgtatcaccatcattagacatgtaagatcatgttcttgaattcttcaaagtcaacaaaaccatcaagattcttgtcatgaactcgaatcattctcccacaatcccaagcctttgcctcctcctcaaaccctagccgttccaacacatcacgaagctcctccgctgaaatataaccatctccgttcacatcgaacacattaaacgccctcgcaatcgcttcatcattatcagcaacaacatcaatattcttcttagatcctttgctatctaaaacagcgtcgtagtagaaccgaaggaactcgtctaaatcgaggctctgtttaccaacgatcagttcaagctcatcgggagtgtgttcggcccaaccgagtttatcaagaatccaaaggagctcgtcgagggtcacaagcccgtcttggttcttgtcgagcgtcttgaacattcttcggagatcgtttgtagttatgaatgaacaatccatttgatcagagaagggtagtttggatcttttggttatgttgaggaaatgtgtaaatctatttattgagaaattgtgcaatctttatcgtctataaaacatatatacacgtacagcaacatatttatatgattagtgtgtacggaagagattaaagcggaggaaggttcccggaaatgggttatgaaacgactaattttatgaaaaatgatgtttctagaagaaaagtcaataaacatgacatttagctaattttcttgtgtcaactatgacatatagctacttttatatgaaaatttgatagcgtatttaattatcatctttgattttttttaatattaagtaaaaacagtataagaatgaaaaaattaacttgataatataaccggataatctcatttactttctgccatagaaaaatgaaaagtctaacctaaatcgcaattttgtactaacaaagaataacacacctttgcgacattgcaaagctttctaaactatattattataccttgtattttgatagataaatagtattaatgtgctatggaaaaaaaaagttaaaaaacagtagattctaatactctatgtagtagagtggtgtcatcataatcttagtttgacatatggaatgttcggtaacgttctcgagttccgtggctaagtcgtacggtccccatttagtagatatttatcaccggccacatccacatacatacccatccacaattttccagtggatttttccctgtgaacagcaaaagcaaaacgataatgcttatagttttcatgtggattagataaataagaggaaaattatagcattgtctttgcatctccaaccaaatcctatttcctaccataattttttcatttaactatttatacaaaaataatgaacaaaagcctgagcccaatttacaaagttgggccttattatttatgggcctgaaatgaaataatcaattatgaccaaacacaaaagctctcttatgactgtagtaactaactgtcaatgtctctacagtagtacagtgagtcggaatgtgagctacggcgtgatgttcgatgagagaagttaattccttttctaaatttagggtttctcttcatcgagatgtttcttttaaatgatattcttcttctttcagtaatggaataatagcttctgtacgaaagatctttctggcatttgtaagtgaacccattccactcttcttgcatttgtaagtgttttctaaatttctactcctgcatgctctaatttggccccaacgagaatttgtgtgtttgagtggtcattgaatcgaactcaaatttagcatttttaggattttgagtcaattctagtttaggattcgtctctaatgtttaatttagtgaaggctatgtcattttcaggaatctgattgttttccgtttaaagatgagaactttgatgaattctgctgctacaatgagagctgtgaagaaggagtttattgtaatagacttagatgctgataaagatgaagatgttcgttgtggtaaagtgaaagaagagtatatgatggatgctggcaaaactaatccttccaacatccaacaggttgtttctgctgttgcttctgatgatgatggtgatgatgatgatgactggggtaccaaaatggattatcagtatataaagttgttggatagtttcagagaagatggaagtttaaatctgagtgacaatccactaaggtctattaggtatgaagtagataatggtggatatgacaagcgggagtttaaagcagtgtttacaaataagcggagtagagaagatcgaaacactattcgtgtaaccaagaagaatgttgagccaaagcctcctcatgttcaagcaagtacagagaaggtaacaaaagaagccggtttcaaattaaggcgaagagagagtcttgtgagtcagaagagtgttgaagcaatgcttattacaagtcatgtgagaagaaactcccaacacaataatggcgacgctagcgagaaggagaattttgaggatgacattgtattggatgaggtttacagatcttatctcaaacggttagtggaaaattcgaaaagttcaagaactaatcctgaaaaagagataaaagtaaagtgtgaggaggatcatacagtgtctttgtctgattctgattctgatattattgtggttggagattgtccgtttctggaagaagaggattctccatttgtgccatcaaaaagttataaagtgattgtaagtatagccttcaatcacttttgcttttctttcaagttcctcttttctatttcagattttatgtattaacattgtcgtttgttggaatgttacaaggatttggatgaagagagcagtgatcaacgcaattcttggtttaggagggagataatgaatgttctgaagcagccatacactgtaacagagctcaaggaacttcacaaggaagcatcagtgcatggagtgtcatccagacatatagaactacgagatggaacagagtttagctttccaacgaacaaaaagaaaccttcatatctcgataggtatccaggtacgttaccaggtggagtgctttgcttagcttatcttcttgaaacgatatcataaaattaataaattgatatgctaaattgaaaaggcttgtttctgattccatacacgaagaaacttcgaattggatctcttagaatgttagggaaagtgttgtttcatattaagttgtggtttggtttgattccacagacttcaaaaagcagtaccttgactctttgcgtgaaaaggatgagcgtaaagctctgaacctgttgcgcgggtttatcttttatataacggtaaatgatctggtttatctggtcttttcaattgttctaaagagtagagatactttgttatatatgatgcaactgatgttgttgtttctcagaatgtggttcgtgatgatgcattcaaaccgtggctcgatcaagaatgtttgaagatcagatgtgtctgacaaaagagtatcagcacttggagttctgacagaagactactaattaggagatgtaagacctttgtttcatgaaataagtttggacaagatttgcatttgtgtaaaattagcctcaccattgtgtagtagttcatgactcaagactggcccagtggcttcaggttctatgatgtgattatctcttccatgtccttaagtgcattgtagagagcttccaagcggacttattagaaggaacaacaaaaacaattaatccaatttaagacctttgacccaacaactcaatcaaaccttctcagtaagttagaggatgttgaagtcttaaatcgacaactctcaaattaaccctctataattgattagggggaaaaagggaaaacagaggattagaggaatattgattacaaaatcttggaattagttgataaaacgaatcagacccacacaaatcaattctcgccaagaagattgttattaatttagacaaggaaaagtgacttaccattacgtttccagatatcaaatttaatcacacgacctgttacatccaaagtagcaaaagtaaaaccaaagacaacacatagaacccagatgaggcagaaccaatacggaataaccatcctccacctcctcttcctccgtgaccaccaccatatcctcctcaccgccaacactgccgctgtatcctccttcgcctctgccgccacgaccaccacctcttgagtaaccgccaacactgccgctgtatcctccttcgcctctaccgccacgaccacctcctcttgagtaaccaccaccaactccatagccacaaccaccttctcctgagtaaccgccaccactgctgctgtatcctcactacctctaccacttcctcgtaactgagccattatcacagtgatgctgcgaccatcgagctcttgtccagccaatccctcgatcacatccttcatggatttctcatccttgaatgtgacgaatctgaatccccttgagcttacctttgtactcaccaaaacaaactgatgcttcttactgcatcagagctactggtgtgattagattgtatattgagattagtgattcactgtcactggagatagattgcacggtggctggatcattgtcatcaccggcttcatactcagcagtgccaagggttataaaatcgaggctttccattccaaaaacttcactgtcagtagaacgcctattgaataccattggctcagactcggaaaggatgttgtgaagtgaactaaagtaacgcctacgggcatttttctgtgatggttcgtttgttctttttctctttcttcctttgctttggttcttggggtggtggagcttgcatttcaatccttgagagcatgatccagtggcttcgaaaaccgggcagttgtaggaatgcttcttccgacactgtgaccattatgtagagacaatccgcaatcttcatcatgtgtttgcgaattgagatggagaaaaaaaatgtatgacataaagccagagagggatctctttcccttatactccttatggtattagtatacttaatatgctactgaagtaatcaaaagaattagataggatcaagggcactaagagagtcactagcagtgcaaaggaaaggtggatatgcatgtcaacacgtattagatgccaattttaagtggaatccttacctcgtctccttcggaacagtatccctttaaaaacccatcacatataggggcgatcggattgacatgcacatgcctatatggacatgcctcattgttgcataggcctgcattataggtattagtattgtgagtagccgcaatgggatcttagtacagtggaaattcttaccttgcagataataagaacaatcaggcatcctttctggaatgacctgtggaagaaataagttatccagttagagatttctgtaagtacaattatgcagcaatgacttagtaggaaaaccttgtgagtcaatttgcaatttgcatttgcacacaatccattcaaaaatttggtgcaaacagcaattttcgagggatcatgaacatagggacattttccgtcatctttgttgcatttcccaaatcttgtgaaaaactggcagtacttcttctttttagccaaccgcaaccgggcattgtgcaggctccatctgactttctcatttgccaacacacgagttcgtttctttggatctctgacaagctggttaccattcccgaaccgaacatatctgcaaaaatagattcaaatgttcaattgaggctccagaatgtggagtatataaatagataaaatgcattgagaattacgtactcttcattgccgatcaccaatctctttgggataaacggtcttttcacaccctttccattttcagaaggtccagagcacggtgaatcaacatctaacaaaaatttatgtttaagctaatgagagatacacaagggtaagacttatacaacgagagagttctcaaatccgatcaaaacattttgttgagaatcatcaatcacctagagggtgtgaccagtatataacacgtgtgtgtgtgtgtgtctgtcagttttcgtatattcatttcacatcaacgatatcaaactatagcattcatgagtttttaacttaagaatatcctaccagatattctctgaagagttcgtcttgaagagtccattttataacgaagggaaccaaacctgaaaacgcgctcccctgaaaaccagaaatcaattataaaaaacttgaggtttgctggaaacagagtcatccggccatctcaaaaatggcaagaaaataaattcaaaagaagggaaccaaataggtcatggatatcgtgaaccaacttacgtgccagatggtttctgctcgccgtactagtattattttgtccagattgcttttcactttctttctttgagtatgcagccacagccaatgtggcctcctgtacaaatatgaaaaagatacatttattgtcgacaccacattcaatagtcctaaaggagcaattatttatagacttaggccaaagacactgaggaaactaacctcattagcttttctcgagtctctctcaatggacttggaccattttaaatgcgacccaccaacacttaataccttagattttctgagggaatacccattagttgatcttgtgtaaattgtgtgtctcttcctcatcattgacaactttcggctgaagatagaatggccctgttatcatgtttgcaaacacaaaaaaaaaggttgcagcccaaggaaaatgagcacctttagatgctaacatacctaatgttgagagaagaaccatttcggaaagcagacactgagttcattaatcttctccagtacgtcactcttttccagggaacaagttgcggcacaatattctgatttcgcatgtgagctatgggcattcttggctgcggatcattttgcgtccaaaccagagaaaactttgattgcttaaatggtcgcatgacagctgccaatcaaaaagaaggcgagtaacttcatatcttgcttttgttatggttaaaaaaatgcaagaaaaaaaacaagtatacatagaaagggattctgatatgcatgttactgtaggaaaacactagatagtttattctcaaaaaaaaaaaaaaggactaagccaaagcaaacaaattattccttttccttttcagcgaataaaccatccactgtttatccaaatgaacagtcctgataagatgctcaacaagcgctaacagatatttactttgctttacataccagagtcagagaatgctgagctagatggtctttccgaaaccatgtttgcagctgatcgtgtatctaatgcatcatcaggcaaggaaattgactgattgcaacggctctctgaattccttactagctgatttttacttcgcttaaagtacccatcagaggaaggaatctggttctgacttacatcatgaatatctgaagctgcaaccaactgatttgcctttctcttgacatataccattctcttcaaatttgaagaatccaagtcagacggatttctcttctgctggcaatctgaagcataacccgtctgaatcagtgtatcagatgtcttcaatgtgtccccaccagaatgtggaaaattagcttctccagatgtagcagaatccatgatagactcaggtaaaccagtggtgagatgatccgtgctgtaagataaagcacattttcctgatgaagtagcgatggcatttgatagtttggaagtgctgctgtctgagggaggctttgactgcctctcaagagtagctatttcccctgttttaacaagtgaagaagcattatctacatcaaccatattggaagatcccgtgcttttgtcttccacagtgaaatggttcaactggatagcagatggaggtattccaagggcagcaccaggagaaccatgtgagggttttcgaagaagactattccctttacgtacgtaactattattagattgggcagtcactttgggaaacttctgttgtgtagacaacgtagacgacaaaggcttggcagctacaaaagaagagggagaagcatcggactttcgatgccaagtgtgacgctttgtgatatgaattggagggttagcatctttcttagtgtcagacacataaggcagggaactgggataacttttctgagtagagtaattgggtttctttttcctcttttctatttcatacttagaattcatagatgtcttactttggggatcccggtgtggtacagagactacatgctctttaacatgggtcaaagcaaatttaacatctgcatgtgagtatgatctggacacacgaacacctgaaccaccaggaatttcagttccagaaacttgtccatcagatgacactgcttcgccatcaaatgtatcagtcttagcaatgttccgtaagtctttttcttgagagcccacatcagaagttatatcagtcagtttcgctattggatcacccattggcttcataactaaatcacaatgcgccgaagaacctggctgggttaactcatgggaggtcataatttgctcttgtaaagtatctaaaagactatctccattttgactctctttaactctgttggtttcatcaaccatattagcaacatgaatttcactccgtaactgcctgaagctcagcctttgtgagtttgataaagaattacatggaaacactgaatccctactaccagcaacaatatcagtttccggagttctgtgctcagaagttccaccagaagactctattttctctatagatttgctagtttcatcaaccatagaagcaacatgaatttcactccgtaacggtctggacagcctaggcgagctggatagagaatcacatggaaacactgaatccctcctaacagcaacaataccaccagaaggcttggatttctcttcacctttgctagtttcatcaaccacagccgaaacatgaacttcactccgtatccgccttcgtgagctggataaagaatcacataaaaacagagagtcccccccactaccagcagtaatattagttaccggagttctgtacttagaagttcctccaggaagctttgctttctcttcatgagtttctacctcaacgctttcagtacaattatcttccttatgcttgatgccatcttgagaattactgtagttagctttaacagatattttgttttgtatctcctcattcactgccaccaatggcgaaatatgacaaggactaacagaattatcagatactaagcaagaactgacctttgaagaatccttttcaagatttttatctatagagagactccggacagaaccaatggcaccagatgatccatatccaaaacgatcttcaggagacaacttacatactgttgtacatggttgaatttcgtggagaccagattcagtatcagtaactgtttcattaccagacatgccattaattccaattgcaagagttgtttcagttacgaacgcagacaagctaggtaatttatcacaaaatatggcagatctttggctaacatcttgctcaacaagactctctctcgcacaatcagtaagatctttgctaagagaaacatttggctccaataaacaagttttcaaacctctactatcagaaccactatctacacaaggaatttctgcaggatgataagatttcaaaatcagctcctcatcagggacaagtctctcggtgcttacattttccatacacccctcagatggcactgccatagctaaatcagattcatcactatgcgaacagccaccagtcctctccacagacagcacatttgatgatccctttactccaacctttgtcagagatgaagaagtgtcgtttacacaagtctgtttaccttcttcactgtccatattgtcagccgtttctgcagcaacattaagaggcgtagtttccatgtatccttttccgctaacattctcaaccggtgcattgactgtgtttttgcagtgaggaagatttttactttccatctggaaaactacactcttatcaggtgacgtgaccataggattcatatatgtcccaacggtaaaactgttagcattagcaagatcccctgacgcactattatttgaattagcaagatccaatgaaacattagcaatgtccagagaggcaggggaatccagacccatggggcgacccctagaggagtcattttcaggagacaaggaatctacattcttatcaatcctcttgttgtcatcttcaataccaccgatatctgacttcgccaacaccttatcaccagggtcttctctattaaaatagatggaagcatctagatatggcttctgaaaatcctttcctccataacccaaagatccatcagatgaattaatggattttctttcttcaaacccagtatttacttccatcattggtatattccttgatggtatacaatccatgtcctcatcacaatccatatcctcatcacaatccatgtcctcagaacacccagaaagatcagcgacggttggccatgatacaggtaacttaccaggagacgtattgattgttgtctttgtcttcaggatttcatccatctccatgaccttcggcaaaagcgcttcgcctgcattacaatcagtgctcgttctgtccaacacatcttcatgagacttcagtgtactttgatttccatcaataacaccttcctcagtggagcaagcctccgtattgataccatgtttgacattaatgtcatccttggcctctatcaaagtctcacaaaaactagagatcttttctgtatcatgagttgaagcttcaggacctgaatcggtaagtttgactttgctgtcctgaacgacaccattaacaaatcgtaccttgtttagcttaccaccagaatcactggaagacggggttgagtgactgtcaggttctttttcatttttagatgcagtagtttgccttgtagaccgtctgaagccctcagaaaccgaaatctcatctgacaaatgggttcccagctttccatttctttcagttactgaaactttctcatttttatcagaaagcaaagctcttctagctttaatagacctaggtgtcacagacgcacccgaacggatgcctgcacttgtaggtgatgctacgggcttagctaccagaacattcgatttaaatgatatatcaagatccactggacttctccccctttgcttctccaccagtccacgatcagaatgacccaagtgttccttacccctatatgagttagagttaaaccttttcccattaccattatgatgattatgttgccgagaccattcattctctctactgtttttataggatcttggagtttcaagccttagcagagcactcttcttctgaacttgtttcctaggtgttcgattcaactcattgctcgcctctctccttccacgatcaaaatattgttcaatctcagaatgatagtaatcatcctttttctcgggatagagagtcctcccttcattacgtgtttctctagccccttcacggcttgctgatgacctagtcacatctcgacttactgtaagaccatatctgtcactgccataaccaacactagaggataaaaccctatttccatcacctaaacccctaacatatctatcggattctgattttaactgaccacgggcttgataattcccctctgttctagtgactccagattcttttctagcatatccaagactacgaaactcatctctagacctagaactaccatctaaaccacgattaacacccgacgagttacggctgtagtcatactgatagttacggcttggaccatcatccactcggcttcgacccggacctgaatccactgtccatgaatcaagccgcttttcattgaacccaacccaatcagactgagattccgtacattgaatactcgatgtcaacggctgtgatattctttgaggctcataactaacctgctgaggaatgtattgaggatgctgctgctgctgctgaagcgatagtggctgatgctgttgctggagcggtggcggatgctggtagtagtttgaagtcggctgattaaccaccgtattgggcggaagatcttggcgatgatgagagtattgatggaggtaatcttgacgttgaccattgctctgagttgatcgaccatataaattagggctttcgggatgagattgacgaggaggaggaggaggcggtaacggcggtggcggcggaagaggagcagagggaggatgaagatgaggagagtaaggagaattccatggatcgtaggtaggattgtaatgagaagaatccatggctgatttggattttagccttgagaaattttagatcttttgaaccacagcgtcgtcttcttcttattcttcgtcttctgatgaaaacgcacgcaacacgaaaacggcgataaaaatagtataatacacacgaatcaatttagttctcgaatcgttccgattttcggtaaccggtttttatatcttcttcgtaactctctcttttccctaatcttattgggccactgcatttattatgggccgtattgtataagtttccgttcttcagctaaaatctgtgtcaattgtctagattcaaatctaccaaatacacatgttgctgacacaaaaaaaaaatgtgggtacattatcaaagaattagttatcagaaaaattattacatccggtcatgtttctttcaaactcaatcaaagtttgaataggacaagaaaaaaatacttatgtcatctcttaccacatattatagattgactcagtcgcatatggttttgtcttccaaattatagagttatgataagattgccaaaatctttaagattgtgataggcactctcgaatatatgtaaaattgtatttcaacaagataatgttattctattgataacagtgagacacgttcgagcattacaagacaagaaaattcactttgatccattaggatcaaggaatacaaattacatgtctctgatgttcccaagtaaaaaacattgcataaaacacacgaaacctttgaacgctataactataacccctaaaccaagggagggaggagggcaataaaacccacacaaatccacctctcatccaccacccatgagaccatgacaatgaaaagaaacacattttcttaaatatacactttacactcactcacacacaggagaactcttttttttcaccatctcacattgttgagtattgcaattgtgatttgttgtagtgaacaaaaataatggctcagttgaagcttgatgaacggcttgtcctgcctttaagatactcctccacggagatgccttgctccatgcttcccatggaaagagagtcatcttccatgtcaaggaatgctaggtttagatgtgactgcagattagacctccgcaatttctcgtccttgagtagcattgaatcctctaacgggttactaacttgtagctttgcccattttagcatctctacgtcacctttaagaagctctaagacctgcatttccaaaagacatatcgtgttaataacttgtttgatatagtagccatctctaaaatgatgaaactggcaatgaaatggaggattaagaattgactcaccattcccatcgttggcctagtttgagggttatgtcttatacaaagagtggctgctaacgccatcttctccatctggtcactattgttgtcatcttgcaaactcgagtccaatagctgtgaatattctttatcatccagaattggcttcgcctgcaagtgtacatgcatgtctgtttagcaataacaaagaaagcttagacatttcaatgtaagaacattttgccggtagtatccacatacccacataacaagactgtcttgagcctttggagattcgctattaaccggttttcttccagaaagaagttcgaggagtacaacgccgtaagcatagacatctatcttattgttcatcttaccatacataaagtactctggagctaagtagctgcaacaagaaacgtagaacattttcaagattgttatctcctaaacaactttcacgcagcatcaacatatatatattttttttcctcacccaaaggtgcctgcgacatcggagcagattatctgagttgtggattccgacgcccactttgcaagcccaaagtcagaaagctgtgaacaagatttctctttttagtatctcgtgaatttttcctcttcgatgtaaacattggaaactaaaagaaacttacttgtggttcaaaatcatcagacaataatatgttagatgacttaacatctctgtgaataacaggttgtggagcatcgttatgcagatagtccaacgcttcagctattcccacggccaccttatatctctcgttccaacgaaatgcaaccaggtcttttttgttgcctaatctcaatctcaaaccttgattgttagaaccagaacacaagaaaatctgcaagtggctaaatggtcagaggcttaccgtgaagattctcttcaaggcttcctcttgagagataattatatactagtaacaggttattgttttcaaagcaataacctaaaagggaaataacgttcttatggtgtaaggttgtgataatgtcaatctctgccacaaaatccttcaagacacattcggttcgtttgagaattttcactgcaacctctcttccatttggcagataacctctaaaaacccggctgctgcctccttttccgatgaaattatctgaaagtacattgcttttcttatttagacaaaaggaaatgacaagagtcttaagaaagttcaaaacaaagcggtagcttaattatgagaagagaggaacaaaccagcacagaaattggatgtcaccgacacaagttccttatacgtaaaaaactggcaagatgtggagatccttgcctgaagaccctctacattctctggaaatctacctgagctatgatcaagagaacatttcacgatcatagattcatcaggaacaattgcttgcctttcaacgtttgagctagacaacttatcattttcttcagattcagaagaatcaaaaccaatctgctttgtgtctgagcttccaacaacagaattggtcctagcgggcagcttcagcacccactgcacaactggtatctttcggaacgaagaacttctcggagcagaagctaatacatctgaagaagctacacgacaaagcaaaggccaacctggtctaaattcaggcagttcttttaccagcattgtaatgaatggggtcaaatcttctggaaattttgcaggaacaagtgccattgccttgtgcaaatcagcattatcatcttgatcaccattacagctagacgatcgagataaatttccaggcgtaggcaaggaattcatatcacgaaccgagcaattcccaaggcatgcatacactaaagaccgccgaagactctgaccattggaatgatcttcctctgcctcttcctcttccacctcagaatggtttactactttggtattctttctcaatgtgacaggcatctgaaagaaactagacaaagtgttcctacgagcatcacttttacctattacaaaccaatgcccaagaaagaagaagagttcaaaaccctaatacagacacagaaatcatcacatacaaaagaaacttatagagaaaggccaaacctttagagtgatgaatgatcgatgaggaaccatctttctgaaacatgacttttccattgtcaacagccagaacccagcaatcttttgctactttcctagctaagtacttagccacggagacagatgaatgaattgtatggaaacgtctggagatcccaactacaactttggacgcagaacacatttttgcttctttaactagaatctttcgagtagaagaaccccgggataattttagcttcaattccaactattaaaagcaattcaaccatcatcagctagagcagagagaatagagcatgaaagttttccactttaataagcatacctgtttcaatttgcagaaaccttcataaacttcaagaacagaatcaaagtttttaacaatggagacgagagaagagttgtctgctcggtcaacgatctctacacaaatccaataagagagagtaaacatggaaacccatttccaaaaatcgtagctttaatacagagaaacaaaaaagtgttaccattgccgagtacatgaagagcgattacagtatcacccggttcagcaaccttaaccaaagcccaatcaagtagctcattgctcgactcatcgaactttacgcccaccataacagtatggcctcctcctgtaacgacgccgttttccgtcatctctctctctatcactctcttatcttatcacttcccagtttcctcaaactgttttgtctgaatttcaggtgaatacgttgtagtgtgatgattccacgaggcacaaaatcatcgcaacgctcacaaaagtgaatctctattctctctcactctctggttttgcagcttctgagaaagagagaagagtaagaatggaggagcagacatatgagaattttcatttcgttgccatttagataaataaaatacataatttaatatttagtcttcacagtacactctctcattaattatcaacctaacaaataacaaattataaaaaatatatatagatatatcttttcttttttttgctcattttaattaatttaaaaatatttcagatacattcatgaaattaactttatttattccctattgtagattattttatacaaaaaaaaaatatatgcaacacaaacattttcttttatctgaatttatgttacataattaacttaagagattggtaccataccaaacagtagaagaagaaatctacgtattaaatacggggaatatggtccaccgttatcgattaatagaatgttgtgccatgtataaaagtaccataaatgaggttccggcaatgagataacaaattatcataattatgtgattttattcctttgtttttatatgaatcattccttgtccattgtgtatgtattttaataggtagattgacaaatcaaagatgcttattagaaatgtagcccaccaaaaccatacttacttacaaattcaacggttgatgcacataccttatcgttatttttattccatttgactattctttctcacgtcaatcttctttattttatcgtgcaattcattttatcgtgcacatgtttttgtttcttcgactcaattgaattgttttaagatttgatcatttccttctctaccttgttggtttggcatatgtcaaatcgatcgttctgaccattctatcgcaattttcattccataatattgaacacaatcgtgttttacaactattcttaatttcttatatacctaacgaattccatatcaccgaactgttggtgcatttattttgttttacgtgtcattctaagtgattcatgtaatttttcaagtgtggcaataaataaagatatttgtattaaaaaactgaatagggaagttaatgttcggtggtcacagaatgggccaatggaaccaaccacacaacatgactgctctgtcggcgactttgacatttgtaatcccactcacgtgaaaatccaatcgaccgaacatgataccgtacacgtgtcttttcctgatgtcatcattaattacatcaaaaagtttagaataacagactacctgtcgtttttagtagcttcgtataactaaaacgacacgccggctacaagttctaactagtccactcaacaacagtcaacaccatcccaatttctcaaatacaaacactttgttccaatcttgaatatgaaaatatctcatcacaagaataatacaagccatcataatcatcaattgaaaacttgaattaaacacctcaaaacttgcaaataagctagcttctctagtcattgaatgttagtccatcaaactattgcatctacacacttttttctagaggcccatattcatctaataacacatccatctctgctgctagtgcagtacctgaggtcaccaaaattgtataccctccaccatatcatcgatttagatcatctgctctcgttttccatctcaggaagaaagttatgctgacttgtcgtttggtgtctctcgagttcttctagaaccaatttgagacactgaagtctcgtagcttcctgagatgtttctccatgtcttctctagtcttggtccactcttctctttctattaccgttgttgggtcatctctttcaccctgaaagaatggaaatatatagacatagagtgaagatgagtaaagctagatgaaggaatacaaatgactgccagatgaaatggatttggtcatttggaaatggaaaggtaccacgtgtatgatcttaaaggaggttccattatctcgtatcacaagcaagtcatccttcctatccctttttcttcctcccggaactgtcacctgaaacaatctaaaaccttaacatcggaaagaagattgtcttcatagctttgagctatgcacagtatttaaagaactcataactcaagatatctgattcagaactagaggcataaatagcactaatataaaccagcatttcattagtgttatagcatgaaaaatattctataagaatatgtcaaaaaacccaattggctatggtctacggttgaggtttgtgctcagactcggaatgagaactttgttaataatgcttaaataacttggaagataagaattagtcataccagaactctggctctggtgattgactttgtcttggaatcaataacatatatctcttcaagatctagcacaaattctggatcgtttgtccttctgttccggtaatgttttgtcaagaaaacctgcataaaaaataaacacgatgaagacaatttgtatcagaaactgtaactactaaactaagtagtttcgtgttgatctcatccttaatgcttaaaaaacatatttcctggtgtggtttccaaaaatgttgtcaaatcaaaactaagtacatccttgttaatacatgttgctcaagactccctgcatcaaagacctaatggatttaacatcaatgtacatggtccaatatgtaccttggatatctccctctcagatttgtacagtggatctctgggggcatcaataggtggttcagtgacattgtaacatccatagtcactcattgcacatcgaatatactgtacttgtaacatcattaaacaagcccttgttagcaccactcactcattgtaacaacttgcttataaataaaccttacaatgtaaaacatacgcaatcatgaagcagcaaagagtacaaaactggccacagaatgaaaggaaagtgactaaacaaacacccagctgctacattctgactctctaatcatactaaatgctgaccatttacggcactttttgagattatatgttcaaaattccagtctatcagtgtgagtagaagttccaaacaataccaaacgtgtacagctctgtgtagataagatttcttaagttatacaattactaggtagagtgaaggtatatgggttatacaattactaggtagagctctgtgcagataagatttcttaagtgatacaattactaggtagagtggaggtatatgggttcaattagcaattaagcacaatatgaaaagcaattatcttgctgaacaaaaggaagtctcagaacaacgcataggcattacaaaaacagcaaccgataaggataaatgactgaccttttgaggcatcggtgcaagaactctcggaattgagtaaatatctgtatccggaggagtaacatacatctgcagccacccacacaaaacaatttacaattgaagaatgagcacagactctagagaaatcgaagaaatgagcaattagagtcactgggaattcacacacctctctgaaatcataaacatcattatctggatcaggaggttttctgataaagaaatcacagtccattaagctgagtttatgaaactcatcttcgtttatccgataatcaaccaccatatccgaatcccatccttgtgtcgatataaaactcttactctgaacaaaagcgatatctccatcaccaccaccgcctgcagcggctatcgcggcggccaaggggtcatactcgacatcatagtccttcttgttgtcaacttcctctacctcctcatcatccatatcatactcgtccgctccacctccatcagcatcgacgtcatctactttaacgactataccacggccgcgtcgggatttcagtgttaaaggcgcgaaaagaccgtccgttctgaatgacgcaaatagccgctgagagccggagggataaggtggcttcgaggtgaatgagagtagagataaggaaggagaagcggcggaagacgccattggaagcggataaagctcacagagtgttctatctatctgtggattagatatttcgaggaaaaatacaattaaaaaaaaaagaaaaactatataatataataataatcctttttagtgaataaaacaacaaaaataaattaggaaataattaagagcgtcatttttggtatcccgcgcaactttttcttctcagtttcagtttctctacatcgattcatcgattccactctcttgattgctgtttagatcaatccgtctcgaacccaggggttagtatatagtggatcaaactgatccgacccgacccgacccgaattattaatgtcggaagttaatgagatgagtggtggttctattggcggcgaattgttgagagcgtcgccgaaggttttaacggccggtgatcggaaattactcaaggtggagcttcggccaggggatacgacgtatgtttcgtggaagaagcttatgagggatgctggtaaggtcaatggtttatcggcttcggttcccgacccgcctcctaatgctaaccctaaccttgagtttcgaattgcaccggtgagtttgatgttgtaggaattggtaatcggatatatatacttgtaggcatttgtgggtttcgtttgctgttattggagtaagcatttgtcttgtttcggggagttgtaatctttgttagggtttataaaggagctttactaaattcgcagattttcagatttatttgttggggaaaatgcttgaaatcgatatggtataggaggaattctgttgttattgctctctgacgtctgtgactagagttcaataagcaaactccttaaacggagaaagtctacaacctgatatatgatctttggcttcatttctaattgctagctacattaggctaacttcatcgttatcaatgtgaatatgccatcaattatacttgatctggaaaggaatttggttcacatagttgcaatggaaactatagctgtaatagtgaagaatatagagaaagttttattaatatctattagtgcaagagaatgaagcatataatagtggatcttcatttaagatggtataatatgcttgcagcttcctcacaatatattcttcttatgcatacaatatgggtggttaaaatcattttcaacagctgtattttcgtatataatgtaggggcatccagtagagattgaaacgaatgaacaacctcattctaaccgtttcaacgctgttattgagaagatagagaggctctataaggtatgctactctttgttaaaacacttttcttggtaggttgttatatgtttgatttttcacattcacaacatttttgcataccatgcaatagcactgttgcattcacacatctctgaaaagtgtatgcttacttcagagaataaatctcaggggaacgatagcagtgatggggaagagttagacggtgctcctgatgatgatgagtatgacactgaagattcatttatagatgatgctgaactggttggtgttgatatctttcaaatatttttgatagctgagaaatcatatctctgttttactctactccttgcaggatgagtatttcgaagttgataattcaacagttaaacatgatggattttatgtaaatagaggcaagttggagcggatgtgagttatcttcctcttttcattatctgatgtctcttaactctttggtggctttgtcacttttcaatcactcagatcatgtttagaataggcatgtcgtaagtttttgaaataaacatatgaaatcaccttgcttttcagtttttcttcctatttggatatgtgtagtctctccaaatggtaaaatatggttggcagtcttgctactactgccttaactaatgtctgtagggtgtttggtatgggtaaagtccatttttcaacttttctggttaaaaaacgttcatatagatgtaggttttgcactttcgataggatagagtttttctcattttgcctaatcatgctatatttcatttacaagttatctaatccctgattcattttcacaatagggaaccttcaacaacatctaaccagcaacccaaaaaacggcgacgaaaagattcagcaaaaccctgtcgtgatgcagttgacgtatccgataaacacaccaagttgtctataacagctaggaaaaaggtaacatcttttattgcaaatcatactaatttatgtcggagtttgagtctgataactgattatacgaatggggaagtccaggatcaatcaactgctcctgggtcctggaaaacacaggagtcacctttgccttctggagcgcaagatgcaaatacttcagtacctctggatgatgtgaagcattctgatagagcaaatcatcagtctaggaatgatacaagtcacaagtcaagggaaactggatcctctagtgcccttcatcagaaatacagcaacaaaagcttacaccaacaatctacgtccctgctaggaaaatctccccccaatgtctttgcagaggtaacagtagtccgtcagaaagaaaacaatggtatgcatcagctggcaaatgtaacgggaagcagacaatctagtcaagcgtctgtaagtacattccaactgtgtctacaattacataaaatacactcagtaagttggttgcattctaaggtcgtagttttgtttctccagttttcatctcggttctgtgatatttttctggtcaatctttgcttccatgcatttttcttaccacaaagtttacatcagtcttgctttataattctgcaataacctgtctctactcagaaaaaagatggttctaatgtgaagtctaaaacctcaatcctcgagaaagccataagggaactggagaaggtggttgtggaatgtgagttttaatatttttcaagtgtgaccaactagaatagcatttggtgattttcaacttacaagaatttatgatttataagcagcaaggcctcctgctatcactgaaaatcaagaagctgatacctcatcccaggcagtgaagagaagattgcccagggatgttaaattgaaacttgctaaagttgctaggattgcggtactagagcttttccatttgttcttctcatttttttgaaacttgaaacggtatgagaaaaaactaatatgccttttgtggcagcaggcaagccagggaaaacattcaacagagttaatcaaccgtcttatgagcattgttggtcacctaatccagcttaggtctcttaaggtaaaattttctgtctcctgtatcctagtctttctgttactaaagcagacttgttaggactttcgtcaaggtgtttaaatagttagtcttcttcaggacattcatgttccagtgaaaaactcttctgtttcaggtacaagcaaacaaaatatggtttcttactctttgtaatgcttattttgcagaggaacttgaaaatcatgattgatatgggagattctgcaacccgagaaaaggatactaggttcaagcaaatcaacaatgaagttcttgatatgataaaggccaaagtttctttgatggaatcacaggttctctctctctctctctgttctaatcttaagttgcttgataggcatttctttcatccatggcttttctatcttattacattcttggaagtgtcattaacttttatgaaatctggagttctctctgataatggttttccgtagatcaagctcttcattcttttgttttcgatgttccctgtgggtcaatctgcctttgtagcgtattttcctcctattaatatgttgaggcacctgtgacatttatgatatttcttgcactatcattttatgttccataggcaatcaaaccagaaggtgcaacatcagacgattttcaggactcagtagaaaagccatctttgaagaagtttgtcatggatgcggcattggaggataaattgtgtgacctatatgacatatttatcgacgtaattatcatttacctttataatctgccatgccaattctagacatagaattagagtcaaaacggttttgttcctgttttttggtatattagggattggatgaagatcaaggtccacaaacaaaaaagctatatgtcaatgtaagcccttctccattcccgattatttttggtattctggttttttttgttccaagcttatctcatgtcttaaatcaccaattagacctagccaaaagctcaaggtggtttgttagagcttgatgaatattgttttggaattattcatgctccagttggctgaactctggccaaatagattgatggattatcgtgggatcaaacatgcaattttccgggcaaaggagagacgaaaagcattgtatggaaaccttgcgaaagagatggtagttaaagaattttctcagccctttacctctttgcattaaaattttcgcaatttgctttgcttgattagattctgctttgttaaaggatcaaacaaagatgaagaagagtatgaagcagttggtaccaagaacagactgtactgctcagcccaacaccgaattagtggttcagagacaacacagtggggaaaaaaaattgattgttgatccaaatgcaaccagcacttccgtggtcactagtcaaactatggttgacagatcaaatcagcagcagcctgagaagctaaagggaatctcaagctcttgcaatcctacagaggaaacaagagtggtcaagagaaagaacgaggctgtaatggctgagaaacaagtcgttcttgccctgaagaagcccgaacatccacagacacgtgtaatcccagctcctcagaatctgaacatcccacgaacaaccccggacctgaacttgccaagttgacatcacgattgacaaaggagctcttagaaacgccggagacaataacctctggcctcttccttccttgtattttgaggtggcacggcattagtcctggcgatgccgatgcttggtttttttagctacaaagcatggtttataaagttgtctgtattccagtttggctcttattaagttagttactctatttacgtgtcctttttcaaaactctaatgtataaagttatgattttacgggcaactctttacttttgagtaaaaaaaacagagcaggttttagtactgaattttgggtaacgtagttgaaaatttgatttcggacgataatgtaaaattgatgaaatacatcaaaatgactacattaatccttttgacacaatatgaataatcaattttaattaatattattattacttgtaaaacagtataaatatggctcattatttcacagattctcaacactctctcattctccacaatttacgatggcacaccagctccgttttgccgccgcaagagaacccatctcagaagagtatccggcggttgctcttcctcatccacgttgcatctccgtcgcgtttcctcctccgagattcacaccatctccgtcgcctttaactaattactcattcttggccgcattaactcctcaagaactggagatgcgtttgcaaattgcaatggatgtccgtaatgactaataacgaagatcatgttgcggctccgtttgaagagatgatctcgaagttagaccaaagaaagcttcaaacgatggcgtcattgctgacatcagatcccgattacttcttgatgatcgcaagaaacatgaacggctccaaacgcattcagaaacttctcggaaaaacagatgacgtggacgctttattcgccgccgctatcttgcgccgcttcctccacatcatcaccgacaagtacgcgtcgtacgtggtgagacgggggatgacagttttcgataagaagaagaaaaaagcaatgtacgagcacattctccactacgcgagccacatagcgcgtgataaacacggtaacctcgcgctcaacgacatcataaccgacgcggtacagaaacaagctctttgacgtaatcgcgcacaaagctcttgtactaagcaacgatgcttatgggaactttgtgatacaacgcgtgcttaaactgaatgacttgcgtagcaagaacaacatcgtcgttagtctacgtggccactttgttgatctctcgtttcagaaatatggaagctacgttgtggatgtacttttggagacgaaggagtcaatggttgtggtggtggaggagcttatggaatgtgaaggagatatgttgatgaggttggcgaggaatgagtatgggaatttcttggtgtgcaaggcactgagagtcacgcagaaggagatggttaggactgatctgttttggggtttggtgcataagctcaagccttttcacaatctcttgcgttggtctcgtggaaagaacattgcatccatcttaaactcgattcgttagttcgtctcaaaactagttaacattgttcagttattaaaatctctgctgaaagttctcgatttgatgttgttagctaactcttttaaggaggtttaccataacttgtcaaaaacacaaagaaagggagaagagggattgatatacagtatatagaattc

SEQ ID NO: 993 - DNA, 82875 bp, Arabidopsis thaliana
aagcttataacgtgaaggcatttgtatcgtctcttccgccaaaattggaaatggatatcgaagtttgagctaagaatccaatttagggttaactttgccggattctcaagcaatctccgagagagacagtgaggtttcgatggcgaggaacgggattgggagttcaggagggaagaagaatggggctgggcagtttttcttagcgacgctgcttctttggcttgtctccgtcgtgtttgagattgctttcaatctccggacggagcttctctgggtgatttgcggtggatgcttctttcaattgatgaattgggttgttcgttcatggatttctcgtgaccctatatttgttaatacctctgtctcgcttttgcactcaatcatcacctccgcatcaggtccctttctctcttctcttatatttgagttcttactataggattgtgctctgttagtggggaaattttatcataggtgtgcacattggtcgttggtattagtcaattttcctttggtgctgtgttttcacggtttcattgcttaatgtgattcttatttccgattggattagtcttatgattgattgccatagcttgagtataatgcagttctttcttcgttaagccttactgattatgatttttcatcttcaacactgctcttgtgttactacagtggttttcatacttctcaatcaatgcttagccaaaggtttagacgagatgtttgatcattctgagttggttggtgggacttggaaatgggcatatccagctttgtgtttctcatgcggctactttgcatatgaccagtgggatatgcttcagtaccggttatacagcggcttaataccttctattcttgttcaccatctagtcctccttgtttgcttcacattggcactataccgaaatgtaaccatcaactaccttattcttactctcatctgtgaggtacgttccacttttttcttcctgaaaacttgccctggcttttctctgttctttaccgaatctatgctaacattctctagttaaactagactagtttcatatataacaatctagttagatatagactcaactctacaacatctacttgttcgaacaaaagtgacacctctgttattcggatgtgtaaacagatgcattcgatctttctacacgtgaggaagctaaggagaatggcaggaatccgagacagcaacacagcattggtgaaactggagtgggtattaaactggacagcctttgtgtttgcgagatgcattcctcacattctcatcactatcaagctgatcaaagacgcacacaagtttgggaaaggcgtggagttaccactcgctctgtctggtatggcaggaatgaacattcttaatgttggcctcgggttggatctgtttcatgctttcagaagagagagaagccacagaagaaaccaagagaacggcaaccttcacgaccatggagaataatagctaatttagaggcaatccattaccgaatctatggtttgttgttgtatgaatactacccactcatctcttgtttatatctgaggctttgctactaagttctaatagctttcagatttgtatgtatctctctataggaaaactacatgtaaatgttatttcttgatgattacagtcaacagactttttttcttcttgtgtttggggaaacggaaccaaattagaattttggtttgatctttggttgtgatttatatatcataatcattatataaaagttaatcttaatgaactttggtttattcagttaaattttggtataatcttttcaatctattaggaaagtttgtttagtgttgagttgatgaagtttggtccggttcagtttccaccaatgtttggaagaaaaaaaaatgcaagagcatgagaggtcctaccgggagtcgaacccaggtcgctggattcaaagtccagagtgctaaccactacaccatagaacctcaggtgcttgttctgttgcatgtaccagtttagaatctaatccaaaatattgtattttagacacgaccaatgaatagattcaacatcagcagttcagcagcaccacagattgcagttttctttgtctttatctaaccaaacaaaacaaaaatcaatattttacttggtgacaatgcatcatatgagaccatcaaactggtgacagtgaaataacaaagatgaatctcacaagacataaacgttaagaagattacactatgtagcaaaagaaacaagggtgatctttttgctactaacaagtcagaatctgaaaattatggtaagaaatccagcttaacaacagattgattctagctatactccaagaacgaacctattgcttctcctaaatccccaaatttactgagtttctacttcgagtgaaaaccgtggcaaatccgttgcgattcttctcagaactccctcggtttgatgacataattaatgacactgttgttgagtccgaagaagatgaacaaggaggtgaggtcttgttattgctgttctggattgcaagaaactcaagtgatcttccattgattgttttgatgcactcatgaggatcttttcctaacaaagcttccttgttgtgaactgaccttgcagaacctggaatgctagctgtatcgatcaagaattcttctagtgttgcaagagattgtagctgtttcccaagtgatgctattgttttctgacaatctgcaaattttcctgcagctgttgctatgtcttcctgcaatagaatcagcttttagtgaaacaaggattaagaaaaagaaaaaaagactaattggtgatcagaaaaataaaaagctatacctgtttgatctttggttccactttttctctcttgatcattgtcttctcttctatctctcttctaagctcttcttcaaatgtctcacacttttcctttagcccatcagagacaatcctctcctttctcacctctgcttccattctggtcacccgagattcggcttgtgttttcgattcattagctagtttaagctcccttttcatcgcttccaacttcatctcaacttcttgaaaacaaactctagattcttgatattgatctttaattacgtcaaaagatatctttagctcagctttctcagcttccatcttctccaactcatcttccatctcaattttgtcaccaactacagcttcgagttctaagctgaatctcttctctgcttctttacaacaaataacttcactgtcaagctcatccttttctgcttgtagcttctccaactttgtgtcaacttcttgaaaacaaactcttgactcttgatatttatctttgagcacgtcaaaagatgtctttagctcagctttctcagcttccaccctctttaacatatcttccaactccattttgtcaccaacaactgcttcaatctctaagctcaatctcttttccgcttctctacaacatttaacttctctttcaagatcatccttttctgcttgtatcttctccaacttctccattaagctcaattcatatccatccttggagtttttagcctgtgtctcagtaggaagagccacaagacgttccatctcaaggaaatcatccatgagatcaatttcagttgatgaagtagtgccctgaagacttctattgccgcctttttcattcttgatttgatctaactcagaaataaatgctgatgatgcccatgaatcagagcaactcccctcaactctctcccttcctccatctgaatgactatccacagattgattagatgatagcgatgatgatgttttagccaaaatcctaagcttcctgcactcagcttcgagtttcgccaacttctttatgatgtctaaatgctgcttactagcagtttctgctgcttgagtgctcaagtccctctcaatcatcacaatctcaaggtcttcacgctgtgtaagaaactcgcgtctcagcatcatgttttcagatttagcagcttctgcttctttctggagctcaagaactcgcttctctagaccagtgttagcagaatgcaactccttggtgctctcagtcacagctgcttgaatattcttctcttgttcatctctaaactgccttagttgtctcacacactccttaagcgccccatcaagatgacttaccctatcttccaagacaatgttcttatcagccgcatcctcgagcttttgcttcagctcaaccacttcattctcagctttctcccacccttgaaaaaaaaccacaagagaaaatgctttcactataaaatgctaactccagaagcaggatcagaaaaggagtgactaattaccagcaacagcatcttctgcaactttggcatgttgtttcactagctcatctttggaatccataactggttccaatatcaaagtagtaccagtcatcatcaaatcacaaacttaagtaccttaagaagagaaaaataaaacaaaaccaaacaattttttaggaacttttgaaaacatatgtataaaaaaaaagaggtaacttggcttatcagctttcccagattttgctttcaggacactctgacaacaaatcttaagtacttaactatataatggactggaccacaacatttcccagaagaacacaaaactggtaatgattttagcaatcacttcataacatgtcattaaaaaagaactacaacaacatctttctgtttcgtttcgtgtaatgaacaatttgttacagaacattagaaaaaagagttgaggagaaaacaagattaccagactagaaaacagttgcaatatgatatgattcttcaaaaccaagaataaataacatggccaaaaaagcgagaatttctttctttttgtggttgtaattctttacagttttgaaatgtctttttttttcaattttcaaaagaggaagagagggagaagatatctaactttttcttcagcatttaatggaagaatacaaatttgaaaaactttttctagttccatgaaataagtgggctgctgtaagatatctaccacatattatttggtccaagcccattagtttagatatttcaagcccaatgagatatattgcacattttattcatatttcacattaacatatttatttatctgaaaaaagaaaaatacaaatacaaaatgaaagccgaactatgatcaataatattaaatttttacaaataattaccattaaaatgcaatatattgtgatgggtgttgttgctatgtaagtaacaaagcagcgctaagtggataaatattgatacaaactgtaatgaattaagtatcgtctaataaacttttggaaatgttgtaagttgataatagttccaagtatacgtcattttctttagttcaagactttgaaatttgaatctcacatgttgttgtcactcatgaatcacgacctacgtttatacatatagaccatacattatcatttaatatcaaattattgtcgtaaaatctcatattttgtacatatatatactataatgttttaaatataatccccatgtcgttttataccattcgcattttcgtatatgctatagtgtctatatatacgcagaccaatggggcttacgtcctgatcaaggattctttgtcttggtgctatattttttttgtgatacttaaatttaagattttctggatcaatataaatgggactattttatgaaaattttcatttaatttttcaaaatcttttaggttaggtaaaagaaaataggtaggtggtcctcctcctaatcttgaatacgatcatctattaaaatggtcccgtttaaccctacagccaacgctctcgacaaaagaaacaaaacaattacgaaattcatgcaaaacaactattaaaaaaaaattcactcacctattgatatcaaaggtcaaagaaaatttgtcaaacggtggcaaataatcttagattaccataatcaacaaaactactcgacaaaacattcaattacgtactatttctctttgagattcttgactatccaacttcgtttaaacttgtttcgagagctaaaaattacttttaaaacagctggttaagtttcgatttttcaaaagaatgctttaaaaagtttccaaaataaagtagacaaaagtcacaaaacaaacaaatgtctactcgtcctttaattaacctaaaaattaggttttccttcgcatcagtcttaccacattgataaattcttatataattttctttggaggagtcacattgctttcctacttttgattgaacttagacaaactaaagccacttttttctttgagttgtcacctcaaacacaataaagttcaaatatcaaaatcagttgcaaatgaatcaactattgatttcaacattttaaccaatttcgttcgaatcaaaatgaacttggtaaaacttacatacatatgatatgaacaactctccaccataaacggatgtgctatacctatctcgataatttctaatatgaatgtatcacaaaaatctttagatttgggatttggaaataaacaatgtatagaaaagagacaactataagacaatgtgaatggggcaatgctttggggtccattttttatgctcaaatgtttcccactattgtgaacaacctaacatggactcttcttcttgcattataacttgtactactctctttttttctttaggaaataataaaaaggaaattaaggtgagcactaaaagtcatagaaaaaatttcaagaatcccatgcaaaatatattaaagcaactcacttttctagttttcttctatctttaattatacctttttcttttctttcctttgctcaaaactttctcttttgtcatattgaaataatgataaaaggctattttgacgagtcctattttgacccttctctcatcttttaatggctttatcacattcagaccacatgcctacaaagaggtatggtgtagggcaagactcttgtccctttacatacgcttaatacatctacatacaaaaacctaattaattcaataacttaatctatggatagttcaatcgcttttaaatccatgtctcgtcattacttacaaaaaaaccttccacataattcttcttcaaacagaagcatcaatcattgaaaaaacgaccaaaccaaatattaaactaaaaaaaaaaatatgtagaaaaatatttttaaaagggtaatcaaagtaatgaaaaattcaacttttacttttcctggatttttttctggttaaggtcctcaccatccaaccctgtttcctcactttggttccttcgaccttagatggtgccacatggcaagaagacgtggacgatcctgatttgagtttgatgacgtggaatagatgaccaatacgcttgcgccatctaagcgatgacttggcactattgtgctctacgatactggtattgctcgttataggagattgctgcttcttgcatgttgagtttgttgtgttgttgttgttgttgtctacacaaacctttgtcactactgctttcttttcccacgacgcgtttccgtcgttttcgaattttatcgatataaaggaatctgaacaaaacatgaaacttttcaaatttatcataattgatcttgtacaataattaagatattatattaagataaactacattattttaccaactataaagatatagttagccgtatagcacacaactcattatatcaagtagaaacaaaattttcagctggctgtttaaaataatattttattcactcatttttgaatataaaaatatataaaattattgtgtatatgaatgtgtctatatgatccttatttgataaatggctttctattaaaaaattatgaacatatatatcattgaaaatagtgttaaatcccacacacacatattgtgtgggagaggagtttataatcttaatcggaaaaaagaaaatcccgtttgtcaagggaaacaaaaaaaagaggaaaattaccaattagaattagatcttgggtatgtgtataattaaagtgatattcataaaaatactgtaccttcttggcttgtggagacgtcaagatcggaggagggatggaatttccggtgacggagatcgaggcgactgaggagagagctcaaggcgaatatcttagggaggctgatgattggtgaagaggaagagtgtttggttcttgatgatctctgttttgaagctaaaacaagaagcctctcgttcaaacagagaggacaaactccaacatactcttcttttggatggaaataacagtatggtgagctatcatctttgtacatatccatcttcacttccgaagagagctgaaaagagagaaggagaagagggagagagggagatatataagatatgtaacaaagagatgggcttaggtctgaaatagaagctttgtaatatatatatcgaatatctttgtatatattacatattgtttttaagtaattttaacaaaaaaagaattcctagtagataagccttttagttgccggaaaaaaaaaagagagaaaaaaagacaagccttttatttttattttgtcaacaagacaagccttttagttatgattaattatggcgacttaagggatatgacatgattttaattaatatctaatccacaatcctttaaaagctcattttaattaatagattttgtttacatcattgttttcagataatgacataatctagaaaattagtgtatatagtataatagtatataccctagatttagagtttaagttttatgtgtgaagtctaagtatagaacagatctcgaacttactactgttatcatggcctacgagtattcgagatatcataaataaaagtatttataaaaaaaaaattaaaatagtttataaattgttgatcgtcagacaaatacttacatagtttacattgttaattaaccaattcaacgtagcatgttctggtcgtcttactagatatagactcgaacagatagttagagaaggatgattgatcgcttgtggatccgtggcatgtgtaatagatattatttaaaactagtaatcagattttaaaaaaaatactgtgaacagagaatctatatttgtttgttaagaaaaaatcaaattagtttttggacgtgttggccgagaaacatccacttgtagcattcgtaattaaaaagagaatgtatccgaatataagggacccattaatacaagtcatcttcctttggtatgtatgtgtgagtgagtgattttggaggtctctctccatattcgacaatatattcaattctatctcctcactttcacttcaagtttatttctttctaacaacttgatcgaaatttcggcgtatagttgtttacatttagaaacaattgtcaaaatatttaaatcaaatcctcaaactttttgtttttagaaactcaattttcatttgaacttagaattcatcatgtcgacgttcagttcaaaccaacattttttgataattaatgaatagactcatgcatgtgttagtacaaatgattttagttttcattatatttccgtgtgagaattattatgtttcttcataactttaaatggctctcacatccatcacatgggcaattctccattatcaagactatatcgcttcataagcaattctttcttctttgggcgaaacaaaagatcagatttagcttcgggtttgatgaaacttctccctatttgctaatcatctcgaaaattgctcaaattaagtcttctatttgtcttcacaaatttcaaatcacgtgcttataatccaaatgggaattgaataagtaagtaaataaatcatgattaaagcttaggagctagattgacctagtttataaaagttggggtctggatgtgaacataaaaggggtccattttatttgttggtcaaaaactttgagcgttcacgtgatcttaaaaaataaaaagaagaagacaggcttcaatatcaagagctaaagacccaaacacttagagagacattgacaggtgatttgttatgtgtagtgatgagtttcaatgtatcatcactttttcaattagaccaccatcccacatacttcctctacactatatactactactcacaatgatcaaagcttttagtgtatgacttgattaaataacaaatgcttttcaaaccaatttggaccggttccgtcggacgggtccgaacatgacaaattgaagaaaatcacattttaaacaaacttttgtcgctgttcatatatgctgattttattcaaaataagagataagagataattaactttttatattcaaggaaattacctgtctattgatttgtggtccgaatggtttgatcaattgatcagaaagaaaatgttgtaatgttgattaaaaatagttgttttgggtcttggacttatttgacgttttgagaacattttttgctaatatgtacgattatctacaattttgtccaatatacctttttctaaacataacgttatgcctgaatatagatttcaacatattgttgcatagttaattcgataaaaaaaactcttgctcagtccacttcttgatagatcttcacatggccattattcagatccgtgtaattaattatacgatcttatcaattttgaaggaataaaaggagtcctagaaggttatctataaaagaacacacaaagaaaaaggacctttttatataagaaaaagtgaagttaagaacaaaatactaaaaagaatgatcacatgggaggaatggagaatctttgggtaggattcaagtaatgttcccattatgggattttatggtatgggtatcatatttgtgggccacttctctgttttcaatttgagtcttttaccaaaaaaaatctgtaaggtttttttgtaaagtgttttcaatttaagtatttatcatcacatggggaaagacaaggaaacaataggataagagacgacagtagcgatcaagatcctacgattatgtctcttttgagcttagagatcctgtgaccaaatttaattaactgatctggatttggtatcgttacagtattcatatccacataaccatttaatagattttaatccaatagatctatgttgctttacaaagaaatatctgtaataacatgtggttacaaaaaaaccaaaattggaatatggtatatctgtaagctatgatttgttttttcacagtaatattttgtttggacaactaaaaaagtaaagtacaactaaactctacagaatttgttggctatatacagagagaaacaaaaaacatatttaaaacaattgctaaaattgacaacattagtttcactatataaatcacctagactaacccaatattacccaccaaatcatcttcttcacaattataaacaggaaatacaaaacaagttgtaatactcatttgtattaaatcatcactagtatttacgttatgacgactcaaacatgcaatgttttcatgttcgtagctatattgacgatgatgttttctgcacacattgctcaatcaaacagtctaacaatgtgtgtgaaacattgtgcacataaccggtgtttgaaagcggcgaaaaattctactcctgaaatttgtgatgaaacttgcaagaaaatctgcaacaatcaactattcggtggtaaaaaatttattgtacctcctcctaagggaagctcccacttctgtagatggttgcctcagttttgttaattccacgaaaaaaatttcgatgttttattttttgcatgactattttttttgtaaaactttatgcatgactaagttattaatttgtatctacttaattcatcgtccttattaaacaagcgtttatgtgaacaaaaacatttaccctaaaaaaatatttcgatttaactaaactaggtcaactcaaatatatacataaccattggttattagatcttttgagtcttctccaaagacttaataaccatttgtcgcgataacatcgatacatcaagaataaaaatgtgacttgaaatcatcatcaaacaactattacaaaacttattaacaaacaaaacttttattaaaaaaaaaaaaaaaaagaacaactgcaattcaataacacagtatacaatcaaacaatctatcagcaaacagtttggttcgcttagacgcaaaccggtcggttatcgtttggtttcgaagtgaaccgtaaaaaacaaatcaagttgaattaataatgtttagttccttcttctcgtcttccgtcggagttatatctctccgcctctgtctccgtcgagactctgaagtctatatctctctatcactcatcttctccgacgcctctcgttcatccaaaaagctttcctatctgtagatttttcaatccctttttttagcgattcagatctttagattatttttttcccgatcgatttcattgagcatactctgttttcatctcacctgttcaatggaatcaagactccgaatttatctaaagagtcttgatatagtcacttttgtatagttttgtttcaatttcttagattatcaaagtttcaaaaatcgcttttttagatcgaaacattgctctgattgtttctctatattaatgcatcattgtgtgtgtttaacttctctttagaaagaggtctcattgatggaagaagacgaaagacgcgacattgttatgtcaagagcttcttcttgtatgcagtggagtcagtggcaattacttgattcaattttaccaacaggaggatttgctcattcgtttggtctcgaagcagctattcagactcggttagtttcgtctcctgaagatttagaaactcacatcattcatgtgttggataacacagctagcttattgcttccttttgtctactctgctctcaaatctcctgatatagagacatggcataaacttgatggaatacttaacgctactttaactaaccaagtttcttcaaaggcgtcaatgtcacaaggatcagctttgtttcgtatagctgcttcggtttttactgaggtaccaaatcttaagatgattcgtgatgcttctttggggtcaaaaaatgtatgtttccaccatgcaccgatattcgggcttgtatgtggtttactcggcatggattccgagacttctcagagagcgtatctgtttgtaacgctcagagatgttctttctgctgcaacgagattgaacatagttggaccgatgggtgcttcggtgatgcagcatcgcattgccattgttactgaaaccgttttagagaagtggatgaatcgtgaagctggtgaagcatgtcagacttctcctttgctggatgttgtgcaaggttgtcacggttacttgttttctagactgttttgctcttgatgaaaacatatgatataacctcacttaggttacatcgattagtgcatattgttaattgtttgtagtttatgtgcttattgttaatttttcagttggatcatatatgtgtatttgtagacaaatctgtttttatttcgttattactaatcaacaatatatatgtgacctagaatccataaggaaatatgaaatgtgtttcagaaagtcattgcaatcgtctatcaaaacctctcacttccttcactcagaggaccgggtgtcgtggtgtggtggccagtggccctgccgcagagaagagcgttcttcgggatcaagtactcatctctgagggaagtggagggtgtgtaaacacgcatgtaaaactgttgtcccaggtattgtctttcccataactctgatcttaggttccacattcctacattgtccagtgatacgtatatggcagtccatgatcttggatacacctgcacaaattcatccaatgatccaccttttttataacccatactgagcttttatggctaactgtgtgatcaaaatatataaggctttagaggactctcacctgaacagtgcaccgtgagactgcgtcgtttagattgtagacttttctactggcagcactccacttcccaagttccatcctaattgttaccaagtgatcatcagtcaatagtcttgaaaatgtacacaactttcgattttcttaagaactctatcttggtttagagaatgctaccaaattttaccgtgtggatgcaaatatgattgtttaacttacccaaccacgaagaaagagtaaccgtcgaggtgccaggtctggacaatatcttcccaattctcgaaaacaatctccacaaaagctttgtaatcagtttgcataacagatgtgacagggtatattgctccatgtgtgggctgatcaggtatgcttccagggttgtatacaccggcaattttgaagtagtccgctagtttcaaaggtgtgtctgttgggtagaatgatgcactattcaccgcgtatcgttgcttgccattgatatttccagcagagctagcaagtttgattgttcgagtgacttttatcttgccatagtggtatgtaccttgtgggtttggcctaggtccactcgctgcaaggttggtcctataagacacaaacaaacccgctcaaacacggttgtataccactaagtaactaacaaagattgtaattgtcaatgaaagaatgaaacaatacaaaaaaaaaaaaaaaaaaaaaaaaaatgaaacaatacttgatggctcgtgcttggtcaaaagaccagcgcaactgaattggtgcttctggaataggtccagaaacaggtccagcagaattactgtaatgaagaacaccagcggtaataaggatcttcgaggtaaacctactagagaccacaatgtaataatcttttgcaggctggtcagctgttataaggaccgagtaagattgaccgacgtgaacatcaagcgaagagaatggagtctgaatagtgtgtgtcccttcgacctcaactaacttcatcttgtggttttggattcggaagttgagagagttttgcaatccaacatttgatatcctcagtctataagtcttacctacagaaaaactcacatcataacttattaacacttacagtcagagaatcaccaataaacaagacaagaaaggtgaaaaagcaaaacctggttcaatgttgagggtggcgccactaccgcgcccattgatgagaattccatccgggaatggaagctttccaccattatcgagttgtgctctcaagtcctataaggagagattacaatttttaattccaaaattccaacaagcaacaacgtttaagtacagatatacatcatgcatgcagctttccaaatttgttaaaaacacaaacactttgtcccattctctaagtctaacccgacaacaaaatataatcattttatcgccctactatttctttccccttttcttgcgccatacgtaagaggggaatcgtaccttatggttggttttgtaccagtcaccgatgagaacggtgtaatcaccagcgggggctgggaatggaacggggattctggggcggctggagatacgaatagctccaaatccaccggcggctttgtgaaagccgagagaggggaagtagtagaaacttccaatctgatctttaacctgaagagcgtaggtgtagtttttccccggcgggattggacacgtcgtcccgtacactccgtcctggtatgaattcctccagtttcgaatcccgctcctttacaaaaagacatcaaataggaacaatgagtcctctgctaagaatttcatgtataaacgccatgcaaatatatacaccgtctaaatttaaattgaagcattatatatatgatcccaaatttttggttgttatctattacggaacgatttataccatatagatgcaactgacatatatatctaatatatgaatttgaacacataaataaactaaagttatgtgtctttttcttacagccttaactctaagcaagagattacaaaagaaaactagacattcgtttttttgtataaggaaaaggaaacatatataccatgatataaggaaaggttcgtcgagatggttgaatacgttaatgatgagattatcattggtaacagcggcgatgtccggtcctgggaacttcccattgatcaatataccctagtagataaaacggtaaacaaacttaaatccaattaacaaaccaacaaataatttggtgtggatacggttaaagataaatcacctgttgtgcaaccttgagcggagatatgttaccataagttacgtgccattcgaagaatttatacggatcttccgcagcgacgaagctgattagaaaaaatagaccaagtatcatcgccgtggtgttcacgcttttgacctccattttttatgtttgacgaagaggatgtgacaacgtttatatatgtgttgtgtcatgtttgggagaaaaaaatattaatggaaatgcaaagttgaataacatgttcaaagatgcagtcaaacaattttcgttttcttcacacctatattttgttgacttgaaaaatctttgaacatacaatatcataagaagttagttcccaaagtaatactctcaaagacaaacgaaaatccaaaagatactggattttagaagtaatactctcactaggtttcagaattcaccaagtcgtaatattgactaaaaatagtaaaatactaactattcagagacgaagccttttgttcctaacaatttgatactacgcaggataaaagcctacaccgtacagctctttcaagactttcttaaacatgaatcccaaaataaaaatatataaaaaatataaacttagcaaatcattacaagtctatcaatatattccattccactcatatcgctcatctgtggctgctgctggccctgccacacagaagagcgttcttagggatcaagtattcatctctgagagaagtagaggttgtgtaaacacgcatgtagaactgttgtcccaagtattgtctttcccatatctctgatctcatattccacattcctacattgtccagtgctatgtatatggcagtccatgatctcggatacacctacacgaattcgtccaatgaagtacgttttacataaaactagactgaacttttatggccaagtactgatcaaaattaaagtttaaagaacccacacctgaatagtgcaccgtaagattgcgtcgtttagattgtagacttttctactggcaggactccacttcccaagttccattctgatagttagacaaggtgcacacggttggtataacggtcatttaatcaacatctaaaaaatgtacataactttcggttttcctaagaacactttattggttagattgattaccgtgtggattgttattaacaatgcaaacataaatgtttaaggttcaagaatataagtgctaagagaagaaaagacaaaatttggataatatttcttaacttacccaacaacgtagaaagagtaaccgtcgaggtgccagctctggacaatatcttccgaattctcgaaaataacttccacaaaggctctgaaatcagcttgcattacagatgtggtagggaatattgctccatttgtgggctggtcagatatacttccaggcttgtatacaccgtcaattttgaagtaatccactagtttcaaaggggtgtctgctgggtaaaatgatgcactgttcacggcgtatcgttgcttgccttcaatatgtccaagattgttagcaagtctgatcgttcgggtgatgtttatcacaccatagcggtatgaaccttgtgggtttggccttggtccgcttgctgtaaggttggtcctacaagatcatatccatgaaacaaacatgtttgcaccatgaagtgagcaaaccaacaacaagtgaaactacaaagcttttgcttttgatgtaagcctagagcgcaaaaattcaaaaatatcatctatactagtaaatgaactgcttcgaaccccataacttttaagatcttgaaatagttttctccaaccactagcactgatgaaatgcaaatatatatacaaaagtggtaattgtcactaaattgaagaataaaacaatacctgatagctcgagcttggttaaaagaccagcttaacttaattggtccatctggaataggtccagaaacaggtgcaacagaattactgtaatgaagaactccagtagtagtgagtatctttgatgtaaacctactagagacgacaacgtaataatcttttgcaggctgatcggctgttataaggaccgagtaagattgaccaacgtgaacatcaagcgaagagaaaagattctgaatagtgtatctcccttcgacctcaaccaacttcatcgtatggttttggattcggaagttgagggagttctgtaatccaacatttgatatcctcagtctataagtcttacctacagaaaaaatcacgtaataaacttataaatttattctttcaccaaggaccaaacgtggcatgcaaaggggaagggtaatacctggttcaatgttgagagtggcgccactactacgaccatttatgagaattccatctggtaaaggaagttttccaccattatcgagttgtgccttcaagtcctacaaggagagtttacaaagattaatcaaataaaagagtcaacgttacatacttacatacatcatgattcatgcatgattgcctatttgttcaaaatacgaacactttgtctcattctccaaagtcaataatcattttgtcttgttatgtgagatgtaggagaatattaataccttgtggttggttttgtaccagtcgcctactaggagagtgtaatcatcggccggagtggggaaggggacggggatcaatgcacggctggagatacggatacctccgaatccgccggcagctttgtgaaatcctagagaggggaagtagtagaaacttccgatctgatctttaacctgaagagcgtaagtgtagttcttccccggtgggattgggcacatcgttccgtagactccatcctggaacgaatttttccaatttcgaatcccgttccttttcaaagacaaaaaacgagaattgagttacatgtgctaaaaatgtcaaacacatctaatctgattagcaagtaaaccaatctattttattttattttgctaaaaaactaattttataattgtagtattaatgatccaaatttagcgtttaatctgatttcagattggatttagtttgtctttagagtttttaaaattataggtattaacattttaatccaaatctataatgaaacggtttaaattaggttttataatatctttttttttcttatccttatcggtttgatccgtattcggttctaatctttgggtttagataataattaacactgtttggcaggagttttccacaagtcgaccacgaataaattacgggaaaaatgtcgtaaaagtcccaacaacgaagttgttccaaaggcaatcgaagtaagagggagacgagtttaagaagaaaatgaaacagctttttaactttgcatacaaacaaattgaacggtatatcgaaattgtaattgtgtacctttttttatgagagccttaaactttttctccaacaagttttatgtgattgattatcaatttgtcatataatctcacgtccaaaagaaattcccgaaggaaaaggagacataccaagacaaaaggaaaggttcgtcgagatggttgaatacgttaatgatgagattgtcattggtaatagagatgatgtctggtcctggaaacttcccgttaatcaatataccctacttgaaagaagaagggtaagcaaacttaaattgaattaacaaaaccaaacatttggcgaagttcaggttaaagacttaaagatatataaagcgtacctgttgcgcaacaccaagaggagatatgttgccataggttacgtgccattcgaagaatctgtatggatcttcagcgaaggcgaggctgattagaaacaatagagtggttatcatcgccctagtgttcatgcttttgaccttcattttatgattgacaacgaggacatgaaacgttcatatatgtgtgtgctgtgggagaaaaatattgatggattgttttccaaatcggcatgcaaaccgaaataatatgttaagatttggctaattatatgcatataaaacaattttctttttcgaatatgaaactataatatttttgaactattttttttattggtttcaaagaaacaaatctaaatattacgaatattacaatataataggttaactttcccaaaatgataatttcagatctatcgaaatggacacatatcataatgagaatcccaaagatactaattatcagaagtcaatttgaaaaagaaaaacaaatcttctaatttctaggaaactagctacatttcattatacctaatagttcatcattttcaaattatatgtttataaaattttcagacaatataaaatagttacattttctgttttactttttattaatatattcaataatttttattcgtcaagatattaaaacagagactagaatttttaccaaacatctacattgaaaaacataaacaaaacttattatgaaacaaatttaaagttataaacccccaataaaactgtaacaatatcgtttaagaaaataatcgttaaatatataatgttaatgtggtttagtcaggcattatattttaaataatttgtgtaggtaattttgattaggtatttgaatttaatagttttatggaagaaaactggagttgttaaagaaatatgaattttaatttttaaataaagactttcagattggactaatatcattctatttatcattttggacattaaattcttcagtttattgtatgatagctagatacgatttgaccctctccacgtagaaattcactctttccatttttttttttcttttacctcaagttccaccaccgtattgtatcgagccatcaattgaaaggtatgcattctttaccatgtgcacattaccattttcgtaacaaaaacgtggttacgaatttaaagaagaaaatgccactaagatacttgttgtactggctaatatttttaatatgagctattaatgttactatatttatgcatagcaaatagttgtttagatgaccaaaacagtataacacatttataagttgtccagaaatcaatcgatatatttgccaaagaaaaagagacgaaaaaaagttgacctcctaatagttagttacttctaaaatcagctaaaactatatttactatataaatcatccacatcaaccaacattctcaccaaatcatctcgtttcaccaaaaacattacaatttaagatttgcagactcacaatacttacgacatggcagttcaagtgtcaaagaaaatttgtcgtgtattgatgattgtaattttatttgcaatgatgttttcagctcattccaactcgatagatgtgtgtgtcaaaaattgtgtcgtgaaccagtgcatgaaagcatcaaagaaagcgactccagctatatgtgacaacccttgcaagattatatgtgatcctctcaacaacgagcgatacatcgtccctcgaggtaatggtggtcctataaaaaggttctgcagagcatttagctggatttgtagcgcgtaattgatcgacattacaaaaattgtctcctttctttatgcatatattatatatttatgtttttttgtatcattgtattgatccatatttcaagtacttatgtatccttcttccataattttattatacctaatactccctcattttcaaattatatttgtttaaagtttttcagacaaattaaaataattacaattaatttctgtttttctttttattaatatgctatgattttttattcgtgaagacattaaaaaaaactaaatttttaaccaaacatctacattgaaaaacataaccaaaacttattatgaaacaaattttaagttataaacgccaataaagttgaaacaatatagtttaaaaataaaataactaaaatatatgatgttaatgtgatttagttaggcattaagtttccataatttgtatagctaattttttttgaacataatgttaaattatattcaaaaatatatatatatatatatatatatatatatatcatgtttacaacaagtgcaactgttttagaaagaaagctgagaatatagagttgtaaaaaagaattatgtaggcatttgaatttaataattttatggaaaaaactgaagatgttaaacaaatatggattttatttttaaaataaatactttcaatcaaattatattagtcttgaatttatagattttatgaaaaaaaagtttattgtgttttcatggaggaaaatgacgataaagacaatatgaaagaaaattatgtttacaaatgtacatatttacctgggaggagtcatattaaatgatctaatccgccttagtgtattgtatgtatctagaacctcttacttattcataaacaaaagtacatattttccttacgttttcttataaacaaatgtacataatttcctacttatatatatatatatatgtattcaactcaaaaattatagacaaaacaaaaggattacgtattctttttgttcctgatgaatctttcaccatatttaagaaaaactataggtttgaaagaaagaatgtaccccgatgatcgccaaaatatttaaatcacatgaaaaataacaatgtgatttagttaggcattgagtttttaggatacttttggtggaattgttatttttcatttttaaaaaaggaaagatttttagtgtccaatgataaattcaatgatcttaaaaaattatgtacagtgaaaggtaatcattccttgttaacggtatgtattctttaccatgtcatgtgcatattacgattttcgtaacaaaaacgtggtcacgaattttaagaagaaaatgccactaagatatgtgttgtacaggctaatattttaaatatgagcaattagtgttactatatttatgcatagcatgcaaatagttgtttagatgaccaaaacagtataatacatataagttgtccagaaatcaatcgatatatttgccaagaaaaagaaacgaaaacaagttgacctcctaatagttagttacttctaaaatcagctaaaactatttttactatataatcaacacaacattctcaccaaatcatcttgtttcaaaaccacaacaaaaagaaaaaagaaagaaaaaaaacattacaatttaagattttcagactcacaatacttacgacatggcaactcaagtgtcaaagaaaatctgcagtgtattgatgattgtaattttatttgcaatgatgttttcagctcattccaactcgatagatgtgtgtgtcaaaaattgtgtcgtgaaccagtgcatgaaagcatcaaagaaagcgactccagccatatgtgccaacccttgcaagattatatgtgatcctctcaacaacgagcgatacatcgtccctcgaggtaatggtggtcctataaaaaggttctgcagagcatttagctggatttgtaccgcttaattgatccacattacaaaaaatttgtctcctttctctatgcataagttatatatttatgattttttgtatcaatgtatcgatcaatatttcaagtatttatgtatccttcttccataattttttatctttaacaatatttacttgtatacggaaaatttgttaaaaatctaattatttatatttatatatgtaacaactgaaaattggtaacttgtataagcataatttatgctgcataaacatatttgcatttaactacacggaaacttactaaagagaaaaagagaattctcgcatataaaacagaaccgttactctgtttctcttggcgctttaattagggtttcttatttagcttttgcattgccacattcctaaaggtttcatcttttggatccttctctgactcacttcttaaaacccatcaatggaggaaggaagtctgtggcgtcaatggactatgttcagatctctgttatcgattcttcaatggtggggttttaacgttactgttatcatcatgaacaaatggatctttcaggtttaaaaagtctcttacttttatcattaaagacttagcctttcgtttgttttatctgatctgcgtttgaaatttggtacctttccttgtttgcagaaactggatttcaagtttccattatcagtttcatgtgttcatttcatatgttcgtcgattggagcatacattgtgattaaagtcttaaagcttaaacctttgattgtggttgatccagaagataggtggaggaggatttttccaatgtcatttgtgttctgtatcaacattgtgttggggaatattagtcttagatacattcctgtctcttttatgcagactatcaaatctttaactcctgcaacaacaggtttagggtttttttaagattgagaatttttcaaaataaagtgatttttttttattgttctgattggtttttgtgtaatggttttttgagtgcagttgtgttacagtggttggtatggaggaaatattttgattggcgtatttgggcgtcattggtgcctattgttggagggattcttcttacttctattacagaacttagctttaatgtgtttggattctgtgctgctttgtttggatgtttagctacctctacaaagaccattcttgcagaatctcttcttcatggatacaaatttgacaggtcaatgttctgtttcctgaggttttgatcttcagtttcacatgataggtgttgaatgtgtgaaacttacatttggtttcaatgacatgccatgctctcatagtccaatacttgatttgctttttcatatttcatggaactgagtgtttgtgtcctcctcattttcatgtctctctatgtagcataaacacggtatactatatggcgcctttcgcgaccatgattctcgggttacctgcatttttactagaaaggaatggaattttggattggtttgaagcacatccatctccatggtcggctctcataattcttttcaactcaggtgttctagctttctgtcttaacttctccatcttctatgtcattcaatccacaacagcagtcacattcaatgtagctggaaaccttaaggtaaatgaacaaatcccaaaccacataacattaatctttatattctagtttcaataactcagatgtttgatggatggtatgtgatttgcaggttgcagtagctgtgtttgtttcatggatgatatttcgaaacccgatatcaccgatgaatgctgttggctgcggaatcacacttgtgggctgcaccttttacggatatgtaagacacatgctttctcagcaacaacccggaactcctaggactcctcgtaccccaaggaacaagatggaactgatccctcttgttaatgataaactcgagagtaaaatttgaatatcatcggtaagtcactagactattgaacgcacacaaagaagttagatttgatcttgaacatccacaagagagttatagtttaactatatgtttatttttactcaaactagagaagttagagaagtgccattttatttgtttccattgtattaaattatctatcctcatcaaaccaactcagagatgaccacaaagatacttaaagcaggcccatttttgtattcaattatggtagtgctttcacttacctcagctttttaatttttccttccaattttgtttgtgccatagtgccatgttctaacatcagagacttaatacatgacaaaatggtgcaagtttgggaatctttgaaagaagatgaaaatagaaagttaatttgacaatatataagaaatgattattcattttcccgccttgatacatgaaagagcttaagacggtgtttaagggaaacgaatattttagctctcaaaacagctcatcaaattcgttgctttagcttctcaaaagtaaaaaatgggctttttcaagtgggcctcaacttatgttgctgaatttaccgccatatccttcccttacaaaaaatcaattttcaaaaaatcttcatgctacagtagtctgaaaccaggtcaaaggagttaaagagaaaagggcaaaacagtcaaacagcataaaaagatgtctgtgtcttggagatcgcaaagctaccgttttctgttcactctgtacaacacacttgtctccttcttcctctcttctcttctctctctccatttcaaaaagggtgaaacttttcttctctttctagaagaagaaaaccagagatacagagagattctctctctaccaaacccctggaaaaatctccagattcatcttccatagaccaaactaaactctgttcactgtactctctgtcattgtcctgtaagagaaattgaaaaccctaggagattttgaatttcgtaaaaccctaaacacaaaaatgaaaatcccagaaaaacccatcttcttaatcttcgtctctttgatcctagcttcgagcttaaccttcacagcgacagcgaaatcaacaatcgagccttgctcaagcaacgacacttgcaacgctttactcggctacacactctacaccgacctcaaagtctcagaagtcgcatctctcttccaagtagacccaatctctatccttttagctaacgccatcgatatctcttacccagacgtcgaaaaccatatccttccttcgaagctcttcctcaaaatcccaatcacttgctcctgcgtcgacggaatcagaaaatctgtctctacccattacaaaacccgaccttctgacaatctaggatcgattgctgactctgtttacggaggcttggtctctgctgagcagatccaggaagctaactcggtgaatgacccgtcgctgcttgatgttgggactagtcttgttatccccttgccttgtgcttgtttcaatggcaccgacaattctttgccggctgtttatttgtcgtatgttgtgaaggagattgatacattggtcggaatcgcgaggaggtattcgactactattactgatttgatgaatgtgaatgctatgggagctcctgatgttagttctggagatattctcgctgttcctttgtcaggtcaggtctacacaatctttaaaagttgtatcttcagatgtttgtataatgggaagtagtttctattgttagttgttggttgccaaattgggatttttggtgtagctttgtggacttttgattgtttctttcattgctggttgattgttttctgggttttgaatctcattaaggtattgtttttggcattgaatgagtttgagctaccaaaagtttccctctttgtggtatttttttggctgagtttacttttggtaagggagcaattacagattattaatgtttggttctgtatctttaccttctctcagcttgtgcttcaaagttccccagatacgcttcggatttcggattgattgttccaaatggtagctatgctctagctgcaggtcactgtgtgcaatgcagctgtgcgcttgggagccgcaagtaattatatctaagctttattatttgatatgactaatcaaattcatctctgattgcattttgactcacttgtgttgtgtgtgggtgatgtgatgcagtttgtattgtgagcctgcttccctagccgtctcttgctcaagtatgcagtgtagaaacagcaacctcatgctcggtaacatcacggtgcagcagactagcgctggctgtaatgttacaacttgtgattacaacggtatagccaacggcactatcttaaccatgtaagtagaaatacattcactttgtcttctcctcttatcaacatacccctactaatgattcgaaactatttccttctctttcgttttataggctgaccaggtctcttcaacctcgatgtcccggtaagttctttttaaaccatgttatctttgtaagggaaatcatgtgctagaattcggtctcatgtaagtgcaatggtaaaaatgcaggacctcaacaatttgcgccgcttctagctccaccagatactgttcctagggatgtaatgtatgcaccagcaccttcaccagattttgatggtccaggatccatagcatcttcaccaagatcatctatgcttcctggtggtggtatcttgccaggtaatcccgctaatggtccagccggtagcatctcaaccgcctctgcctcctcagttagctacttctttatcacatttctcatctccattgcttctttttcccttgctttgtcatcttgattcaacaacaattgtttattttccgcgcattaaaaactcctatgtgaaattcttgatgagtagaaccaaaacattgttattgatctctttgataatttttgaagttgcatatctcacaaaaacttctagttaaaactacaagatgattgaatcatctcatcatattacatctgatgtgccaaaatctttctgtaaccttggaaagcaaaaaacataaacttaatatacagagaaagaaagacagatttgtgtcttcctccgtcaacagtacataagcatcctcaaatctcaacttgagtagtagtagtagcctttgcctcttgaccttcctttgatttcatctccagttctgcggctaagcctttaccggtatctaccggtttaaccggacttttaatcggaagtcctttgcaatcttcgtcatcatccgtcattcttttgtctttgcctttaccccatacaacagtgtataggcccacgattataaatagcgttccaatcacactgaaaattttagcagataaaattaagtaatagggtccaaaaattttagcagataaaattaagtaaaagagaattataagtaatatgcgattataaaattaagtaatagcagataaaattttagcagctgcattgcacacagtgacctccaaggagtggtggttaccgaagattctttagtcttgcttatctcgaaacctctttcatggagcatttcaccacaagctcgtatgcgttgttagttgcgcgagccgtctatgaccaccgcttggtagaggatttcgcggagctcatctccatggtcgaatccactatggctccaaaagacttttcaaacactacaagattctctattttgagtatctctttggaaaactcatggaacctttatcctacttgtatttgtattatctcatttccaacttgtatgaacctacctcttttgaggctttaagttaatgcaaagtttgtttgacaaaaaaaaaaaagggtccaaaaattttatactaattttagataacaagaataaataccttccgagatgaatgctttcagacaagacaacaacaccaagagcagcagttataacgacacaaagtggattaaatgtcgcaacaaaaactggtcctctttctctcattactactccttgcacgtaatacgccactcccgaacaaatcaccccctaatcaccattagttttgttcattaattaattaatactttgaattatcatcattaatcatataaaattaaatttagttaattgtacttacggagtaagcagcggcgaagagattagagtcgaagccgattttccaagcactcaagtcacgtaccgttaccaatgaaacagcggttccttctaacgttcccattaaacatattaacgtcgttaatgacagctcagctgggtactgcttcagtgtaaacgactgcgttttacataagaagacaaaaccggttaggttttttcttacaaaaggttagttatatgagaaccggaaattgtaaattgattggtactcacttgtaggatgaagaaaccggcccaaccaaaagttcttcccaacagcataagtgttcccggaatccagtgtttgtccatcgctgccgctcctgcaccaccgtgggatcctcctgcaccatcactacctcctcctcctccaccgccgaatcggataaagtcaactattggacccttgtagagagtcatgagaagtgctccggagactgtgatcaccgttcctacaactttggctatgcttcgtaccttcttaaagttcacgctttctaacctgaaatttatattaaaaacccaaaatcgttaattactgtattaaatttacatgtgcatgaacaaatagtaatgttctatagattccatatagacttataatgacatcttaagtaagtggaagtgatgatctcacccagtatattctttcagtgtgtgtataagttaattatttaattagtggtatcatgttccatgaaacatactaactgtgtcgtatgattctattaatcttgttcccacggtttgggaaaagtcaaaaaatattctcaagataagaatcaaagtataatttttttgcataattatcaaacagtaaaacatatattagtagtttcattgattaagttaacaatactaatttaattttctgatggaatcaatataaagcttagagcaaaatcttttttttttcataaagaaaagcataaaatgtttgatgaatttatttataagaataagaaataacttaaacctgaaaataatggccaagacgaaggtgatggccggaaggacattagcagtagcagaagcgaaagttgctgacgtgtaagtcatcccgacgtagtagaggttctgatcaagcaccggcctgtcattttatcgaccctcattaattacttttttaagaaaaactattactactaaaatcttttttattactactaacatattcattaagaacatgttcttatagtttttgtttgtgagtgatatatgagaatagttaacgagtattactcaataaaaccgagcagcgcaatttggaggaatattcggaacgtcatcttgggccttattttcctgcataattaacaataacacaattacttacgttgattaactaagcgcatgtaatctgtagcttgatctatatatgaataacctagctacagtcaatcatgtattttatttctcttgggttttacgttaaacagcaatctatatgagacacacacaaaacaacaaaagcttgtactttcatatatgtatcaggctggttatatgtgttataaatcgagatggataagcaccaacttttagtgatcattaatgaaaaccatacctttcatggaaaagagcaaatggagcgatgacggcagtggcaattgcatggcgataaacggctaggacgtaatggttcatgccatgcttaagagagaccatggtgattatgtacataccggcataaccaaactgcatagatatcattgctaagtatggtttcaaactattcattaaccctctccccattttatctctttctctttctctctaaatttctctttcttggtatttgatgtattcaaatgtacttaattagttatgactgtgaatgattactacaagagagtacttgcttatatagccaaattgtgctgacacaaaaagcaatatatgcgagtgcacatttcaatccattggctatttaagcatcacttttaaaaatataggtttttaattgttgtcaagcacgtatccattatgtgtggctaactatggtcttgttctaggtaatcaaaactggattagatcgtaatttccttggttatattacatacctacttaattaatttatatattggactattggttgtgaacacttgcgtatgtaaaataatgtcgcattttttggattatatattttgcttattaagatggctagattattaatctacgatcactaatgagaatgttctcgtcaatgtggtattaatatattgataacgaatcaaaatgtatcgtaccaataaagagtatataaatgaaatgtaccaatatatatcaaattattatatagacctgtacgtccaagccgaaccatgtatatccgaaaggttttttttttttgtcataagtatatccgaaagttataaccaaatagtttcgaagaatcaaaaagcatgcacttacattatctatttgtatatgtacaatccactcaagacgtcatccatttttttatccactcatcacacttgtcgaatctacaaaaggagaactaattagtatcaacctgaatattcacgatcgaaactattcacctctttgttatctatatgtaatttgttttgttaaaaaattggtatactatatgtgtatatacataaaacattacaaaaaaaaaaaaaaaaaattatgcaccttttatattcatatgagtaatgtacgtgggtgataattatcctttttgcagcatcaacaagttttaaccatgaatatatgttaatctatatatgtgcaaaaaatcacaataaataagtacttgaattgacgggacacatgactctttctttttcaaatagtttattaacatttgccgggacttacgaaatcatttgatgcgcggccgtatgtgaatgatccattgtgtcgtgtagataatggacccaaaaatattgaattttaggcgatgagaaagctgatttaataaatatagtgtataagcgaatgatggttaagtttagtgcatattcttattcatcttgtcgcggaaaatagataggggacattgtggtgatttaaagagtggacaccatctcgtccaaagatttatcaatttctaaacaaatcaataggctaatttcaagttagttcgtaccatatttagagacgaagtagtacttaaaagtggagtgcacaggtgagtataacgtaaccaataagatcacaaagactgtcaataacaatcgatttttttatttgatttggccgaaaaaatgtctttgtaaaacagtttggatgatttcactgattaatttagctggctgttttaattttaattttttttgctatttccctttgaaaaatggtgtgtggaaaattaatgaatatcataagctgaaagaagccgattcttttttaacattgtgtattgatatttcacaaaacaaactgagaacccgaaaatacattttcatttttatcaaatgtatatacattatacattttcatctggatctgtatgacattattttaatttattttttcataatttatgtcatttgtatgctaataactgaatttcgagaatcttaatcttaaattcaaaaaactttgatacttacattttaactattcctacctaccactagtttattaaacaacaaattaattttcctttaactaaaacaaagtaatttccattatcatgttatttaataatacattataacaaaccaccgtcaaaaattctcattgttttccaataattctttgtctgattttaatgttaattactagttactatgtacaacgaaactatattgtattgatttcaagcgacgaagtaaggcacacaaacttatatcaagtagtaaacattcctaattagactatctcatgacaaaatgatgtttgcgaaattttaacattaaaccaaaaaaaaatgatgtttgcataattcatattaactggtaggagtaaactgaaccacgttttgtacggtagtcaagactactttaaacaattatcataagaaaaagaaagaaaaaaaccctaaatttatgaaacaaaaagcaaattaaatgtgatttttgtaatacatttttgttgtgattcgtcccatgaaacgacaagcgtggttaggtccttctaatgcgacgcggctactagtgcttcgtttcgtcatcagtaaggctgcctacttttgttgttccgtttttatattcatattaaattaaagatttgtagatcgtttttaagattggtttcttctatgttcctagaaatattataaacaaacatatacttatgcaaacaaaaaaaaaaacgttagtaatctatataattcagacatcagttttttcctacatgggagatagaaaaaaaaaactcaacttataaccgtcaatctgataatttttgagcaattttatccaacaagtcatcagtaattatctaaaatctttaagtcagttatcaattctgctcacttatcaaccaaaatgcgtatgagtgcttggttaagtttgagattagttcacatatacatatatatgacaaattagtatatatatatatatatatatatatagaagaagaaaaaatgaagaaagaaacacaacgtataaaggtactacattatatgttctcttgtttagcctaattaagcatggcatcaatcttccacgttactggatgctgcttcttattatgttccctctcaatcgacgaaattttattcgaacatatcttacctatcgttggatgcgacttatgattacacctaaatatatatatatacgggcatcgactagcatttcacatttattctatagtttgattttgcatgcatgtgcgttttaccatttcaggagtttatataatgatgtacctttttcaatttttgtggagaaatatcacacattgaaaatatggaagaaacttgagtagtatgtaaagcacatgacgttgaacctcatagaacttaacaattctcatagcttccggcctagatttaaacccttcaaaaattttcttgtacaacaaaacttctactaatatatatcctttaggaatgaaaaaataattaatgagaattgaaaaggatacgtacttgcaaaatttccatattcttttcataattttttcttgcagaattaagtaaaatccttgcataatttgttctgttcttattatttacttgcatatatttgaaatggttatattcttttccaaataatattttgcaagaatataaccctgtccaaagatgatttctctaagttaaactccaagcctgaaacatgttaactaaccagacatagaagcttccgagtcatcaaaaaagataagagcatcatcaacaaaaataaattatgcaagtatgagaactaaaaatatacgctttgaaatatatgcaagtaaagaataagaaaataacaaattatgcaaggatttttcttgctatgaaaattggaaaggaggtatagagactaattactttagtaattcattaatttctgcgaatctttagatacttaattcacacgctttgtgagtttgcgtcacaaacaacgatgacgtggtatgaaacgcattaccagccaattggatttttgttcttttccattgggagtggaatcttataagatagtattaacagtttaacataatcagagaacgagtaacttacatttctacggggtttaaagttatattaaacattctaagctagaatatttatctttataaataaattttgatgatgcattgcatctatcctctgttgttagacttggggagcttgccatgtacgtacgtagttgatcaaacacttcagaacatttctcaccatcaagcctaacctcacgccacatgaatatgtcagactttttttgttttagatgtgtctcgtttcaatcttgaatgctatggtttttattttttttcatttctgataattttttcgttatttttttaaaaagtagcatgtattttgttgattcgttcgcttgatgataaattttactttgccaaaaattaataatgcataggcgtagaaggaaaaatcaatgtaaaaagagattacaaaaaaaaaaaagagtgaatgtaaaattatatttacaaaaaaaaaatcttcttccgatgaatgcattattctttcaaaagtttttagaaaaagaaatagagattatgaaacagaattaagcttgtgattctaactatatccgaaggccatcgtctccatatgattgcggggctgtgttcacaagtgacagaatttcatatgatggaggtggaaagtggttcgcagacctctttttggcatgatagatggtgcgggcttggtcgacttcatgaggttattggagagaggggttttattgatatatgaatctcaaaagagacacaatgtaccgtgggaacaagtgagaaagtgattaatggtaatggtaatggtaagtgtgaggttcgtacgatgacgtacgagagaagtaagagattaagcaaaagtgaaaggactttagttggattcatgcttggacttccatcttccataacttgggctaatggattacacctcttcatttttaaaaactaatattcatattccaacttttattatttctcctcgcattaactttacatatttgtgctattaaagtgagatccattgtataggtaagcacgatgacgatatcagcaaaacaacagtagaattacgattcagaaagagagaaaaacatcaaaaatataaatattttaccgtaactaggcaatttaaaattcacttataaatgttttggacaaaatgttgtcaataaactagtggagaatgcttagatgacctaaccaaatgtatttggttcttcttccattatgaatacacacacatattataatatgttggatctgatgtctaactgttcccacacatgatagaaaaggacataacatacaataagcttgtctacatgataaatcagatttgtcttctttgcaagaattacgccacgcaattttagtttactttaatcttgatttattagcaccattaatcataaataaacatgttaactaacattcatatttctgataacaaaattaccccaaaatgcctgtgaaagaaagaacttttggtacattgtcacattacctgtatttttttttttaactccaaaagagatcaatcaaaacacaaaagtgactgtgcacaaactcaatgatctctaactatcgacagtagtaaagtttcacagaaaatataaatgaaaacgcgttcttcgattttttaaccaattcaactctacaatcttgagcttatccctcttttcaaggtagggatgtgtgatgttactaatatatagtaagagtatccttcaggccaagtttctagataagtttcttcttgtggaaatacctcttcagatacagtatctgtgaacccacaaccacaacgcaaaccccgagtgacattatactgaaccaagccactcttgagttggttgtttcactcacttctcgcatctccgcttccctgcatccaaagttttcgttttatcactatgttcttgtttcccgaagttcaatagataccacttaatcgcagcaaggcgaaagaaacacacctgtcttttatatagtttaagttctcacgaatcgacagcaccaacccttcaagtctcctcaactgaagctcaacaccctgcagatacacattcacaagagttgagttttcacatcagagagggaaagatgtttacatagaagtgaaaagaagacttgcctcgatcttttcctttttagcaacagagtcccagtctttagctgcaatacccatcttccaatcaaccccaagggttataggattggctaagtgatgactggaatcaatccagaaacaagccaagtagttcccagcttcttgagttgtgaatgcaaactgaccatgtgttacattttcttggtgatgaagattgttcccatacggagatgttacctatccaaaccaaatcacagaaaattcaagacaccatacaaaaatcttatgacaatgattagctttaagaacatccaaaccaaatctgcaaatataaagccacattaacatgcaacaacaaatctgcatctttaaaaaatttcaaaactttatacatatcaatgaatatgatccgtaacaagtcaccgacagagaattcacagtttgatgattaaaccacataacaaaaccattaaaaccctaaaaatcgaagtaaagacgcgcaaaattgaaccaatcaatctcctacaaaagattcaattttgaagcgattcaattccaagcacaataggaaccttaccttagaagaaacagcaggtgtattttcaggattatgctcatcgacgacatagtaatcagccaaaacgacgacgttgctctgtatctcctcggagacacacttcgttccacccgtcgtcggaatcgtcaaccatatagcttcgccgtaattaaccgtcagaaagaacaagactaccgtcagaaacagagaaccatgagcaattctgttaatagccatcggagaacaacgatggtcttcttctcctttttttttttttggtctcaagtccaagccaaggaaggtcaaagtccaaaaaaaccaaacacaaacgaagacaagagagactccacgcgcgcgtgtgagagtgtgggaggttttaagagcattttgatgggtttcggtgacttgtttcaacgtaagatgagccaatcagattctgaggaattgtctacgtggcgtgtcttttaaggaggtggcgcgtcattatgttgacctttacctgcttaatgatttagagggttccgtttaccatttttgttattttcctctcaaagtggattttgcatttaattttaccatcgtctatagtttgtagagtgaagaatttgagccaaagattacaacttacaagtataaacattgaatgagaaattattgaaccaagaggcttattgaattgaaaacaaattattgggtttattttgttttgttatcatttaaatcacaaattgtgtataacaataccctgctattagataaatcatttcataaaacacatttttgtgttatactaagttagtctacaactttatataacatttttgtggcatattaatagatgaattaatatttgctgatttttgtaaatgcaaacataaaacaaaagaaggaattaaaatatttcgtattgaaataaatgggcccccattacaaaatgactttcaaatgggccaacgagtatttatatggctgatgatatataatctttgggcttgttatttgtcatcttcccataaggaattgttacctttacttcttttcttttttgttttccttttgatagatctttacttgtttcttctgctccctcctgtttgtataactaactatttacagagaattttgttaaatacttcgagaacatgcaaagagaagatgtatatatatatttctgctagagtgaacaaatatgtgatcggggtttatagcttagtcatttttcgtctcatagtcatatataaatctaattcataaaaatattgtgaattatgtaaacggaaaataaattatatatgaatttataaaccaaaacaaatatgtatggggtctatcatattttatgtccccacatcatttttaacattttcaaaaccgactaaatcatagatctgtgagatatacaaaagaaaaggatttggtggttgaacctagttcactggatccattatacatggttgaaccttcaacgtacatctttaatgaaaaaaaatatgaaaaacaaaaaacattcaacgtatactatttcatcttcctcgaaatttccttgccatgcgctgtagtattgtaatcctccaaatttgttacgataaatagtacaccaataataaatgttgaaactattgaggttgagattgtatcgtggtgatattgttgagtcatttgttgggaactggtacggagagagtacggtaccaccaattaatacatacagtttattggattttccatttatcaagaaagatccattttgttttaatttttgtttgtttgtttgtttgttaaagcaaatatgtttgtactgcaatgtttgtttacttgccttagcctttactttaggcttgcatgtctgaatatgtctattcatgtgtaagtgaaacatcttgacaatcctaaaacctatcgtaaaatataatgaacatggtcaatccactcgacatcaattagtcataaaagcctataaaattgatgcatttctagtttagtgtatcattttcaaaattcaaaagaggagattacattcgagtaagtgtcaaatatgaaataagctacgtgttaaaactcaaaagttaaaattgaaagaagccacgatcgagatgcttcttctcgtcatgcaaacgcatgttttggctggaaagctgacaaaatccgcccatattctttctcgctctctttatcgaactgacatcttggagagttttgcttaagaccaaagtgtgaaatctaaagacgaagacaacaaattaaagtaccatatcccatgattaatcttaagctttgtgagaaagtcaaggctgtccacaaagaacatgtcatctcccatcttttcttacatacgatcatgtgctcgttgcgtgtcctaaagttttatatgctttatttatttatttttatattttccccctttttcaattgtttatactttatatcaatctttagcatatgttcgtataaattatgttggtatatattaaagttacgtaagacaaaatttattagaattcgaaatcctaactcgacaaaacgagttaaattgagctttatttgattttctatattctaaaatagaatgactcaaagacaaattgtgtatatatgtatatatataattttaataacacaagttgtatgtggagaaaacgatgtaattataaatttggatcatattttcgatatagtatgaatttttttttaattttttttaaagattacaaaatttaggaagataaatacacgagtgagtctgacgagagaaaacgcggtttggatttgggtagcaaaagagacagagtgagaacagctgtaatttgaagtcactcatcaatttagcatcatcaccttctcccacactcttctgacttcactcttcgctattttcatttactatttcctattgacattttcttcgtaagtattccatattactaacaaaattcatgttgtttaatgatgtaagaaaacaagatgctaaaaggcgatatcgttcttcttgaatagcatttgtatgtattatgtaacatgttacgttatggtgtataattaaagattaccaaatgattataatactatcaaacgtatttatactaattactgttttgtacgacatctccattttgttaacgcgtaagttactcacaattcacaaagcgatgagccacgatgttaaaatgttaaattcaatagcaagttgtcatatagctaggtttaaaaccagatttttctttagactttgatgatacacgtaacaaatctaataaaaagattagatggatcaatattctagtaataaaaaatattacaagtaataacattttcgtgcacgtatgtttgcaggttttacagtcactttttcataaaaatatataaacatgatacagtatatatatatttggtgtataactacaaatatacacactagtttaatcggtaaagaataaacatagacaaccaataattaaaccataaatggggccactttcttggaaagttcgtattacgagttaacgcgttaaaacgcagctgtaattcgtaatctcctgatagtgatgataggtacgtatatagtcaatatataaaagaaaattgatatctcacaacctaaaaaaatactataggatattttagcatcactcctcgatttgctcatcaactggcgtccgtgtgtataatatatatactctcctggttaattaattcctagcaaaattgactccaatcggtaatttattttagtttgatagtttagttcactcggtttatattttggacaaattctagaaagaatctaacacgttaataaacttggagagaataaatctaattgtaaaatggacccttgtgaaattaatgttttttgtcatttaaattgtagaataaaaaaatatacatttttctttgtaacaagaacatgcaattgataaaaatttacgtgatcgcataattaattgttgttttgtggttcctcaataaaaaaagccaatcaaaatcattatacgtttatgtatttttcctctaaataccaagaatattagttatacatgatttattttttataagaaaatgcaaaaatagcaaaaggttaagatgaggccatgttcaggttcattgttcgaacttcgaacaattgggcaaagccttaacatgcatccatattcgaataaataactaagctccaaagatttatgttcactagtttctttttttttctttttttaatttgaatggaacaaaaatgtattaatgccaattgctaggataaaggaaaaattagaagaaaaacacctgtcatgcaccacaatgtcacattcatacacaagaaaccatactatatttcatttgaccctattttagatttatatcaataaataatatttcatctcttcctctcccatacccctcccaaatcaatccatctctatatataatcttctcagctcacactaatcctcatcaaaaaatctctatccatccacaacaacaacaaaaactcaagaacaatatctccacttgatcactaccacattgtccaatcactctacaaagcctgtacgtacacaacaacattaccatggtgaaacaagaacgcaagatccaaaccagcagcacaaaaaaggaaatgcctttgtcatcatcaccatcttcttcttcttcttcatcttcttcctcgtcttcgtcttcgtgtaagaacaagaacaagaagagtaagattaagaagtacaaaggagtgaggatgagaagttggggatcatgggtctctgagattagggcaccaaatcaaaagacaaggatttggttaggttcttactcaacagctgaagcagctgctagagcttacgatgttgcactcttatgtctcaaaggccctcaagccaatctcaacttccctacttcttcttcttctcatcatcttcttgataatctcttagatgaaaatacccttttgtcccccaaatccatccaaagagtagctgctcaagctgccaactcatttaaccattttgcccctacttcatcagccgtctcgtcaccgtccgatcatgatcatcaccatgatgatgggatgcaatctttgatgggatcttttgtggacaatcatgtgtctttgatggattcaacatcttcatggtatgatgatcataatgggatgttcttgtttgataatggagctccattcaattactctcctcaactaaactcgacgacgatgctcgatgaatacttctacgaagatgctgacattccgctttggagtttcaattaatccgacggtccataatacatactttaattagttttctaaatcattttttaaattcttttttatatatgtaacatatatttaccctcgtcgtaattattcatttccaagttgtttgttgcttggagagaattgacgacggatacgattatataatataattgtaagtttttatatgtagcaaactcggtacaattcggatttaatagggatctaggaagttcacatgaacaagcgactcttttttttgtcacttctttgactttttcatgtgaggtttcttttcatcaattttttttaacaatgtgtgaaaatatttctgtattgtaatgatatatttcgcacaatagttttgtgaaataaatctggcgctatatatgattttgtatcattttctccaactcgtttacttgtatatatgtgccaagttgctaccaatatgtgatgattttgcaatccaacacattatctttgttttttattcttattttggtaagtagtaaagccgatgatgtatataattgacaatcatttttttttcactaattgacaaccatcattggttagaagttagaacacatcattgacattgacattggtaaagttcttaagatgaatatatatgtaaattaatgtataattaaatctgaactactttttcccgaggtctcttcataattcataatttgtttgattaaatactattatgtactatacttttgcacaaaaattaaagtatagtactatactcagaggaatcttactgtttcatgtgccgtggaaaagtttggtatagcaaataatgcacacattgcttggggacaaagttcatatctttgaaacttggaacttaaaaaaccatttgttttgatttaatttattttccttttttgggaaagaatcccatggagacagaactgcagtcaagggatataaataactgcaatagagttagagttatgtaggattcactaatgagtactgtaaactgatttttctattcatattcagagtactctaactcattcaaaccatgaaacttacttgaaaccatcaccaaaaggtaggagatctctagcttgctttattttgtagctttggttctatcaatagatcaatgtatacaagattgtttaacgaatatatgatttaacatgtaagagagtgaccgcaaattgtgatattagtcaaattatgttcacaaccttttacaaacagatgccatgtggaaaaagagtagaccacaaaaaaaaaattgtagtgtagatgagagatgtggttgacgtagttgattgtctaaggccatcaaaaccatatacttttgttccaccttttaactgagtgatgattagagtgcacacaaaacgttttactctgattaaaaagtacaatattgtgacttgtgagtttgtaactgtcctcttacgaccagagccatcctccactctagaagtgaaaactaataagcttgctcactcggtcaaacataattgtttcctagtgtgtgaacgtatacggttcaatgctatttgttggctggcttagatgaacttggtctaatagttaagtattgtgatcatatcctatgaatctacatcatactaacaccgcatatataaaaagaaaaaatgatgtgatcagtgatcatgtgagtaaagtatgatatattggtcttagtgtgacaaaaatcttggagacgttatcgtctgtataatagaaaacaggacatagttaaatggtttgttcacaattttgaggtcccaactaaacataagatgggaccccatacttaagaagataaagtgatttgataagacattcatatgattcatatcatatcacatcaacattaaatctgattgtgtagagtgttatagcatttcttttgtcaaagggaacatctaaacttcaatatttgggataaaaccttgaagtcacatgacatgtctcctgctcaacgctcttattttagtcgtttctatttctttagtgatttaggattcggcgtccatgggctttggttttggggccattatcgtttattttttgtctagctcattatcgattctggcccatccattgctaaataaaaaaagaacagaaaaaatcattaaaagttgctgtctgctgtaagttctttttctagaatttctttcgttgcaaatagtgaaatgcattgggcttcaaaaagaggctcggcataattcggttcatttaaggctttataaagtggattgaactctttaagttcaatttctgaatataagaagcaatggtgattgatggctacagtgaaatatgcaatttttaataagttcattggattaaaagaattttagtagacgatgatgtcaagttaagaaaaaaggttttagtaaataggaaaacttgtaatggattttcttccttcttctaagtggtagattccaaactgacaacctattgatccccaaaaattttgtggaagagtcttgtttgctcgccaaaaaaaaaagccctaataatctcccttgacaaaatgtgtggaagaatctatatatttttgatatagatttactcatttacaagccaaatgaaaaaaaaaaaagtttacaataaaaatgaataattatgggcatgctttagataataatataagattaaatagaagtcaatatagtccacaagattaggtttagttacttttttgcaccactgccaaaaagttgtatccgatcgtgtccttgcacgacatatattttctacttgtacttatcttgactctgaaaattgaaaaatattggcggcggtgacagagttatcatttacttgtcatgttggataaaagaatccaattactactagcattttaattttatcataggcccagataacataagttttggtcgctttcaaatatcagtagcctaccaaacatgtgacgccaagctttacaggccaaacactttcttctgtttcttgtatcggagaagagaagagagacttttgtagcaaagaattgtttgctagtaaactttttctatacatgtataattgagttaagagttaaggtcatatgtgctttgtcttttagtctttttcccaatcccatatggccatatatacaattatgtacctcaagaaagttttctttataagatttaaaataaaggtatctctacaatctctttaacatgtgtgatcggatgttaaatcataatgttaaataaaactgtaaacgtttggctgaaaaaagaaagtttaattatcctagttaaggaaatatgtattgtttgcaataatttctcctagttagcattctaaatgtggatgtagtaataaaaacttaattaggtacaaattatgttgaaaaagtcattttaaaacaattacacttttaatcataaaggtaaacacttacagtttgttagtatagttgttgaagactatattggaacccacaatatatgtggagaaagatggttgattaaattgtaagctaacgattgtattattaacattctactttgaaaatgccatgggaagattagccaaccaattgggcaattggcaatggcccatagccaattgacaaactccaaatttaaggacatcaaattgaaaaggcaacttcaatttatttcattttagtaatgcaagttgtaattatgttgtctgcttgcatgtttgtagtaacctgcttaaagttatgagatcaatgctccaatataaaaataaaagaacgaaagagataaatttcaatattatttgtaagcgttatgattgcatatttgcattggagacgtttaattgtccgttcattcttttgaattcaaatagtggaaagttcaagcacttaggaaaatatcaggtattattgtatactagtattaatttgtgtcaacataatattaataacattaacatggaggattaattatatttttgttaatcactcccgcatgattttttagtgatgtagcctaagatcatctccaatcctattctttttttttactctaaattctcttatagaataatattttctccaaccttattctatatgttactccaaaatataataaatgataggattattctaaatatatagcaattctgtttgttttttacactaactctattttaaaagtaagaaataaagaaatacattagaaaggatatttttgagttacactatttttgagtcaaaaatagaaaaatacactggagatgatcaagattataagtttgttgccccaaaaaaatagatcatttctattaatttgtcttaacatgcaaagtcgattattttttactttctatctcatttctcctcacaaatattagcatatatgttcccaagagtctccaactttttttctttctccaacgttaatatattcaccaagctcaactcatatttatttttacccaaaaaaaggggaaaaaatcacatttacgtatagtaatgtatcttcttgtactctaccagttaatctactcgaatatattttgatgactaatcctaaaaacataagagcaacttggaagacgtacattgaccaaggtattattaaattttgtcagcaaatggcacccccattggaccaacaatttcagcaatccccgcattcgtttaatttagttttgtaaaaataagtcttaaactaaatatatatatatacacaacaattaatttcaaatatattttaaaacgaagaagacgtaacaatgattattcgagtttattatgcaactatgtacatttaaatatatttcgcaatcaaagaggcagagacatgcatgccgaaacaagcattcctcttctgacttccctcgtccacaatttttttttttttaatactaaggtgttacattatctatatcctaattaatactagcaaataattaatggtataggtcaatgttttgattaaagaaacattagggtctaattctatagatcaattattgaccattcgaggaattaaattatattccgtgcatttatatttgttagaagtaaactaaattttcttgttttcatttttagtaagaaaatcttagtcctagtttcagttttgtctcaaaagctttagtcgtatagttagaagttcaatcttataaaaaaaaacaattatatatgatatagttaaagttcaatatttatcgaaagaataagtataatagatgcattgagataattgagggcacagtactttatattttatgggaaatctgtaaaccagtaattctcttctgcaggataattaatttgtggagtggttagacttccaagtttgaaagtcaacactttagtcaaagtgctgtcagaaaaaattacatgcgggctgtaagaaataatatacttacaaggatacagaaattgtaagataaaatattttgaaaatactacataatttcaataaaattttatccataatttcagtaaaattttatgagtaaatttttagaaacaaataataatatatgtttaaatatagcataaacatatgaattcttataaatgttattgaaattgtaaatattgaatattaaacatgaaaaagttaagtcaactgaaagataataacctttgttgaattatttttgctacaggttacgtctagtggtttatttgaaggtaattacttttttcgtaccgaatatatcttctcaactcaacccactcggatgctacgttgcactatatgtactagtgttgtattttctattttaaacgttttggaataagcttaaaaacagcatcgtattgaaaatattatcaaaacactttattttagtttacaatatatgaattccgtgattatttttgggaaatatattagaaattttgctctaattttaagctttgttttggattatattgatgggaagggagaccaatccagcaagaaaccatgtgataagtggcgtatagtttataaaaatataagaaaacgaaaggataaggaaatatataaaatttgatctaaatcccaaatgatatcctccatagatggtgatcgatagagacacatgggcttcttcaaacatttcttttatgcgacgaaacatgtatgcatcggatgtgttcctgtcgtaaccaaacaattttatttttgtagttaaataaatatgattgattgagttttaaaaatcttatccatattccatattaagaaaactgagtaacacattgctgtcacctagaattcaaaatttgaagtaacaaatagaaaatgatttcaaatttgccttttctagtgaaccaattcaaaacgaaacatagagatcgacgcccattcggaaactcgagtgttttgatacctaaaattactaaaactatatagattacatttcttttgttcttaaactatatagattacatattgtttgaaaagtcataaaacatccacaaaattatgtcagcttctgatatattcaaacaaaacatagcaaaaagtttatatttccaaactgaatacagtttcatgtaaataaataaactgctaactctgataagattattgatgttgcaaaagaattggaacatctagacaaaataacaagaatttcgctaaatagttctttaaaatccagaataaaaaatagaattattgtatctaaaaacaattagcagagaccataaataagttgcattaatgcaattgatattttctggatcacgacattggatgtttgtttaaaacaataattttgggaaatcacaatggttatagcgccgaacaaagaatcttcttcatgcttctcccaaattttttgtttttcttgggcaaccaaaactactatagtattacgaataaacaatttgccattttattgtttaataactaaagggaatcgatattgtcagtgatccagatcaagaatcataatatcaatcaaaatcacttgttcccaaagattcgatcaaaaccaaaataagctccatttcaagccgttgattttacaacaaaaacaaagcttcttcttcaactatttacagttttgttacattagtaaaaagatcgaaaattaactctctgttacaaacctctgaaacaaactttcgattcagggttacagagaaaccggtaaaaaaaaagattttttacattttccttttttcaactttgacaaaatttaccatccatttgattctgaacggctctcacagcagccactcttgcagccgtagcagccttattagctgcagccacagctcggctcacctgctcatctactcgtctccgattcactgccttattcgctgtttctcgagccgcctgcaatattttcaagttgaagttttccactttttggcaattccaattccaacaactcgagtttaaacaaatattacctgaacagctcttgaaactggctcactcgtaagaggaagtgaagtcacaagaacccctgaatcccattcaccagatttagcatcaccatttctaaacgagtaagcaccaaacccttgcttacgaccttcatgccatgctccttcataacagtgtccattagcaaatcgatacacaccaaacccatgaatcttgtctccaaagtactctcctgcatacttatctccatttctgacacaaacacaacacacgcaaaatcagactatataatagaaaacaacttttaaaatcatgattcaagacagatacatacctgaaatggtaagaaccaagaccatgcttaacaccaaatctagactcaccaaggtaagagctaccatcagaacaagattgaacaccaaaaccatggctttgaccattaaaccactcaccagcataacaatcaccagtgtagaatctataaacaccaaaaccatgtctaagaccttgcctatattgacctttatatctacttcctctagcccaactctcaatcccatgaccatcatatctcccatctagccaatctccttcataacgtcctctcacgaaatagtaatacacaccacttccgttacacttccctttgttaaattcaccttcgtagaaatctccattactgtagaattgaactccttctttaacgaatctcttgattaccttcttctccggttttgaatcgtctccgatgtaccattgtaccggttttgatttcgagtctctgttttggaaccctaagtttttgattgcgattacggtttggtttagtagagagatgttcttggaagcgaagaagagagctacagcgacgaagattaaagctagtaaaagattctccgatgtgagaatctcatcggtttgtgagaagacgacgaagaagaagaacgatgagagacttaggaaagagagagataccattgtgaaagctaaaccgggattgattctggttaaaccggttttaggatttggtgaaccgaatggtttaggtggttttcttctctgtttctcttctttctctccggcttctagatcttgctcgccttcgacgattgaagataagctttgatatgacgaacggagattcgacgatgaccggagtaacgacgactgtgtcctcgttagcttcgcctgtttttccatttcttcgtaacgataaaaaaacgaaaacagtttcttcgatcacggaggtgagattccggtcataaccaatttctccggcgagagtacactaaccgctgcttcaccaccgtaactagcatcacgcacgacttcgacaaagagagagagagagacagagagagatttgtgatattagtgtaacagtgacttttcgctttcttcgttaatttcccggtaccggagaaagtttaacggcgaagctcacttaaagagagagagaagagagaaataggagaagagaaattagaccgggtttgggtttaatttaaagagagaaagagataaaattagatttaataaagaccgttggattaaaatctgacggttgattaagtgaagagaagaaggagagccgttggatggagaggaagagaggggtcaccggtgatgacgggaatatattggtcgacggatccaaacatgaacggttttttagctttactgtttgtaaagctggcacgtgccactacattacacagtcacagataaatattcatttacgtttttagccttttttgtgggacaatgacataagtcttttttttttttttcttattactaaattgatttacagaaaacaataaaatctctgcattttggcagagtttctatttatttttgtctctcaatattaaactgatttggacatcaaaagaaatttacaaatttgtttttttcacataagatttttttcttattcaaatcggatgaggtttatctaaattaaacattatttataaacaaagattatgccaccctatgccagcatcacatttcagattttgattagaataacttagaaataaattatattttccaaacttaatttttcttattttgtttaatttaaatttaatttagtttccatgagagaattgtttttttttttgagaaaatttatcaaataccatttttgtttaatctctttcaaaatatcattaacctaaacatcttaagattagtataacttaaccggaagatttatgtataacttaatttttcaattctattttactccaaattaaggctaatcttgctaaaaatacttggctaacaaaaaatcttactaaaaatattgggaaatggcaaaaataccactaattgcttccttgtcgtttttcgaaaattccattatttttaatagtgattgaccaatttacgttgtgataaaaattaattaaataaatcattaaaaagtaatactaaccttaagatgttttgttagccaagtactttagaaagattagccttaatttggagtaaaaaaatttgaaaaattaagttatacatgaatcttccggttaaaataaaattatataaagtcattgatctaaaatttaaagtattcatagtatgacatacgtaaacatcattcgtatgccagctttctactattcatggatatagtaataacttgtgtgtatcaacattcaacaacaacgttaaattcattttcttttttggtaagaaatctggtgggtgatctgccagcaatattgttgaaaccgattaattactatacatggaatttgttttcatttttcaaacaaaatatttatggccaagaaactaaataaaaagagagaggttggatctaaatcaaatcgtgaacaacccatttaaccaaacatccacgtttggtgcagccgatgttattagcctccgagattagtcatatttcaaacaacatcacttaaccaaaaactactttacactgttacatataaatcgttgtatggttttgatataacagccttttgtcttactagtcaaatcatacaaaaatggtatagtttctgtgatataatttccacttgataatttttaattagagactactttattgctaacaacgttggattataaaatggattaaaagggtattatcatctaagcaaacatctctttcaatgagatctaaagtcaaagtctgtttcattcacatccatttaactttcggcttttgataaggctggctaatggtaacagagtcatgcgtgggcattttagtcgttaccttcgaaattatcacacatccgaaaagtcatttctttaattaacttgtcaaattgtaatctattaaatatacaacaaatgatttttctttttactatatagtctatagtacataacattgatagaaaaggtaaaaatcaaactaactgataatttgaagtagaaagaacctatgagactcaacacttttcgacgattataggtaagtgaaatagataaaaacaagtgtggttaattgtagtatatgtataagcgatgtggattaatgttgaagatacaatttagataaatgttgctaactttaagaaatttataagtgaatgaaatgattcgtatgatatttaaaacaaaaatcttattcgggttgagtacattacgtggatatatatgattgataacgtattttattcgtggactttttttctattattatgtaagttgtcatttgatcacatcttacgcagcatgtacagtaaaattattagaggtttaatcatggaagagtacatgaagcacactcattatgttatgtagtgtacttcttccattacactcacgtataaataacatacagtagttattatatcctgaatcctccacgcgaacataggaccaacaagaaaagcagaacaacgcttttgagactgaatttagtagactaattcggcccaattcaatcaaagcccagtcacttagattaaggttgtttcttagtctcccaaattttttaatttcaacattcaagagccaagcttgatcaagctttgtattttttcggttttggtatttttttcttatcgaaataatatttgtttgttttttgtttgttactgagtatcattttctgatcgacgtaatttaaataataaattaattaattgatttttagaagttataacaatgaggaggttaatttgtttcttgtttctttgttttgaggtaaatcaatcaaataatattggacaacttatctctgttatattgttttggtcttccaacaagtattatctatgaatcagcaatggttaattgttataatattcaatctgtagcttatacaaacgtacataactaaatatcacttttttttttacctagtaaccatattatatgttgttacttgttctatacaaaatctgtttttaacaaaagtatgcaatatctctaaaaatatttgtcgcttatatgtaaaatagtacctcacatgaaaagtaataactaagtgctaaaagactttattccatggtttagtatctagttttgatcgcaaatgaggagaacacaatgtcagcatatacctttattttaagcttattaagaaaagagtatgatcatattaaggaaagagtatgatcatatcacatatgattactcaaatcccatatatcactctaatatacatttattatattattctatgtaatccttttaactatgctctttgattatgttttgtgcttatatataagttgtatccttttattcaataagataacacaatacagttaatcattctctatttacatagtagcagagcgggttttaatcatgagtttcgatctaacgatcatactatttccttaataaagctagtttctaatcttttcaagtttcaacccaaatagttttggttgtttgaactgttttaatatgacatataccacaacaggaaaataaaaaacgcaaccaaagtcattgcaatttaatgaacggatgggattaattagaaaagaaaaattctaattttgtaattattaactcttgtgcaaatgctaaaataactctcaaaaaagattgttcttcatttttgttgctcttcgatgccaccaaagcgtctcatatcaattggtctcattggatcgaacctgaatacttcagaaatttcaatttgagaaaacacattttatcttcataaagatttttgatgtaattttggtgaaatttgatgaactcgcaattagacgtaaattaggaaatttttgatgtaaaaaatcttaattgatttgattgatgcacagcttcatcgaggctagttgaagcgaagtctagactcttaaagacgttaattgcgagtcgagagaatgaatatgcataaaattaatatgaagtcgataaatagataagtaattatatctatatatatatatatatatatatatctaataatatatatttttaaaatgatttgttttaatgtaaattttcttaatcgtaaacaaatcaaacagtttttatttgcatttgtatcttatttgaatcgattgaaatggattcaaatctaggagacatagagtttttgttttcctttcttcttttttataataatgaatgtgaattaaatttacattatttaaattccttttgctggaagattaataggaaaaaaaagcgataacatccatacattacttcgagaaacttgacgtgagaacaataaacaacatcgtataagaagtggattaacatatatatggagaaccaaacaatgagatcttttgtgattataggttaaaaagaccacacactttaggaaacaacctgcaaaatttgcttgtaccaggcggcacaggcaaaaggtatctttcttgaccactttgttgttgttcagtgcaaagttttttgcaagcatcctcgcacattataggagtagcgtttttaacttctttcaagcattggtttgagacacaatgtttaatacacatatttacattattcgaatgtgagatttgtgccgaaaacatcattgcgagcaaagttgtaatgatcagaagatcgcatgttttcttcaaactttgagctgccataatgtatataaatgtattgatattgattagaacaaatattattagtaaacaagatgatttggtgatgaatattgggttttgtttagatgatttatatagtgaaagtaatgtttcctatttttagaagttggttttttgttattgtttctttctctagaagttacatacatctctgtgatttagtgttacgctgatccaaacaactttattgttatgaataaaacaataactatcgtttaaatgttacaaattaaactcaaattggctacgtcatagtggaacttaattcgaggttcaagtcgttttgaacgaaaaccatgaaattaactaaacataacttaattatatgttcttacttgttccatacaaaatctatttttaacaaaaggatgcaatgtctctaaaagtatttgtcgtttgtatgtataacagtatctctcatgaaaagtaataactaagtgctaaaagactctattgcatggtttagtatctagttttggtcgcaaatgaggagaacacaatgtcaacatatacccttatttttaagctagtttctgatattttcaagtttcaacccaattggttttcgttgtttgaactgttttaatatgacatataccgcaagagggaaataaagagcacaactaagtcattgcaatttgatgaatgaaagagattaattaaaaagaaaaattgtaattttataattactttattttggtttgtttaatttttatttttgattaagaatgtgattagctcttgtgcaaatgctaaaataactctcaaaaaagattgttcttcatttttgttgctcttcgatgccaccaaagcgtctcatatcaatggatttcattgaatcgaacctgaatactgcagacaattcaatttgagaaaacacattttatcttcataaagtttttagttgtaattttggtgaaatttgatgaactcacaatttgatgtaaactaggaaatttttgatgtaaagaatcttaattgattagattgatgcacaacttcgtcgagtctagttgaacggaataagtctagactcttaaagacgttgattgcaagttgagagaatgaatatgcataaaattaatatgaagtcggtagtagattcaaaatgatataataataataatactatgtagtttaaaaatgatttgtttaatgtaattttttttaatcgtaaacaaaccaaacggtttttatttgcatttgtattttattctatgtatttgaatctattgaaatggattcaaatctaggagataatgagtttttccttttctttttttataataatgaatgtgaattaaatttatattatttaaattccttttgctggaagattaattgaaaatacgcgacaacatccatatattacttcaagacacttgacatgagaacaataaacaacatcatataagaagtggattaacatatatatggagaaacaaacaatgagagcttttgcgattataggttaaaaagaccacacgctttaggaaacatcctgcaaaacttgcttgtaccaggtggcacaggcacaaggtatctttcttgaccactttgttgttgttcagtgcaaagttttttgcaagcatcctcgcacattataggagtagcgtttttaacttctttcaagcattggtttgagacacaatgtttaatacacatatttacattattcgaatgtgagatttgtgccgaaaacatcattgcgaacaaagttgtaatgattagaagatcgcatgttttcttcaaactttgagctgccataatgtatataaatgtagtgatattgattagaacaaatgttattagaaaacaagatgaattggtgatggatattgggttttgtttagatgatttatatagtgaagataatatttcctatttttaaaaattggtttttctgtttcttgtttctttcacgacggttaagattgcatttctgtgatttagtgttatggtaatccaaacaactttattgttatgaataaacaataataatgttacaaatccttgtaatttaaccataatcagagaacgactaaaaccgtgaaattaaccgaacagaaattaacgattggctaaacgatttcggttcggttagtttccggttaacaaaattaatccgaagtcactcctaggcctttggtcaatcttcgtttctcgtttctctgttgagtaacgacaatcgacaaaggaactttgctcaatcttcgtttcttcgttaggtaatcttcgtttctaagaattggaatgttctttttcataggattcatgatagtttttggctgcaattttgaatctttattctgactatgtgaggaatttgattttgttatcgttgtcgttgtttcgtcttaggatttgtgagaatcattgaacaatttttcaactttgacaattaataacacgagaggagcttcagatttatgtgtttgagtattcaaagatatagcttttatatttgcctttctgggtttcatggagatgaatctgtatacttatagctcattaattagtcaactctgttgttgcttctggtttgacattgtattgagtagtcaaagatttgagctttctaactccacatgaagatatagcgtgtttacatttcatttgtgaaaagtacttcagtccatttgggtttctatctggtttagaagatatttctggtgaaaactttatttgggcattgcttcttttcagtgactgatcaaagatgggaagtcaggagaatgtgaaacacctcgaggaatgcactgtttccaagttagtttcttactgcatcaataatgtttgattgtttgctaatcattagaaagagtaaggaacacatattcagtctttgtttcttcactgtgatatcgaaatttatcagtaagtcattagttatgtagccacttttagttgttttcacttgttcacaccatcatgcttttcatttggaaaaaataagtaaccttggaatataaccacggttgttgtttgatacgtcttgcttgttaaaacacttgagtgttgaaaggttcagttcctctggtgtataaagtgttttcttcttgatatcgattttttgtgatctaggatcatagttttgtcattgagtcatgaggtatgtagcccactcttagtaaatttcacttgttcataccatcatgctagccactacattgcttggcataaagaagtagccgcagtatccaacatttgtatctagtatcttctaatataaaacacagtatgattgttgttctcgaaatcaaaacatcctaaagtgaaattttcgatcttttttgtgggtgcagtgcattagggacatgggtattctcagtcctaggcgcattggttgcaatcccggtaggcatcaaacgcaagtctcttgggccactcgtgttctttggcacaaccggaacaatgctcgacatcatcattggtgtaagtcaatgcgagagagaacacgcagaacaccaaatgaagttactccaagactctcaaaatgccacaacaacaaccaccaacacagagactgaagaaagctcttccatgtcctaatcttttttacatctttctcactaagactttgatgtaatttgatgccactcacaagttaaacttgttttaagatattgtgattatcccatgtatcttgagaaaacaaagaagaaagcttttcatgattacaactgattcattgacattgtcatctccaccaagaaattgcaacacacgaagcaatagaatttaatacgataatatatctgaaactgttacgagcaatgtatatgaatcgataaatcttggactccaatatcaaatggtattcaaaaactaaaaaggttcaaagtgaaaacttttatcaacaaactcttgttcaaactaatgaaacaaagaaagattattataacgataaacgatgaatctcactaaaacgacggcgttccaagtcgaaagcagagggaatgttgaaagttaaacttgattttgaataagtttaattattggatcaattatccaataattaattatggccaaatccaagttctagagttttctctagaaatatcatcatttccacctccttaaaagattctagaaattttctagaatcatcttccacctccttaaacataaaaatctagatactctaatagaataatctagataatttgaataatgtaatctaaatcttatgtaagaactctctagacttaggattaaaatattttagatattttgtagtttggaggctataaatacctcctccccctctcaaatgttgcaatgttgtgaagttatcttcaagtttaaagcaaagtaataaaagttatatttcctaaaaaactctctcaaaacacttaaacactttctccattacctctaaaagaattttactctaacagggaagattccggcgaacacaaactcatccgacgacgaagaaccgaagataagcggagaagcagagcgaaatcgctaggcagatagaacccaacgtaagtttcatgtccgtctcttctcgtagtctacgcatcaccaccggcgcaaacgtgagtccaagcatcgataaaccgattctgataatcaccaccataaagcacatatcggccatcttgttcagctctgatgcacagtataacgccacgtgtccgttcttcgtcgtctccgttagatatgaaccgtcgaaaccagaagctcgtttgcagattccggtgaaaatggcgagcgaaactgcaagaaagaaacgatcgtttacacgacgagtttcttctcttctctcacgacctccatcttcgtcatccattgcgatctcgtagtcttgcaggagaaaatggagattttgaaacgatgattgatgaaaaaatcagaatccgggaaaaagtgagaaaatttgtctctgagaggttttggagtttgttaaagagggaaagaagaagggtttataacctaaccatggttaaaattttaaccatggaccatagtttattttttaaccttgctttttctctaaccatggtttataatccgtacgtgttgaaaaagtttcaaggagagaggtgatgactgatgatattgagtggacgaaggacttacctcttttggtcactgttaaaaattggtttcttgaattactggttacaaaatttcgttcgttgctgaaccggaaattgacaattttggttacacagaattgggaccaaaaatatctgcatggtttagtatttgatcatataactacctataaaaagactagaaatattttatattgttagataattgtgaaattttgaacaaaaaaaaatgttaagggttaaatatggtcttttttactaagttttattcatcggtttttctaaaatgttactactttgggtaaacaaaagttaaagcagttgcctgattacgacacgttgaacaatggattgatcttatgtaaatttaattgataaaaaaacagttcatgactgcattttgcagctaattccttaaacattttgagctaaaatttgaaactatcatcaagaacatgaagtaattagtcttaatccgatatcataaacggttcacacacacatcgatttctttgtaaaactaattattgtattcagggatgcgatccgaaactttaacgcatttttatctatgcaaatacagtatgaagtgataaatattgcaagttgtaactacaatatcaattaatattcagaaaatcttgtttaaaccttttattcaagaaaccaaaatgttcacaacacaaatccaaagaaataaacgaaaagcagatacagagcatccgcgatggtctcactgaacgatcacaggtccaaatattcaaacctctaatcaaagaaaccataatgttcaaaacaacaaacccatcaaagaaagaaaaaaacgaaaactagattgtagatagaaagagagatgataaatgtaagcatcgtcgatggtctcactaaaagacacaggtccatagtaacggtggaagaaactcaagacacaccactcacccggtgacggagcagcgaaggtacgctaagaaagcaatcgtgaggacgacaaaaatcaaacccacgagcagctgcacgtcacactcttctcgtacttttctcatctgttccagttccaccaccatcggagcaacaatgatcttgagaatcacaagcataaaagcaagatgcgcccacaagttgaactccatcgcccaagaatacgccacgtgtccggtcatcgtcgggtttggatctgagccagcagctgctcttttgcagactcttgtggacagttcaagcaacactgcgacgacaaaacgaccgttcaatctacgaagctcttcacgtccctgtcacgattctcttcacgtggctcaacaactccttccatggcgagagattcttgcaggagaaaagaaaaacaagattttgagacgaagattgtgaaaatgaaaacagattcgggagagaaaatctatataataagggtttttggagtttataagcataaaatgtttcttttatttaaattaaccacggttaaagtttgaccgtggaccatggttaattggttatagtaatcgtacgttttctaacgggacgtgagtcttgatgactgtgttgaaagttaaacttgattttgaatcaagtttaattattggatcaattatccaataattaattatggccaaattcaagttttagaattttctctagaaatatcatcatttccacctccttaaaagattctagaaattttgtagaatcatcttccacctccttaaacataaaaatctagatactctaatagaataatctagataatttgaataatgtaatctagatcttatataagaactctctagacttacgattaaaatattttagatattttgtagtttggaggctataaatacctcctcctcctctcaaatgttgcaatgttgtgaagttgtcttcaagtttaaagcaaagtaattaaagttctatttccaaaaaaactctctcaaaacacttaaacactttctccattacctctaaaataattttactctaacaaagtggtagcagaacttgaagatcctaaagatggcgagtaacaatgttcccttccaagtcccggtgctcacaaagagcaactatgataattggagtctacaaatgaaggctatcctaggagcacatgacgtgtgggagatagtcgagaaaggtttcattgaaccggagaatgaaggtagtctttctcaaactcaaaaggatggtttgagagactcaagaaagagagacaagaaagctctctgtctaatctatcaaggattagatgaagatacgttcgagaaggtcgttgaagctacgtcggcgaaagaagcatgggagaagcttcgaacctcttacaaaggtgtcgatcaagtcaagaaagtacgtcttcaaactctaagaggagaatttgaagcactacaaatgaaggaaggtgaactcgtctccgactacttctcaagagtgttgacggttactaataaccttaaaagaaacggagagaagctagatgatgtgagaatcatggagaaagttcttagatcattggatctaaaatttgagcatattgtcaccgtcattgaagaaacaaaagatttagaagctatgacaatagagcaacttcttgggtcattacaagcttatgaagaaaagaagaagaagaaagaagatatcgtcgaacaagtcctcaatatgcgaattacaaaagaagaaaacggccaaagttaccaaagaagaggtggtggtgaagtacgaggacgaggtcgtggtggatatggaaatggacgtggttggaggccacatgaagacaacacaaaccaaagaggtgaaaactcatcaagaggtcgtgggaaaggacacccaaaatcaagatacgataaatcaagtgtcaaatgctacaattgtgggaagtttggacattaggcttctgaatgtaaagctcctagcaacaaaaaatttgaggagaaggccaactacgttgaagaaaaaattcaagaagaagacatgttattaatggctagctacaagaaagatgaacaagaagagaatcataagtggtacctcgatagtggtgcaagtaatcacatgtgcgggagaaaaagtatgttcgcggagcttgatgaatcggtgagaggaaatgtggctttaggagatgaatcgaagatggaggtaaaaggtaaaggaaacattctcattcgattgaagaatggagatcatcaatttatatccaacgtttactatattccgagcatgaagacaaacatcttgagccttggacaactcttagagaaaggttatgatattagattaaaagataataacctttcaataagagaccaagaaagcaatctcattaccaaggtgccaatgtcgaaaaatagaatgtttgtcctcaacattcgaaatgacattgcacaatgtctcaagatgtgttacaaagaggagtcttggctatggcatcttcgattcggacatctaaattttggaggattggagttgctttcaaggaaggaaatggtgagagggctaccttgtataaatcatccaaatcaagtgtgtgaaggatgtctacttggaaagcaattcaaaatgagctttccaaaggagtcaagttcaagagctcaaaaaccgttggagctaatacataccgatgtgtgtggtccgatcaagccgaaatcacttggtaaaagtaattacttccttctctcaaatgtataactccccaggaatttcaattgcgcttatattcatcccattctaaaacaattagatgatgataaaattaacaaagattgggactcctaatcgaaaagggatatttaattaggttccataaaaaaaaaaaaaggcttgaaaaagaaccttctccactttattcttaaaaagcctcatgcttattcgaaagctttgttgtttttaggatctggatccattattcattcttgattgatgatttttcaagaaaaacatgggtatattttttgaaagaaaaatccgaggtgttcaaaattttcaaaaagtttaaagcccatgttgagaaggagagtggtcttgtgatcaaaaccatgagatccgaccgtggaggagaatttacatccaaggagtttcttaagtattgtgaagacaacggcattcgaagacaattaacggtgccaagatcccctcaacaaaatggtgtagcagaaagaaagaatagaacaattcttgagatggcaaggagcatgctcaaaagtaagagactaccaaaagagttgtgggcggaagcggtcgcgtgtgcggtttatctattaaatcgatctccaacaaaaagtgtctccggaaaaacaccacaagaagcttggagcggaagaaagcccggtgtttctcatttaagagtctttggaagtattgctcatgctcatgtaccggatgagaagcggagcaaactagatgacaaaagtgagaagtatatcttcattggttatgataacaactccaaaggctacaagctctataatcccgatacgaagaagacaattattagtcgaaatatagtgttcgatgaagaaggagaatgggattggaactcaaatgaagaagattataacttctttccacattttgaagaagatgagccggagccaacaagagaggagccaccaagtgaagagcctactacacgaccaacttcactaacaagttctcaaatagaagaaagttcgagtgaaaggactccgcgttttagaagtatacaagagctctatgaggtaaccgaaaatcaagaaaaccttaccttattttgtttatttgcggagtgcgaacccatggatttccaagaagccattgaaaagaagacttggagaaatgccatggatgaagagatcaaatcaatacaaaagaatgacacatgggagttaacttcacttccaaatggacacaaggcaattggcgtgaagtgggtgtataaagcaaagaaaaactctaaaggagaagtggaaagatacaaagcaagattggttgcaaaaggttatagtcaaagagccggaattgactatgacgaggtatttgctcccgttgctcgtctagaaacggttagactaatcatctcactagcggctcaaaacaagtggaagatacatcaaatggatttcaagttggccttcttaaatggagattttgaagaagaagtttacattgagcaaccacaaggctacatagtcaaaggtgaagaagacaaagtcttgaggctaaaaaaggcgctttatggattaaaacaagccccaagagcttggaatactcgaattgacaagtatttcaaggagaaagatttcatcaagtgtccatatgagcatgcactctatatcaaaattcaaaaagaagatatattgatcgcatgcttatatgtagatgatttgatattcacgggtaacaatccaagcatgttcgaagaattcaagaaagagatgacgaaggagttcgagatgacggacattggattgatgtcttactatctcggaattgaagtaaaacaagaagacaatagaatattcataactcaagaaggctatgctaaggaggtacttaagaagttcaagatggatgactcaaatcccgtttgtacaccaatggaatgcggaatcaaactatcaaagaaagaagaaggggaaggagtggatccaacaacctttaagagcttggttggaagcttgagatacttaacatgcacaaggcccgatattttatatgcggtcggagttgttagtcgttacatggagcatccaacaacaactcatttcaaagcggcaaaaaggattcttcgctatatcaaaggtaccgtaaactttggcttacattattcaactactagtgattacaagcttgttggatatagcgatagcgattggggtagagacgtagatgaccgaaagagtacaagtggttttgtgttttacattggagacacggctttcacatggatgtcgaagaaacaaccaattgtcactctatccacttgtgaagcggagtatgtagcggctacgtcatgtgtatgccatgctatttggttaagaaacctcttgaaggagttaagcttaccacaagaggaaccaacgaagatctttgtggacaacaagtcggcaatagctttggcgaagaacccggtcttccatgatcgaagtaaacacattgacacacgctatcactacattagagagtgtgttagcaaaaaggacgtgcaattggagtatgtgaagacacatgatcaagtagccgatatttttaccaagcctctcaagcgtgaagactttatcaagatgaggagtttgcttggagtagcaaaatcaagtttaagagggggtgttgaaagttaaacttgattttgaatcaagtttaattattggatcaattatccaataattaattatggccaaatccaagttctagagttttctctagaaatatcatcatttccacctccttaaaagattctagaaattttctagaatcatcttccacctccttaaacataaaaatctagatactctaataaaataatctagataatttgaataatgtaatctaaatcttatgtaagaactctctagacttaggattaaaatattttagatattttgtagtttggaggctataaatacctcctccccctctcaaatgttgcaatgttgtgaagttatcttcaagtttaaagcaaagtaataaaagttctatttccaaaaaaactctctcaaaacacttaaacactttctccattacctctaaaagaattttactctaacagactgatgatctggaaaggacctgacctctttggttacacaattttcagtcgttgctgaaccggatatcaatacttttggttagacaaattggaaaaagatatcggaatggtttagtaaatcgtttgatatagtaactatacatcacaaattcagactatatttgtaattgattttagaatattagtactcttttgtttttactgattgtcttttatcacatttctaacattgagaggtcaaataggcttcagaatttcccataatccccatttagtcatttttaccaaacaaaagttgaagcaattgcctcatctcatgacatgtggaccgaaaagtttatcggatggcttaaaaaaagacacgactattttgtcttaaacttaaaactcggtttctctatgcaagcttttaattattgggattaattctatctttaccttccaaagtgtgggatcaatcaacaatctacacaatcattttccacagtcgacgactataacgttctagcgaccaatctacgtttagttatatttacatatgtaaaatgcaaaatagctttttcactgatagttttattttgatactctgtaacataagatacttgttttcttcattttttcaaatttgatacgtgaaatatttaaggatcaagttataatgagctcgatcattaatgaaaaagataaatcttgttacgaacattcatgttatcaaatggtactcatatgttcaatgacttcaatcccaagccaaagaaacagattataagaaaagaataaaagagaagaggataatcacactaaaacgacaccgttccatagaaaaaaaaaacagaggatgattctaactccacgacgaaccagagaaaggtaacccaagaaagagagagctagagattgaaaccatcggcgatgagaacgattaacaactcacccaccagcgaagatacgccataagagagagcgagatcgttacgcaaattaaacccagcaaaagcttcatatcgcagtcttctcggaaacttcgcatacgtcgtgccaataccaccaccgatgcaaggatttgaaaaatcaccaacataaaagagaaatgagctgctttgttgaaacccgatgcccaaaagaacgctctgtgttcgttctccgtcgtctccgttcccgaatttggatctgaaccttcgaaaccagctgctcgtttgtagactccagtgaaaagatcgagcgccactgcgacgacgaaacgaacggccattcgacgaagctcttcacgtctctcacgttgctcttcatgtctctcaacagctccatcatccatggcgaccgaaattttgcaggagaaatgaagatttgagaccaaggttttgaaaaagcagagagaaaaatttgaagaggggttttggagtttgttaaaaagaggaagaagggtttaatgttaaccttaccatggtttacttttaagttttaactattaacaatggttacaataaccgtacgctttctaacggcgtcagtggtgatgatctggacaattttcaccgtgaaatacacaattttcattcgttactgaaccggaaattaatactttcggttaaaacaatttggttagtggaaattatactatgcctaattttgtttaattatgtttttactatgttcttagtcactttgtaaaaaaaaattgaggttaatgggtttcccataatccccataaaccaaacgaaaatagaagtatagttgcatttgtcttatgacacgtggaaagatagattgatcggatggcttacaataagccatgtctaaatttgtcttgttctaaagtacgtcaaacttgaaaaactggttcctgctcctgcatgcaagatttttatttttttgggatcgactaaatagtttgatttcttcattgtttcaatattttgctacattaaaataatttaaggatcaagttataaactaaacatatgattaaaacataccgagaaaaatagaaatttaacaatatgcaacctagcattttaattgataccgagaaaaatagaaatttgatattaacgagggtgtttctagatgagctcatttgctttagttaactacgagtatgattggtttattgaagttctagttacatattttatctattactttacttctgatttctgaattctgactagctttatggacaaaattgcagtttttcttaaacccatttctcaaataaaaagaaacaaaaaaaattgggacgcctcaagacgatcgcttagtacccgaaaatattaatcgttgaagttttagggtagtcgatatataaagaaaaaagtgtctactcattaaacggtccactaattgggccaaccggattagtttatacttaaaaactataattatagagtttggattttggagaataaccggtgtaaaacgctaaaacacttcaagaacccaattaaaatctaacatattaaaaagtctggttttctacttttcttagtacaatatggttttttaggagaaaatataaagtgtatatcaatttcgaaatcataaatttaataatttttgaggatttaaaatcatctcaagttctcagccaagatggggtacataaaggatttcttcctacgaaataaaggcaaataagacaaaggaaaggaaatgctaataattaacacaatggaaggaaatgctacctaggaaaaggacacaatatcaactaaataaaggtaaataaaattaaaaatgaataaggataaattcacaaattgcaattacttatatataggagtgtcaaaatgggtcaaaattcatgggtcaactcaactcaactcaactcatgaaccctaatgagttgaaaattttgactcaaatgagttgatgggtcaaatgagttgatgagtcaattggtttggtgagtcaattgagttgggttgtaatggttaatggtttcaatggtttacccaattaacccatcaaggtttgttaaattgaattaaaccaactaaaatctctaaaccgatgtcaatttaagtttaaccaacacatctaaaccaatttaataaaattattttttttccaaatttcttaaatatacaagcaatgaaattgagaaaaagtaaactcgtcattttcccgccaaaaacgtaaacccgtgattttcccgccaaaaaacataaacctgtgatttttccgcaaaaaacaaaaactcgtaattttcccgtcaaaaaacgtaaacccgtaattttcccgccaaaaacgtaaacccgtgattttcctgccaaaaacgtaaacccgtgattttcccgtcaaaatgtatataagtcatatatatgtataatccttaatacaatctagcgcctctatatataagaagacaaagaaaagaaaccctaaaccttgattcactatttttctttctctttgatagctatggaagcggaaatatcctttggcggcgaaatagacctcaaaccgaaatcacaagatgctggatcattcaaaatctgcgtaagtgcccgaagatcggacacatcaattagtcttccaccaaatttcgttctctcgtacaatgactacgaaggtgtcatatcctcctaccctaatgactcgaaaaaactgaatgattggttgtactcagcagggctctccgaacaatatgttgacattgctaactctcaactcactgaacgaatctgtaagtcgatttctatggtagactcttcagtttgtgctactttagtttacatgtactgtaaagtcattgttccacctcggattgactcgtttgatgagaccaccaataatatcgagttgattagaccggcaaataagcttgtggttgaccgtttggcaaggaaagtatataataagaagaagaaatccaactctgacgcgagcgtgtgcacaatttgtttggaggagtttgaaaagggagaaatagtggtgaccttaccatgtggccacgagtttgacgatggatgtattgggaagtggtttttgaaagaccatgtttgtccattgtgccgtttcgagttgccttgttaagagatgaactaatacttggtggacaaacaagttaaggggatcaaagaagcttaaggttttcaatattgggctacttttagaggtagtgttttcaataccgcataacaagcttgcattacgcctgttaatttaatttctttagcttaatgtgtttatcctaaagttttagatactaaatttaatttaagcatctctattttttcttttaaacagagttaactaccaaagttttcttaaaagaaaacatagcctaaaatgataaaagaaactacattttagtttaatccattgggctaaaatatttgtcacttttttagattttgagtaatttggtaacttgctttcatttttagcccttgattttcttaagattgtcgaagtatcctaaacatcaacacaaattaaagacttaaagggacttttttcattcagccataaaatttcaaaagagtctttacatagaatagacctttaagaactttaaaaagccaaacaataaccggaaattaaacttggaactagaagaaacagagcaagcatatgggtttcaatctaaccgaaagataaccacccaataaccggagatgaacttgaaccagttacagaaaaccatggctaaggtctttaactcttagtcttagtaatgatccttgaagaagtgtaggcagaaacagagagcgaccaacgttatgaatccttggaaaagacagagatggagaaaccagagagcaacgagtcaggatcaccctaatgaaactcaagcacccaaaagaaagcaaactcaaagaggatataaatcttcagaagtttgacaactcaacgaatttagattttataatcctttggcttagttgtgtaaaactcaaaaaagtcaattaaacttggttcctacaatgtttagttatcatctaactatgacagcttttgaattacaaaacctttagatcatgtaaatatataatgttgcatagagtttaatccacaaaacagtttgggttaaatcatttgcatatataaatcagtttctcataaagtattgaaatacaacacttttccttaaagaagcaacattatatagaaatgttattgataagacataaaaataaaatatctatccaaacacatgttttgaacagatataaaaatgaagaataattccatcttcacttatactgaccataatggtcaaaagccggcattccgttaatggaagacgaagagccaccaccaacactggattcatcttgacccgacgacccgttttggtagtaccgaccacctcccataaccatggattggtccaacataccataaccataaggacccggaggaggtaggccatgagatgggccgtgaaacccaataccatttcctccataggtttgtctcaacgacggtggctcacctctaagtgcagaaccacgatcggtctctatctcacggtaccggttaatgaacacggtgagggggtccacgtagttatcgaacccaagcttgctcatagcccaaaggatatcttcagcagttatggtcttacgttgctcacgttggcaacgctcgttggcttcaccggtcacgaagctgatgtactcggagacacattcttgaatcgtttctttggcgtcgtcagagattttggcgtgagacggtaaggttttacgcatgattcttatgacgtttgcgattggcatgtattggtcttgctcacgagccacacatggtggttgctgctggaccacgataccattgttcttgtcaccggcgccggctactacgactgagctggtcattggggttgggttgttgctgtgctggtccaagttcaattctgttcatagaaaatacagagagaaattgaaatctttaggaaataaaaaagattagttgaagtagaaatgatgattaaatttgtaggatacgaatggattagaagaaaacaagagaatcaagggacacgttcttagttacggaccaataagataagagtaagtttgtggggtctacattctagacttatggaccccgttgagtagactgttcagattcttgccgttacgttttacatgtataccaaaaagctttcgcttagattattaattagaaaaaccaaaaactcaaaatttggagaagaacatcaattaatttatgtagacgaaggtatgactcaataaagtagacatttatttcatgtgaaggttcccaatggtaaatgttgaaagaatcaaaagattggagttaatgacatccagtaattaaaaaatcaatagtaaaaggaaaatttggagaaaatttcacttagtttttttccaaaaaaattactgatagattttgaataaaaaaacctcacactaaaacttgggactagtataagatatatatatatatatatatagtttaaatgttaagtactaaaaaaatttgagtttctatttttttagtgtttttgaatcacatgaaccgtagatgtttttagacaagggaagagacaaacgagaatctcgttttgaaacgaagaaaaaaactcaaccgttacaacaaagaaaaaaacgtttttagaatcgaaattttttttgataaaagaaagaaaacgatactcaaaaacattcctggtacatgcacgggtatattcaatgaacacatacgagagatttgtttaactaataccacaccatggaaatatttggataaaactttgactcagccatgatgaaacaatacatatcaaactcttgcatgtatgtatataaaatcgtcttctccgggccattcccaaaaccttcacaaatctaaattaaaaatttctagaaagaaagcatttagttcgttgttgcaaagtctcataaaattcataaagcatgtctccaatttttcatgagcatataaatatacatggaggcaagtatatactgtataaaaatagccacttagattaccagagatggattttggtagctgatagtgagagaagggagctccacgttccattgtttctctgccgtctttttttttttttgttctttataaaataattatttgagtgatttgttgcatgcaaagagaggttgatggttgagtggttttatagagagatgatacaaatggcaaaggaggcggttcttacgaggtctatatctctttcccattggcttgtctcattggctatgtggccagtcaaactgctcttctctcattggttgttttttttcacaaattaccaaagtaattaagtaaaaataaagactattaagaaagaaagaaagataagaagaagatttttatacatatgaggctctctttgtttatataaattaaatgttgtttaacattttctatttatttagtcaataaagtattcgattatcgaacggctgagaaagattgacgtgacgttattttagtcatatattttattaaaatttaataaaatataggtttcactaaattctttgtttcttaattaatgaaattgaaaattagttttaaaaagattctcttacttaaaatggtaaattttggtatatttgaataaatatgcgttacgaaagtgagttatcacgtttattgtaatttttatttaaattagccttttaaagtgtttataggaaaattacaaaaggttagtacaagatattggtgttagatgatgcatgttacaattgaatattgctttacattttctaatacataattaatcaacaaataaaataaaaccaacaccctagtaatggaatggtggataaagatttttgaaagatggaaaaacatgaagaattttggatagagtttacggcccagtccatgacctgttttggatctagcccatactaaaaacaaaccaacgagaattaacaaagaaccaatattgaatctttcctggccaatgacctctcatttcaaaatgaagtttagaactaaaataatcttacgcatataagattattttagttatcatcagtatgaaatctcatggaactctgctaaaagttttttttttctttaaatgtttccattcactttgcttcccttaaagataaaccattttgaacatacatctttagcagaatctagagagattataaataaagaggccacatgcaggtggagcaagagcaaggaaaggatagctaaagagataggataatacaacaactcagttaggaggcggtgaattggtaaaagtttcattgcaattatacgctcaactttcaaataataaactagaagatttacttattctgaggttaaggaaatatgacttctggtaaaggagagtttggtgttgtctaccatgattttcaatatattgaacaagcagcccataaagttatctctcattgcagaattttttgtaagcttcttcgcatacatcatgagtagcacctttgaccatcttcaaacattggtttggaacgcaatgttttgatacaaacttctatcgtgcttgagtaagatatatactcgttctatatcttttaccatcttttcaagtagttttttcttttttcaagtataccaacttcttttttcatatatagtattctgatttctgagcaaccatttctaattaattgtagctcgtaagctctttattaaatttaactaaaaatcttagttatatcattataaataacgcatcgcatgtagatgaaagtatataaataataacttgtacacatgcacgtttgaacaatccttagaacaaccaatatatttttatctgcattacaactggcagaaaaaaagattatgatgcatctaattacttaaataaccaaactatatataataagagatggaacagtttggtagatccggcgttgaaatgacaatcccgtaggcttaatagctatatcatggccatatgttacctcaatgagaagagaagaaacatcgttacgtgaatatctgagcttctctcgtgtatccttgcttatttttcgcaaatttaatatgttcacgcaacaagcatcataatttacttcttaaatagcagacataatgattaccatttgcataaatccttatttcttccaaactaacaaccctcatcgcaatgatagtaggatcaaactatacgagcttagtagtactcatgcaatattttgaaccagtaaaacttacccttttgtggacatgcctatgagagaagagataaactaataacgtgaagacttgatcaatattcaagctagctagatggtagaaaataatgcaatcattttttattagcaaacgtttatatttctcttctcgtaaataaatctaaagaaaagttacaaaaagaaaatttataaagttgtcacgtttagtgaatgtttctactttctactctcgtagatatgtccaaagcagggtaactttcactggtagaaacatatatctactgtttccctcaaattccataacaaaattcacattattatggtgtgacgacattttgggatttcaatagtgtgaagagtagataggagtttgctcaaaatcaaccacgttgtaggacggctacctgattcaccggccatcatcgcttatcactcaccagtcttttctttgttctctcaattgaaaaaacaaaaatattcctgaggttaattttgtagatattctttatacatggctaacattaacaattttgatacgtcgcacgcgttcgttgcacgtgtgaactaggaggcgcaaacgacgaaaacgtaatgtttgacgccagctttgatagacacgtggacagttcagacgctaatgatgtggacacaatcttgatcgccgaaacacttttctacatgtggcaccgtctatgtcgtggatgcttcgtaaccaacgacattttgcggatgggccgtgacagcccaataagcatactttgtatgccagatcagctctagtggtccaactgtaaaaggagctgtttggcttcaccttacctgttcctactactctttgaggttgaaattagccaattaggtttattgataaggactcttattttatttatgatttattttctctttaacatcgtcatatagttatgggtctaatggccacgaattctaaaaacgataaataaaacaaattatgctgaatatatcaaatatatgtatatgtatttttttgcgttaacttagccaattaaacacgtaacattcgtgtttaatgtttttaatttgcctaaggcaatattttattttcgtcaaaaacaagtaaccgaagacacttgtttctttcgaaatcagtactcaataaaataaagttttgtgtaagactaattttagagattctcttagtagttgaccaaaaaaaaacaaagatgttttacatcagattcgaagtaccacagtttataagtatgccaatacgtgtgattgaatacatcaatataattagatcttatcttacatatttgtggacaattaagtcggtatttcgctaagaatgttttttttttttgcaaatcaaaatgtgtattctatgacaatataaaaatcatatacacaaataaatgatggctaggaatcgaaaaagatgtgtcctcgtgggtttttagaattgaaagcgtcaaaaaagaaacactagagctttcagatttcaagtatacagcgaagagtaatgagatgccttgaatatggaatgggaaagtatctcagtatggcgtagagtaccaacgcgttatggtgtatgaatgggaaaaaatacattcattcaaccatattttatactcctaatatttatatttattcgtatcgtgtgattttttcattaatgtggacaaaagttattgagtacttttaggttttaactggggatccacccccagcattaacgtcggcttcgagtaccgaaataaaataaacggtgtagtaatgacgaaataacataaataagtgtcgaatagctccaacacgtagaacaaacgcaagaaaacaaatgttaaatggtcagtttatgaagatataaaaacaaggagtatcaaacttgaattaaggttttaagaacattttgagtgattcaattgcttcttttatacaaaaagtttaaactcagattacgtacgcccacgttcccttgaagtatatttttaatttttcctaatgcggttgtaatatatttttataaagattttaattaaatggtgatcaaatgtgttagatactctaaccaccacagccgtggtaactaaccactgaccactcgtacgtataatacaattttagaaatatacatacttaatatgtggtgtattaggtatttttgtagcatttttttttgttaaaatgttacacgtttgaattatgaagtttacgtgcacggtcgcaactcgcaatatagtttttatgatgtttgtggttattcgaatgacaatcatgtcctactactagcacttcaaatcaaagtacacgaacctatagcctataggatgatgtatgtctatttatgcgaaaccaaactataaaaaatctcgattatttatcaaataaaatattagacctaatttacaaatggcggacaaaaactcaactttaaaatgtaaacctttggcactatcaatatcaacataaaaacgttaaaaaaataacgcaactttagaatttcatatactacttgcatcaaccatcttctgtatctatcactatccgtatgggaatataagtatcctttaaattaataaatcatcgcaagtaggaagagaatcaatactcgaaaagatataaaaaaaacccaccaagacaacgatcatctaatcacagaagagaacaaaattcttagaatcataaaagtaattaattaagtaagtcatcaaagacaatcacctggaaactcgcttcctaatcaagatttctcgataatcctctcaatcataatcatttctctactatcaataaaataagtaaacaaaggtagaccataaactaatcatttggtcttctactattaacgtatgaagtagcccatactatatcatatcgctttaaattatacaaagacaaattcgaaacaatctcgagtacgtatgtattattaattttatgtttacactacggtgtcgttttcaaatttttaataatattgtgggtttctttttcgggctggtgggctttttgtgtccgcttcccaatacttttattttataaattaaaaattaatcatcgtctctcttgtgtctctctgttcatcacttttcttcttttgatgttcttgtagcgtctgtacgaaatctcacaaggtttcttcttctcagatttagaaatacttgtgtgatatcttctgagtaaccaaattcttgataaagtttctagctttattcaaacccatttgaaaaatccggtggtgaatcgccggagaaatgtgtttttcgtttctccactgagttttttttgttaagaaatctgttaaaactctagatttcaaacgaatgacattttctgagattgaggaacattgtgaatcgaggactggagtgaagattctctgatgagtgattcagaagaagacgaagaagaagaagaagctagtgaagtcattttaagcagcgtcgttcagaagaagaagaagaagaatctgcgtttcggtgaagaagtagagagacgagacggtttggtgttgttagctcaatctactccaatggtgagatcgagatctcaaggaacgactcggcgcgtgactcccacgcctttagtagatgttgagaagccgctaccaaacggagatctttacatcggaagtttctccggtgggtttccacatggatccgggaagtatctatggaaagatgggtgcatgtacgaaggagattggaaacgagggaaagcttcagggaaaggcaaattctcatggccaagtggagctacttacgaaggtgaattcaaatctgggagaatggaaggttttggtactttcactggagctgatggagatacttatagaggaacttgggttgctgatagaaaacacggacatggacaaaagcgttatgcaaatggagatttttatgaaggtacttggagaaggaatctacaagatggtagaggtaggtatgtgtggagaaatgggaatcagtatactggagagtggcgtagtggtgtgatttctgggaaaggtttgcttgtttggcctaatgggaatcgatatgaaggtttgtgggagaatgggattcctaaagggaatggtgtgtttacttggagtgatgggagttcttgtgttggtgcttggaatgagagtaatattatgaggagtttctttaatggtgttgagaagaatgatttgattgtggggaataggaagagatcttctgttgatagtggagctgggagtttgggaggtgagaaagtttttccaagaatctgtatttgggaatctgatggtgaagctggagatatcacttgtgatattattgataatgttgaagcttccatgatttatagagataggatctctgttgatcgtgatgggtttaggcagtttaagaagaatccttgttggtttaatggtgaggctaagaaacctggacagactatttctaaagggcataagaaatatgatttgatgctgaatttgcaattaggaatcaggtaaatatctcaaatttggtggattggtgtttttgtttggtgtgtgatggctttctctgttgtttctaatgaaggttgtgtgtgattgaattaggtattctgttggcaaacatgcttcgattgttcgtgatcttaaacagactgatttcgatccaaaggagaaattttggacaaggtttccaccagaagggactaagacaacaccgccgcatcagtcagtggatttcaggtggaaggattattgccctttagtgttcaggtaactttttagcttttttatttttatgaaaagtgtttcaatttagcaaattgctgaatgcgttttaagtttgatgatgtggctatacccaaatttgggcttagttgataagattgtggacgtatttgtgatgaattgtgtttctttttgggcaaattttgtttgtagacgtctcagggagcttttccaagtggatccagctaagtatatgctagctatatgtggaaatgatgctctccgcgaactatcttcacctggaaagagtggaagctttttttacctaactcaagatgatagatttatgatcaaaacggtgaagaaatcagaagtcaaggttagtagttgttggctcttcttgtttttgacctttctcttgtcatatttgaaaatgcttgtctgttcaagttaatttacttgattagcggatgggacaccctttttgtttgtttgtttctttgctttcacattactttctcaatcataaactccactaagtctgtgattagctaaagaaatttgacctgaagtgtttgtcttcttctatccaggttcttctaagaatgcttccaagttactacaaacatgtctgccaatacgaaaactcccttgtgactagattctacggtgttcattgtgtcaaacctgttggtggccaaaaggtatgtgtttgttcatctaaagctt

SEQ ID NO: 994 - DNA, 89473 bp, Arabidopsis thaliana
ttttaacaaaaacaattttatgcgtaatctctacatatgcataattatacaattatagttgatgtagtttaaaaactacaaaacaacaacgtccattaagcagttatgagtttcgatgttaggtataaatatctttatcttataacaatatatgatagagtgtaacgtttacaaagcagacaagatagaaggaaaagcttgtgtcatttattctacgactgcttgaatatcttgtatttgtagaattgatttgtaggttctaatggatgatgtgaaacacgaatggtaaaacaaggtttttgctttagatctttggataactgggtggtattttcactacatataagacaataattcaatgcttacaatgatttattgtctaattatcttataacttagtcaaaagtttctcgctcatctacaaggaaattaaacaaatgtaattcaaaatttcaaacgattaataccatatttactcttaatgacagatttactccaattcaaaaaataataagggaaccacttaaatgcatgcttaagaaaacataaacatgtaaagaaaatgattagatcatgaaataaaaaggaaagaaagaataaaaaaaaaagaaaacagagaagaagaccgagtgttgacaaaatatcatgtcactgttattagaagcctattaaattttttatttttattaaatagaaaaacaccaaatccgagaaaaattaatataaaaaaaaacaatataaaaggtcttattcttttatttacttcattcgttaaagaatctgagagatagaaaagccagagaaatatatatagagagagatagagagagagttggcccatcggatcgaagaagaagaagaagacggcttaagctttcttcttccattgaggatttttgattcatttggcactctctcttttttttgttattatttacttgagatttttctctattgattaaaaaaaaaaaaatcagagtgaatctaggaaacacttttcttttttaatttattgttcattttttccgataatctgtctctgatttagggagattttttatctgttcaaattgcgatcagaagatgtgggtctgaggtaatatctctatcaccagatttctatatatttttattttttggatatttaattattcatttggttcgtctctcttttttatatatatagttgatttgatttgccatttctgaatttttcatggattattgtttgatgaaattaggttagtcgtttaagtcaattgatccagaatctaagctttggtttttgattttgattatgattataatttataaatgtgaatttgtgacagtgaatttattcgattcttttttttttttgtttgttaaattctcgtaaatggttttggtttttattgggattagtttgcgtgtaatctggtttatatcattgatgattcgattaagatgcagtttctctatttgcagaatcttcttcttcgcttttagatacgacaaaaatatatttatactagcagagatgatcatctcatagtttgcttttatgtgttaatgttgtttcacgttgtgtttgtggttctgtgattgtacttgtatgttatgagtttgcatatgtatcagttagtggagtgtttattcaatgagggatctcagtgaagtgtttttttggtcagtgaatcgtggagatgcaacgtatgggcggcgatattagacgtgtttcgcaatgagagatgcagcggattcgtcatcatactctggatacgagaaagatttcatgaaacatacaatgcttgagcacgaagctgttttcaagaatcaggtatcttgatgcttacattgctctctatatggtttcatttacgtgtctatatggttttgatttgttttgtattgatatgtaggtgcatgagcttcaccgtttgtatagagtacagaagaatttggttgaggaagtaaaaggaaagaacttgaatgaagttatgaacgtgagtgatcatcatacatctgaaaatgaaagtaagaggaagttacatgggtttcttttaccaaactcaacatgtggagaagggagcagcacacaagcgtccaacggtcgtttgcaaaatggtggtagttcaaatggggacgcgtccgagggtagagatgtgaaggggaggagaagaatgattgatcttcaacttccagccgatgagtatcttgatactgatgaaactactaacaccggtgagaatacaagcttccctccatacaaccagttaaaatcaggaagaggggatgcttctcatcggagctatccttcaggatcttgcttggatgtgaagaactcaaatggcttagctgacttgaatgagccactcaaagggcaagattcagaacctgctgctctgtctagggatatgtattctcattatgggagaaacaatgctcatgttcaaggtcagtggttggagaaaaatcgaactcaaaatggatggatggtccttgaagcaggtgattttttttccttaatgagtggctagttacatgctcttacatttaagtgtctttcctgctcagtatatttaatgaacgcaaaatatgtgatcgctcatagaatggttttgaattttgtgctgattcagtaatatgttaccatttctgcctatcttctatttctcaaatgttttttttgtggctgtgttaatagggcaagataggagcactcagagagatcaggtgcatctgccttctcattcaggacaagtactttctaacaatgcatttcaacctcagagctatcctacaactgatcacagcaaggtcaaattttccggggaaagagcacatcgtgagctagaagttcgctcaaagactcctcaagtttcttatgatagctacgttgaatcaagtgtggcatctactgctccaagatcagtcaatgactaccgccctgaatttttcaaaccattgacccattggtcttcatccgggaggactatgaccagctcaaatcagaaatcttatccagttcaaacgaatccctacatgaattttgacacacatgcaagaccagatttgagttttgagaatagaagccatgtctctaatgggctttatcaaggattctcttcagggtcaaagcagtctttctataatttcccatcaaccggctttaaaccaaatgcttccataggcgaggtagcgaacagccacagttttgtaaatcttcaagggccaaaaaggcaggaatgctcagctgggttgccctggctaaaacctcagcccccttacagaagtggaatgtccaatggcttctttgatctgaatgcttcgacaaatcaattcatggatggaactgacgctggggacgacttgacttgtgcttctgttctgaagggtttgcgatctgcttcatactctaataatgcaaacatgggaagagttgaaacgaacaactctcagagtagtactaaaattattgggagcccaatctttgggaagcaatttgtttgcaagcaggagcgtacgccccttatccctcattccttatggattgctaatcaacacaaggaagtaaatcacttggtaaagcgagaccttgatatcaacctgccatgtgatgcctcggtttctgttgaccagcatggtgctaaagcctactatgtagacaagaaagaagggaaaaaagctgccaacttcagacactacattgatctgaattcatgtgctaatgaggatgacgaagattccggcttcctttccagtctgagtgtgaaaacaaaagcaagaacttggatagatttggaagctccccctactctcgagagtgaagaagaaggagataactcacaggacaaaacaaatgaagaaacttggagaatgatgcaaggccaagacggaaactctatgaatgaactcatcaaggtagcagcagaagcaatagttgccatctcaatggctggtcaccaacgccatcctgatgacgcagcttcctcttcaactgatgcggcttcaaaaagcccgctctcttggtttgcagaaataatcacttcttgcggtgatgagttagaaagaaagattgatggttctccagaagccacagactttgaaggtaacagggaagactattcttctggggagattgattactttgaagccatgaccctgaatatacaggagacaaaggaggaagactacatgccagagccattagtcccagagaatctgaaattcgaagatacatgtattaacaagccaagaagaggacaagcaagacgaggaagaccaaagcgggatttccaaagggatactctacctggtctctcttctctgtcgaggcatgaagtcactgaagatatccaaatgtttgggggactgatgaaaaccggagactacacttggagttctggattggctgttcgacggaactcaaaaagaaaacgaaatgtcactaacataaaccaagctccattatgcccgtcaatggcgcagccaatgaatgagagcgtatcagtgggaggacttgaagacagtaagctctcaggatggggacaagcaacaagaagaccgaggagacaaaggtgccctcctgcaggtagtaatcccccaaccgtgatcttaacataatagtttcaggaaataatcggaatttaccaaacttggaaattctatagaggggggtataaaacagagagattataccaaattattttttttatacagtagactgatgttgttaattgttttcacctatttgggaggtgatttatgtctcttttcgttttgtatatcttttatcttctgtaagatggaccaaaacatgatttgctttgtattatagcctggttggttataaaacagatagatttcttcttaattgagagccaagtataaaacgattgtccattaaagataatttgattctaaaacgtcatctttaattaggtcataacatttaactggttgagtgttacacatgttatctacgccaaattagaccacagggtcggtacatatgttgcgaaaaaaacacttatagtttgcttaaaaatgatttgacttttgtttcaaaaagaaaaagattgaccaaaatagagaagaacacttttgacaagagtttcttcttagaggtgacatggggtccttttgctttctcataattgttttactattctatttccagttgaagtatcattgaactctgccacaaaagcaccaagcttttatatgattatgaacaaataaaagatgactttgatttgccttgcaaaccaaaagcattcttgaatctgaagcaaaagaatcaataaacagaaaggaaacaataaagagaagaaaaccgcggtttcggttttagtaagatcattcatcaataggagcaggaagattgagatcgatgagtgtatgcatctcatgagctacttgatgttgaatcaccaaagtcctgtgttcttgattcccaatgaaatgtgatctcttgtgacctcctaaagcttgtcctgatttgaacaccctgaagcaaatcggacactcgtgacctttgcttttcttctttgcaccgtttgctttcttaaccattggagacttactatgaatcttgatagttctgtttgtgtccgcacaagagtcagtttccaagctatgctcaccactgtcatagacagattcagtgaactcatacttgattttcttacgaccatgagaaggaaaacctcttttgcttttcctcagatcatactttgtagaagaacgacctgatcctgatcctgaccctgaccctccttccttataccattccttcctgaatctgttcatgtccctatcttgttttgttggggagctgttgaatccggatccagatcccattattgttttgttcctaaagaacccatcaacagaaacatctgagtccaacttctttggtccattcctgaagtagccagagtcagaattatctgaatcataatgaacatcaccattttcttcaccagacctcatctggttatcaactacaagtttgttcttcttacataactcttcaacattcttcacattgaacatcttaacctgctcacctgaagatgacttagtctcaagaatcacagagttgttgtcagatgactcagccaaagagttatgtcctttcttaaaactagaatccctcgaaagcatcatcaaagaccttgccatttcctcctgttcaggctcaatctcagaagcatcagaagaagctgaaatagattgattcataataccattaccaccaactacaaaagcagctttgtggtgaggtttcacaacaactctcttggatcttcttctgataggagaggaagaagcctcagtatcagattgactatccataacaatcttctctctctcagagtgacaagccatgtgaccacaaagagctttagaagaaacaaaacctttaccacattctctgcaacgacgcagctcttgaagttgttgctgctgctgctgctgtttcagagccataatctgtctgtgatccacaaacctcttgttctttttaggattctctctcagaccataactagattgaccaccattttcatcaatcatcttgagcttatcagcctcatcttcatctgaatcagctgaattctcattcatgtgagttctgatgtgacctccaagtgatttcccacaaggaaacctcttgctacagaacttacaaacaaacttcctctctttgaactgctccatctgatcaaaacaaagacaaaagatcataagaagaagtagaaacaaaaagtgagagaagccattagtttgatttttacctcaaatttatcttcaaagaaagcttgacagatgctaagaaagagaatcaagcagaaagcttgatacttttccagcgatcagagtttggagatgtaacactagtcttgttaactacagatcctaccatcaaggcaaagagaacacaaaaacaggaaacaaataaaactgactttgaaatttcctcaatatctaaagttagcagatttactttctttttggggttgcgaatgaaagatataaaataaaaattttttgatactcagattattacattatacagtgtgcaaattttttattgacatttttcataagagaatagtagagaaatgagtgaagacgtgaccattgtctaggcggattttgcttaagagtgaaagctatacacgcattattttagtctgtttttggataaaagcaaccaaataaagaatgcaagaaagtaattagctaactaagcaacaaaaaaaaaaaagattagtagatccgacacattttagctgaatccatcattttgttgcgagtagaccggtccggtccagagattttgaaaggctctaaacccaaaaagtgatatgtactagataaaatactcgaaattcacaagttacaaacaaaaattataactttttctgattcatcttataccaaaaatgcattcaagttatttctattttactctataaagattatttttttcccctccaattttgcttcttgtttccttttctgttttgccaggcttgcactatattcatcatctcatcttaaaacacttttatcccataaatttggcgataaacattaagatatatacattttctttcataactttccttttcataaagagtaataaataatattttctacaacttataatccgttgattaaatcggatgataacacgtacatggtggacggtgccacatttgtaaaaatgagtagacataaaaaatttggctggcaaaatgataaaggaaaatctggttggcaaaattataaataaaagtttctatatttgcaaagtttttactattgtctattgacagagacaagcgaaataaatatctttacagcgaaatatcacacgaaagagaagaacataacatatatatgccccatcaacctttttaaatttttattgatagaccaatggaaactttagagttacataaatacagctcccaaattaatggagctcatgcgtttcttcacctctcctctcccaaccatactaaatctttttttctcctttcgctttcaaaactataatttatcattttctcattagaaaaacaaaagaaagtcccttgcaaaaatacactatttccaagattgttttcacactacaaagcccaaaaacaagcgtggaaatagcttagttacaatattaccataacgcaagactccattacaagatcaagaaagtagaaataagaaatttccgcaaagaagaccaagaagaactaacgaaccatcttcttgggccaaaataactctagctataaagtacacaaatctctctcgaacaaatccgagaaacgagttaaattagaaaatatgtgacaaatgtttctgtatatatgtatgtatagaaacttgaggatatggttttagttgtgaagcgggtttggaccagaggggacgagtcttttgtcgacgccgtaccttggatcaatctccggaggaggaggagaaagaagtggctgcttccgactgctacggtggattctctgaagctcaatgcacatagaacgcgcgtaaggacgaatgaaggaatcacacgaacggtgaggagtcacgtggtaagggtggtggttaaacctcggaacgaatcggtgcgttcggtaacggaagtttcttgatgttctgtttccttcgtcgacgacggttgaagaagcggtggaggatttgagaagtaaagagacgaagagaagagagatcaagatcagacgattcaggtgagtcatcgtcattgttttggtttccaagagagagcgagagagagaaagtgagaagtggtcttggagaagaagaagtttaaaatcgagagagggaagatatttggtggaagcaaattgggatataaatgcaacacagaagaagcacatgaatcgatgttatgacggttagttttagtaaatgagagggcaaaactggttatacaaaaaaaagtgggtccttcgcttagttcgttttcattgacataaataccaacccgtgaactttattatatacatttcgatcctagatttatttcactttctttagctttttcatacaatacgttatacgtacaaaataatgggtttatgtagtaattacgtacacaagataaacaagaacgtgtatttgagtggtttcgtgactctcaagttaactcctgggtctttatcggcttctatagtttaaaggccttaacaggcccaataggagtctatctaaacccaactacctataaattagtaaagttaccaaatttgggatttatttattttgcttttcctcctttcaattgaatcaacaactttaacttgaacacaactctctccctttttatgttagaaccaaaacatcatcataaaagcaatagacaatggctcttgtagtcttgactttgattgtgctaatatgaatacagaggaagtcttataggtgaaagctcgaaaaaggaaaaaaaaactttaaaagtaacagctttctttgaagacaagaagaatgaatctcagtaatcagtaagaaacatgaaaggtccctaaaaagctgaagataatatatacatcaatacttgagttcataaagcaaagaattggctctaagtgataagcaaactttatatgaacaaatcaaaaaaaacttttgatctagttctaaaatgtggagcaaagaaaacaaacaaaaagtggggatgaaatactatcagagagaactatagttctcaggttctgattcattcatcagtatccgaaacaggaagatagagatcgatttggttacgcatttcagctgcgtggtttgcaatggaatgtgatctcttgtgaccacctaaagcttggcctgatttgaacatcctgaagcaaattgggcactcatgacctttgctcttcaccttctcaccaccttctttcttaaccattgaggatttgctatctttgaacctatgatgaatcttgctgtttgtgtctgcacatgaatcagtttcataagaaaacaaggctctcttgcttttgctcagctcatactttgttcctccctcattactattcctgaacctgatcaatgagttgttgaatccagatccaaatccagtgttcctgtcaacagaaatgtctgactccgacttacttggaccattcatgaagtaatcagaatcagagccatctgaatcacagagactaactccatcatcatcagcagatctccattggtcatctactgcattcttcacattcatgatcttaaactcatcccctgaagatgacttattctcaacaatcgcagagttgttgtcagatgactcaccaagagaattcatcaccatgttacgtcttttcttgaaactactagaatcactcgacaacatcatcaaattataagccccatccctacgttcttggtcaatctcagaaccaaaagacgagctcccattactcaaagattcagaatttgattgtttcatgaccaccctcttggatcttttcctcataggagctgaggaagtctcactttcagtatcagattggctattatcatccatcaacatcttctttacctcaccgtgacaagccatgtgacctctaagagctttcaaagaaacgaacactctaccacattctctgcaaccaacttgttgttgttgcttatgtttctgagccatcatctttctctgatccaccaacctcttcttcttattgccattgtaaccaactgaattctcgttcgtatgaattctaatgtgaccaccgagtgctttcccagaaggaaacgtcttgtaacagtacttgcacaaaaacgaattctctttcccttcctccatttgaaaatttgaccttcttctcttagacaaatgatcaaacagcaaacaagcaagaaagaatcaataaaggtttctcctttacacacgaaatcgaaagaagtaaagaacccatttttaatatctgatgagtttagtttacctcaaatcaaaatctatgaatgaagacgagtgctgcataaaccgacaaaactgatacagagaagaaaagagaataaagaagcagcaagtttgatgctttttttctttcttgtaatcagattcagagatgtgacagtttctctgtatagctaagtacaagatccgaacttcaagctaagaagaaacagagaggagaaaagtaaaacaagcttttttgtgtaatttccacagtaaagtttagatttttatttttagagtttgggaacaaaaaagataaaaaaaataagagagaagtgttgctaacacgagtaatcaaaggtcagctgcatttttggatctattcctcttcatctctccggtgtgtgtgttgttgttcaatttcatgcatggaatcaaaaagagatagagagaaaaagcttttggacggtccagatctgtttagaccactttgttataatcacaccatttccttaacccattcctcaaatttcaaaaagatcacacatttacagaaaagattcaatttttttggctatcaaagatttttttccttatagtattaaataaaaatcttgtgtagactttgaattagaaaactgttattcgggttagtgagtgggtataacaaaccatggggccaaacacaggctatttagtaatagagaccttttgaagtccaaacaaacaacacaacaaagtctataaaagtttgtccttgagaataccataattggctatcttcccacatcttctcctattctaaagcaacaaactttggcattaaattttgtgaggttttaacaacaatggagatttttcataatcttttagccaacaaagagacaatttttatgaaactataggaaaaaatccaaaaaaaaaccaactaatttttatttggacgtttaatacccaattgtttttggtcggacgaaaaatacacaaaacattaaaactgtacaatttaatatccaaacaattaaatgttgttattttcatactcacgatttcacaacaaaaataaaattttaattttacccttaccatctcaattaactattaatttttagatgatatgacatttattttataattttgaataaatattaattttatgatgtctaaaatttaaaatttcagttttattagaattatttattttaaaatttaacattaaaattaggggaaaataataaatattttaaaatagtcatttttacaatcttattctatcgtcccaatatcaaagagacgttttctctttgagaaaatctagaatcgaagattaatgtaattcgctgagattcgggttgaaattagctattttgctactaaaaacaaaaatagccatttttatgaattgataaatcttgagaaagacgatgagattcaggttgagattttgtcaaaaatagtttgattcgtgaaagatttaaattcgattaaagagtttctcactacgaagaagaagttaatatcgaatttgatgttggcaaaagaggacgacggagattgtttaccgtccattttaaaatatttttgattttctctaattttctgttaaaatttaaaagaaattaattgtaataaaaatgaaaatttaaatttttagacaccagagactaaaattttcataaaattaatttttatccaaaattataaaattaataacatatcatctaaaaaattaatagttaattgagatgataaggataaaattggaatttatttttgttttaagatcgtgagaaaataataatatttaattgtttggatattaaattgcacagatttttactttgtgtatttttttataacaaaaaataattgaatattaaacattcaaataaaaatagttaatatcttttttgagttttttcttgaaagtaaacccaaaatagttccattttttttctcgttcaaaagttttatttttattttattggtaatgattgtttctcaaggcaaatgccagactttgccttcaaacttcctgtatataaaaatttaaagatcaaagaagagaaaatcttttacagcaaatcagagagattatgacattctaagtaaatgattttaagaaagagggccccaagaaaagtgaaacaacagcccattcacaagaatccacatgaaaaacaaaggctggaaaattcttttaagtctaaaactctcactactttttaataggaacatttttgaaggaggaccccataaaccccaaatatctctcccatgattctgcaagttgttgagaatgatgtttgcttcttcacttgtttcttgccttgttttcccagcatccattaccaaatatctcctccatgattctccgggttggttgaagatctttgccatttgttggaacattcaaacacctcgaagcatcccagactttggtatctattggatcattacaatccttcaacttcttctgctgctctccaggaacagtctcatctttctctgcacagttgactgcattacgtgcaagttcaaaggaagtgcacgagtcatcttccacgttcaatctctctccattgttcccagaaaatctatccatgtattcaactgttgaactcatcttgtgctcgtcatacagtccagtgccaccttctttagtatcatcatcatcttcatcattgctgctatgactaacatcttcttcaccttcttcatgatggagtggatacactttcttagtcccttgatgaagaggagactcgattgcagagtcttcttcatcttcttctacataacgagtaccagaagagcctccataacatccatgccattcatcatcatcactatcaatgtccaatataaaagctctgttctggatggctctccttctgaggacaaatacgttaaagtagaagctaacaatctctttctgagttcgggaacaaaatgcagcttccaagtgcctccaaaaattctgccccaatgttacaggattggaataaacaacctcatgaaaaagttgtgcatcttcatcgctccacttcagtgcacctttttcccccatctcacataaacccagttctttgaatgtctcatttccaaacgtcttaactaattcttctctagcttctttaatgtgctggcacacacacctgacagaatccctgtcccggcatacacaaaactttctacccttccctactatgtcatcaatatgtgcaactgtagtcaaaccaggcatgggaataacagatgtaccaaacagcttctcaccatcagcacatccactaatgtgattttgaactgacatgcctgaggtttctatgttcccagtctgactgccttcccattcaggaatctcggcttgatgacctggtccaatgggcacttgctttttggcacgttgatccaagagtaaataatagaaagtctcaacaggagcaaatactcttggaggtatatctagctcaaaatactttccagaatggggagagtaagttgcatctcttccaccacaaccttgtgtatcccatgtaaaagtatcatccatgtcatgaccagggtaaacataattggactcttcatcaaacatatcaccttcagatgactcaccgccttgtgacttacaaagatttccctcattcactattctccagtaaccccattcaaaagagaacagcaaatcacataaggaagtttatcctttcaaaacaagactaaatcccgcaaagaagttataattacacgtattatttacccgtggcaacagttttctggaaaccagcatggtgaggactaacttcttcaaactgagtagacttatcgttatagtcaagttgtctggaatgtttgagtgggagctcatgaaacttctcatcttcaaaagggcgtttgaatcccattttcaacttgcataattggtaatcaaatgcaataaactctaagaacgaataagagaatgaaaggaaaattcagacaatggaacagtaaaacaacaacattcgcacttgacagtgaaacaagtaaatgataagattcggattcctccacaaagttatagcaaatgcatgcaagaaaccttatacaaaccttatgtaggatggctatctgtaaacgttcctattaagacaataactatactatcatgctagtttaacacacatccaccacaacaaagaactaatgcttaaaaaacagttcagacaggaacaaatgtccagttaacatgtagtatattactcacctctctaaagaagtaagctcagataaagttttaggccaacttcaaaaagatagaaccatactagaacgccaccaatagactaaaaatagggataaccaataggaatttcaggcttttaaaagcttaagctggaaaaataaaaaatccccaaatcagaagaaaccctaaccctagactccaactacccaaaaattaaccaaatcaagtatgaattggataagaattgatcaaacctatacaaactcagagaaaaccctctaacaatttacagatctggaaagccctaagctagatcgattaatatgaaccctagatctcaatcgggggcgaaaaacatgaaattgacatcaaaatcgaaaggaatatttatcaaaattgatgtaaatagtgaaagaaaacgatagatcaagatattaaacaactagagaagagatcaagtaccctaaccctagatttttttttttttgacaatcgaaataaaattagtatcaatagatagaggggaacgagaattagatgatatcaatagcaagaataatttagaaaaaatcccaataaaattaaagaaaaagacagaaaaatttggatttacgatgaaacttttggggaagaagacgagagaagataatatcgaaaaagtggatataggttcctggatctattttttctaaacaaagccggcccaaaacactaattcgaatttgacccgcaaacttccctaaaatcgagctggaccccaaatttaaaagcaatacactttttttatcaagtccttattgctttgtaagttttacacttcattccttatcttttccaatgtcacaattaatccaaaatttcaattaatttgttgaggattttagcatactattatggtaaggcaaatagtcaaagaaattcatatactattccagctaaggcagattcagcaaatacatatcattgtttcagcttggttacaacagaatttataaggaatcttaagatactatattttagaaaagacatatagtttggttgaagttggcaccttcatgccacagcaggcatatccttgagccatgaatcaagcggtttaccaatggagtagacgatgaaaccgatctcacgcagcttcactgcatcaacaacattcctaccatcgaacacaaaagctggtttctgcatattgtcaaagattttcttgaagtccaaggatttaaactcatcccattcggttaagacacataggccgtgcgcatctttagttgcctcgtaagcatctgagacgacattcacttgctctgagataccttcagctttaatctgctgaagaggaacagggtggtcccagtcaaacctagccatggaaagatctcttctgatctgttcttcaagaacttgtgggtcgtatatgctcagcttggccttgtctgcaactaatctgttacaaacatcaatcgctggagtctctctcgtgtcacctgtgtccttcttgaaggcaaaaccgaggatcgcgattttcttgcccgagactgtgttaaacattgaagaaacaacccggtttgcaaaccgtattttctgatagtcgttcacctttacgacttgtttccagtaattagctgcttcgggcaagccgttgcattcacaaatatagataagatttaggatgtccttttggaaacatgatccaccaaaaccaacactagcattcaagaactttggaccaattctagtatctgtacccacggcatgcgcaacttgtgtaacatcagcgccagttgcctcacatagagctgacatggcattgacagatgatatcctctgagctaagaatgcatttgctgcaagcttagagagctcagcggaccacaggttcgtgcaaatgatttgttccactggaacccaatgagcataaacatctcttaaagctttaatagccttttgccctgctgcagtatccctaccaccaatcaacacacggtctgggttataaagatccttaattgcagtaccctcagcaagaaattcagggttagagagaatctgaaactctatgcctttgctgttatgtgtcagtatcttttcaatagcctctgctgtcctcacaggaaccgtggatttctcaacaacgattttgctagatttggagacatcagcgatcatccgagcagcactctcccagtaagtaagatcagcagctttgccagcaccaagaccttgtgttttggttggagtgttaactgagacaaatacaatatcactctcaaatacatgtttctccacgtctgtgctaaagaagaggtttttccctctgcattgtttcaccacatcttccaatcccggctcgtaaataggaagcctatcactgttccaagcattgatccttggttcagagatatccacaacgactacttcaatctcaggacacttaagagccatcaccgccatggttggaccacccacataaccagctcctatgcagcatatcttcaccatttctgattttcaaaacgtctcctgttaaagtacaaagccaagaagatatagtctacgtaaatcagtcaattatacaaagacaaaacctttaatagaaacaacaaagtgacaatttacaacaactacaagtcgatgattggctatataagaaagtgcggcgttaaatcaaacaccttgtaagcttagatctatcaatttcaaaatgttaacagcagaacatgcaatgtacttcgatcaatctggttcttctgatcacaaaatgtaaaagccacaatctttgagtgtacgatctagaacaaaccaaaacgaacccatctttgatataaagcgtgacaacgatgtcacgacagacgaaactgacaataacgaacaaaacccatgtttccagtttgagaaataacgaatgatctcacaattcaaagtaccacaacaagaacacaatgatcaaaaaaacgatacattttacgaaggaggaatagaaaaaagataggaaatttaccttccttgagagtgaagaatcgagagatgggcttgttactggtgaagaatgagagagaaagcaaaagatattgttgcggcgacgatgatggaatttgcagagaagatgtcttctgaaagttttataaatacactcgcacccacttgacttacacatttcaactttttatttattgctcccaataaatcccacacgcttttttttctttttggttcaattattatgcttccataatcatttcgttacaaaatttactagctaaagattatgaagagattaatttggacctttttgggattaagacttaagaatcacttgtttatctcataataatctcttgcttttataattgtaacactaagctaaactggttcagtgggtctcaatgacaactaacttttaatgatgttttgtgctgttatgtttttgtcaacaatatgcaatatgcgtatttaaaaccgtctaatagtatatcaacatatcttgatttaaatatatttatctaaaccgaaatccataactaatcataaacttttgtatacattacgctaaaccaataaaatgggaaggaaaaatcaagaagtggagtttaagaaagaagtgaaccaatgaacagagtctttaggatatctcttgaggttgtctctgtaatcaacgaagtagagaccaaatcttgaactataacctgctgcccattcccaattgtccaatagcgaccatacgaagtaccctttgacattacatccatcctcttttatcgaagcttgtaagctagaaaggtaatcatgatggtatttgatcctctttgcatctttgagagcgtcttttcttgagatcagaatgctgtttgggtcgtccattcctacacaaacaaacatcattacatttataaacactctttcttgtctagatagtttcagagatgtgtgtgtgttttaccattttcagtgatgaagactggagggtttccatatctatgtttaatgtaattcatcaagcttctcatccctctaggcactatgtacaaccatatcgaacttgcctgtccgcaacaacaacaaatgtaacacaagcttagagaaattcgacagtactaatcacttttgggagaagtataactaattagagttactatataatgtttcttaccctatctccaatcgtgcttaaacccttaaacgctgaaaattcaaaacaaagaattttaattaagatcagacactcatcatgactagggtttacgtgaggtagaagtataagtatttacgtagagtgacggttccagaatcagaaacggcgtcgtgtagaagagtgccaatgagattggtggcattgttccttgcgtagtacgttgtgtagtgattaatccctacaaaatctaaagaacccttcaccagagaagattgagatcctgtaaacaccggtaatctgcttccgactctgcttctcatcgagcttgggtaatccccaaacatcaacggatccaaaaacctaattaagattgtttaaagatatatgatcacttgttataagttatggaacagagctaagttgtgtaagaacatatacgtaccagccaagttgaaagtcttgagctctttgtgcagcttcaatgtcctctgtcttgttcgactctggttcaaaccacattacatcaaacgcaatccctaacgaacctccttgctttgcctatcataattatacatcaaaactgtatatatccttttttttcatgtaacatcatgttttcactttagtattgactaaccttatactttttcctatagatatcggatactgtggcgtgagttaaaataacattgtgaccaacaatgtaaggctcggtcgatgagtttccttcgcgacaagtgagcttaaaaagaatagtgcaacggcctggagcttgtaggccaacatcatagccttgtatcgcgaacgtgtgtggctcgttgaacgtgatccagtgcttcactctatctccaaatctctggaaacaaacctccgcatacgctgcaaaatcatttctacaaaaaagggtacatacatgcattgcctttttaaaattagtttctgtgtacatgtaatagttttactgaatgattaatgatatggttttggtatggattattacatgatttgtgggtttagccaaccgaggtatcgatcatgaagtgcttgtggaagatcccagtggtacagtgtcacgtacggctcgatccctacaatcattttttgtctgtttatacatgtgaaacttgaccaaccattctttaattaatctttaaagaagaagaaaaaagacagatccgatgattgtagatgcattataactactgttgaatttgagatcattagtactcttaaaataatgcaacaaaactcgataaaatacctttagcaagtaaagcatttatgagtttgttgtagtgatcgattccggcttcatttatatgtccaacaccatctgtacacccatgcatgatattatcatcaataatccatcaaaagccatttgttgtagtagtatcataattaaaacttaatctaaagtaaacaagattaaaggtaaacatgttaaaaagttacatacttggaaagatgcgggtccaagaaatggaaaatctgtaagcgtccattcccatattcttcataagttgtacatcttcctgccatcaccataattccaatcaaaacttcattaattaaattttcgaaatgtatacttattgaccattttgttaatttattatagaaattggggtttacctcgtaacgatgatactgatcaacagcgacatcagcattgctaaaatcggtgattttaccaaaagtgtgggaaaatgtgtcccatatcgtaggacctctgccttctgccttcaccgctccttcatgctgcaccaattattgatatcattaaattttattataacgttggtccatccatctatatttgcattttcgttttaggggatctattccagcccggaaacattaattgggtgtgcatggttaggtgagaaacattttgagaaagaatttggttttacttgagcttgactttggttattatggagttgaaaaaaaaggataaaggtgaagaagattatgaaaatgttcaaaagaatgggtcattgtttgaaaacatttagtaatttctttagaaaaaactaaattttggaaaaaccgaaaccacaagaagaggagcaactattggctacccgtgattgatgaatatacatggccttgtttacgcgtcatgcaactcaattgtatttcaatttatggaccagaattttaagaacatataagaaaacaaaaacatatttaacacacacgcttcagtatcatttgagccaaaaaaaaaaaattacaatgaattttcagatactgaatagtattagttttggctattctgtttgctttttaaattatttattattttggctatatagtattgggagaataaaaacatatcacatgtgaacctatttgttctgatgtgacctatttttaagtggttaataattttgttttcagattcctttaaaacttaaaaggaaaacgataaataactcaaaaattaaaataaaaatagacaaaaacaaagagagtgggagactggagaggagaggagacctgaaaagccgaagaagcagttccaaagacaaagccctttggaaaactgcctctggaaatgtccgcacatatgcatgttttatccatcatcatcatcatggtcaccatcatcatcatctttgtcatcgtcatgattaatctcctatgagccatctcttccttcaatgtgtttcttctacggccagttacatatatttatgtgtaaatggatcgaaattgttttagatgaataagaaagaagtaagagagaccaacaagaaagaaagaaagaaaaagaggagtgcaagtggaaaaagctatgtaaggggtactactatatataggaaaggaaagagagacctaaaatcttctgatccgagccaaagaaaaaagtgacaaattttttgtttttttagacaaaagaaataataatatgataaccactgttgttaatattgagatgcatacatgaagctagacaaaaacaaatatgaaaagtaaattcaattatacgtatggtataaagtaagtgagaagttatatggatgatatttgatgttaaattgatttgatcaaatgaaaatataaggttactcaacaaaaaatctagtcaattttaaatactgttaaatataaaaatttgcttaaataattgtaatttttttttgttgtattccaaattaattataacttttctttattttgatttgttgagagctaaaatttttcatgtaggatatctaatatttgtttaaaagaaaatcaagagtatttgtaggtgttgatgactggtatggaaccacttatgcattgaacaattgttttcttgatttctttaactaaaagtctatcactattttggggttgttaactattggtaagaataactcaactttaatacatggaagatttcaagattaaggtcctgtttgtttgatcatttggaattatcatccaaatgatccatccaaataatccatttggatgattcatcttaatgatgtttgtttgattatttgctaattcatctaaatgattcatttagatggagctttgtttgtttgatcatttggatggatcattcacattctcatatatatgtaaataactaaaatgccctctgttaagtaacaaataataaatagctacattctcatattaatcaaagtagagtttgaaaaagagagtttggttttgtcatagtaacgccattgctttgtcccaatctgcacacaacattattcagcttcttacatcaagagatcaatgaggcacacaacattattcagcttcaacaacctccggtttgggacctgcacagacaaattaatatcataccaacaaattcaacatgacagtttcattcatcaatcaaacaaatgcactagctcaaagcctcagactaatctttatcaatatcagtcctatatgaattcaatgagaaccaaatacaaaaccaaaggaatcgaataaaacgcttcagcaaatcatccaccattaaactcaccatggagcgaaataggacaatgatcctttccccaacagtttccattaaacaaagcaaacttcttcgatttcctttactctatagtctataccattactctatggaactgaatcgaaaaattctcaatttccagtaaatgaccaaatcataatcatccgaacaataaaaagaagcctcaaacaaagatccaattcaacacaaatgaaaaccaacccttcatcgataaatgaatgaagaatcaatcaataacaccaattatataacagagggcaagaaaataagatcacacttgggatactgaaatcagaaaagagacagagagaagaggaacaaaaaactcacgtaagaaagatccttcttgtggactactaccttgttcagaagttgaatccagaacctttagagacaaataaacaaagcctagaaacagagaagattgtcattccagaaagatgttaaaaatttcatatcaataagctacatggtctcaatgataaagaagacacagtaaatggtttgtggttttgaaagctgaaaatatgatacttatctacccttgtttgcatcagatcaactaaaaagaaaatgattaaatactaaaaggattcgaagtcatgtgctaactaatgtattggctacaaataccacttaatttgaatctataactaacccacggtgtagtaaatacttgattactctactaatgtacatatttgttattataactaacgaaaaatcaaaactaacgaattggcattgcttcttcttatatgagagattctgtgagcgtgtgtggcatttgatgtctcatgttgttaagagtgttttgatataacctacctgtccaagttctgaatcctgaaccacagtgccgttgcagcaaaatccctaaagagaaaacggatctgaaacaagcaagagcaaatggagaagagaaaccattagattcccatagaccaagcaaagatctgaaacaagcaagagcaaactattgtgattgatagacgtgagcttagagaccaaccaaagatgaatcacttacagtgattcttccttcaatccttaaatccttcaagccaaatctggatcctagctttctgcatcaaaaacacaaagcaacacaaagcaatataagcaaaacaaagctgtaaactaaagctaatcgaagaatcaaaagcaatacaaagcaagcaaagcaacacaaagccataaactaaagctaatcgaagaatcaaagtagccacggagtaaagcaaagcaaacccacaaacaaacaatgtaaccacggaggatcaaaccctagaacaagtgattgcaagaaggatacaaagagaaacaacgagagagacatggagcgagagagaggaagcgagagagagagagagagagagagagagagagagagagagagagagagagagagagagagagagagagagagagagagagagagagagagagagagagagagagagcaacacaaacctgttacactccagcgatggatccgacgagatctccggcgaccgattctcgtcgacgacggcgagatcacaagatcaaaattttgattttctctgttttgtgtcgaggaaaagctgaagatgagatgtggtttttggtgtaattccataaattaaataagggtattattgacattttataattttgactgaatcatcttcagcagaatgaacagatcaaactcagtctgattttcttcattttctggatgagtttaaaaataatcattcaactgaatcattcagatgatctattaaaacatgaaaaacaaacattagttttaatattcattgagatggttcatccaaatggccaaacaaacaggacctaagtatcttatttaaaaaaaaaaagatttcaagataaagtatagactattgtcactatactcaggaacaaaaagaaaaatcatatatttttatcatttgaagtatttatagaaaccatttattattgaaattatatcaaaataactatataaaaaaatagttcttcaactaacaatgtgaatatttaacatactgatcagttgactcaataaggttgaataaaaataatatatcttataaaaccgtagtatttgctctttgattggtagatctccatgcctccatccatttattaaagaacgaaaaattccggtaaatagaattttatttccaattataatgtgtttatttaacaaatgaacaaaaatataaaatgtgtttagataagagagatcttcatgggatcgtgagattggaacgagtgtatggcgtgagataatgtgaaagtgtggatgtttttgtggccccctcttattataaggcttttgttcccatttgctttttgtctaaaaattctgtgagcatctcaaataacctttggcttaaagcgaatggaaaaaaatgacaatcaaacaactaataatataagaatcaaagttgccaacagagaaaatgataatacacaaaaaaccacgaaaagtagacaacagaaaaagattgcatcaaaaagtaaaaattattgataagataaaattagtgggaagttataatggacatatgtggctaatgtattttatttttgttagttaattagttatacactggccctgttttttgattgatcgctaagtcagctacctgcgatctaaaaaaagctctcatctctctttcactttcatttctcctctctttcatctctgccgcagtgactgtaattcggccattccgtagacgctggaatttttagcgtctcaaattctctttctcctatctcttcagatctatcgctgcgactctttcattcatctcaccttcatctctccttcttttttcttttatattttgtgccgccggtgcttgtcgcagcaatcaacaaaaaaacagggtaagtatataaacttacatgtaataaattatatttttataattaatggggtcacttgacccccttctttcttaataggtccgccggtgtgcgtaagtaggagattcatttgattaattaatgaatatagaagttcagaagtggaaattattacgagtgtctcgcgaagttattcaagtgcttaattagttgcttaattttgttaaagttatcacgcttgacacgtatcgaattattattggttttaaacaatattttgctttaacaatgaagatgtggaattttgcacaattatccacttgtgatgcaacgtatcttggtgttttttgttagattaaaacacgttagtcatatttaccgtgttctcgtttttcgttacaaattttacattctatgattttaatttgcgttgattgtattcataattacattagttaataatcttgctttcttttttaaagagggatttgttgctttcgttatacctagccaaatagacttctgatagtttgtgttaaacgtggattatattttagtaatctttgtctatagttttaaactttttaggtataattgcttgtacttaaacttaagatacattatatgattgatttggtaaatttccacataatacatttcatgttaataaaactaaatgctgcatttgagttttcatatttgttcacacattgaggttatgtatttgtgattgtgaccctcttatatgaaaaaggcttgtgttcccatttgcttcttttttttttcttccaaataatacatttttttccccggattttattctctaaatcaattactttatgttgagcatttacttttttttcttcttcttcttaaatagatgtgttgtgattgttttttaaaaaaatatgtaagagatttcatctgactaatgaatgaatgtataagtcacaacacaagtgctaattattggctcatgaagtcattgaaatgttaagttgttttgaaatttgtaacgcgacaacaaatctcattaaccattattgtttcttttatgaaaaagtggatggaggattaggggtttgcgcaattatggatcataatatgcgtttgttagattcacactaacaagtcaacgacccacattacacacctctcttcactctgtttttcagatgctcatgcaataacgtcacacttttacacttgtgttcacacgtatgacctttattaatcaatgattcgaaaacgatttcgtaccaagttataattgttaggaatagccagtatcaaatcatcaaccctctctaagctacagccagcagcttagaaaccaattttttcttacgggcaaattcaaaatgttctcaaagccaaagaaaccaagcgacgagcttataatagagatggtgtctcaatattcagacttcagaaatcaacacccggcatatattatggccgttacgcattcattattcaaaacgagacaagtttttttaacaatttggccaaaacaacaaaggctgtgttttttttaaggttacagtagcaacttccataaaagtagcagagcagagatgtatctgtcagttcttccttccctctgataaaataatgtggtatccgtgcctgcaattaccacgcaattacattcatcatccactaataaagataaattcagatagaagagaagaaagaagagatcggatttggacatacgttgatttgaagggtgcactggtgactccaacaggtgtattaaaggcgacatcttggaatggacctgccatctttcctcgagggaaccatccaagatctcctccttttttccctgatggacactcagagtactctgctgcaatctgagatcgttccacacacaaatcgtgttaagattctccacaattcataacacacatctatcgaaatatatctaaccgaaaactgaaacttgtagatgtcgggaaagcaatgaactatgaggtattgaatgtgggttttctataagcggttacgtacatatcacagttagagatggaataaacaatactatctgaactatcttagattgatgttttgatctcatagacaaaaaagaagaaggatattcacctttgcaaactcagcaggaggaaccttgtctccgttgctcaaccaaccatcctgcaactttttgtaggcctcgttgatctttccttgcttctcgcacaaaacatgtcttgctgaaacaaaaacaattggagatttgactttaatgctattgtactaatacaaaagttgtaagagaacttttggatccatatttgtttaccagtattttttactcatgaacaaaggtaacaggcacagaaacgaatccaaaaaacacacctttaacataagtgcatgtcccaagaccatctgcagcttttcctgcttttcctttacccttggagggagcttcttcactaccacttgcttgctttcctttacccttcccaccagcttttgcgtccttccccatcgaattaaaactataaaaaacaaccacgattaaaactttattatcaccatcagattacagggttttaacttttaacatcaccacacacatcttgtaaaccctaaaccctgaaataaatccagtgaacttttcaatgcagatttaaagccaaatgcaagtgacttggaatctactacactggaagcagatatacaaatttgtaaacttaaaaaaatgcttcaacccgaaacttttggggaatttaatcaaacacttagtaagctaagatccatcaaattcagaatgatcaaaacacaaaacaagattacagattaaaaaatgagtaatttaacatttggacaatcgaaacgcaaagagcccaatatagaaccggtgcgtccatgcacaagataacatcgcaaatggaaaaacaattatctagacggaagatttagcgcaaataacataaaccccagttttcaatttctagcctaaaaatcagagaattgaccaacagtttacaaaaccaatcggagaaaacacaaaaggttactattaaaagtggaatgaaatatttgattgagaagccaagaaatttacaaagtcgagaactttaccttgagattcttcttctatcagattgaacgatcgagcagagagtgagagagagaaagagagatttgtttgctgaaaagtcttgtggggattagagatggaacattaaacccattcattaatatgggcttggccattcatggttgggctattaggcccaataagatactcttcttatcaaatattttctatttttcgtaaatttaatcgcgccaaaaagaaaataaatatttttcctattttcgtaaatgtctgtctctgcttttcatttgtagagctagctgtctttcagtatcagagtgaaattttagggttttacaaaagggaggttttttgcttcactctttgcttatttgggttctgggttttgattatttctacaaagtaaccacatttttcactttccggagatggagctgcaaacgatgaagataacgaaagattgtgtagttgaagtcagttctgaagaggaagggttcgaaggagcttggttcagagctgttttagaggaaaacccagggaactcatctcgcagaaagcttcgtgttcgttactcgacgttgctggacatggacggttcgtctcccttaatcgaacacatcgaacagagattcattagacctgtacctccggaggagaatcaacaaaaagacgtcgttttggaggaaggtttgctggtggatgctgaccacaaagacgggtggtggactggtgttgtcgtaaagaaaatggaggacgacaactatttggtttattttgatttgcctcctgacattatacagttcgagagaaagcagttgcggactcatcttatctggaccggtgggacttggatccaaccagaaattgaggtatgaggttgatttattcgaagtgggtctttgcttgaatgtttgaaactgtctctttgttgctctctttcaaaaaggttgaagctttaatccgttttgagtctggttgcgtgttatggttaaaggtttcagctttagtttcaaaaggctgaaacttttctctatttttcgtttgttgagtgttatagttccatggttaagagatcctttcttaaatccggtgttgtttttgcttgtagctgtcaaaattttgttgctttctttgttcttgttatatgctatgattaaaattattaaaggtttagttttggttgtgaatgcttaaaagtagactttaatttgttgtctttgaaggaatcgaataagtccatgtttagccccgggacaatggtggaagtgttttctgccaaagaagctgtgtggtcccctgcaatggtagtcaaagagactgatgtggatgataagaagaaattcattgtcaaggactgtaataggtacctgagctgcaatggtgatgaggcgagaccaaccaacattgttaattcgcgccgtgttagacccataccgcctccttcttcagttgacaagtatgcattgttggaatctgtagagacgttttctggtttgggatggcataaagggcaagtgaggaaaattctctctgagaaccgttacacggttagattagaggctacacagcaggaatctacaataagacactcagatcttaggcctttcatggtgtgggaagatggagtttggtataacgatctaaaggtatcaattacactagtttcaatcaacattctgacagttttggtttattggtatgaatgctttatgtttgtttctattttcagcaaaaacccataaaagaaactcctccaaccatcttgaaaaggaagccaatgcgctcttgttctgctgctaagtcaatgactcctacgagtgccacaaagcatttgagaagtttcctgaattctaaggaaattagcgagacacccactaaagcaaaatttgtatctgtaagttagacactcactagtttcctttgctttcgccatgtctttgattatgcttaacatatctgcgttacctgaaattaggccactagagaattaggaaaaaacaaggctgatgctgtgatgaatgacaaaactcatctgctcataacccctcaagaaacatcaataggtaaacataatcttccttaactcattgtgtttagtttctacatcgcttaatactgatctttaatgtcaatgtgaatctgtttcacatgtaccccagccccggtcataacagtcacaccattgaaacaacaagatgctgaaactgaaggaaaaaaatccccaaagaagacacctgagccagtgaagcatcagaatggcttggaaaatagttcaactcaacacgaggtaaagctagtttgttgtttgaaacataaccattctcacttccactagatggtgcttattatctttagccttcctgattgttaattgtttttgaatgcagatgcctgaggaggagaatagcaacgaaaagagtagaaaaaggaaaagagaacaaaatcaaaactctaacctgaatgaaactggtatgtctaaaatcagcattggccatattagttttggtattctttgtttcttgccaaactttatcatatccttggttaaaacttgtagatgagacttgcaatgtttcaaaggctggggtcaacggtacaagtgatactatacgtgttgatgatgttgatgatcagcctctctcttcttggataaatatacctacaggttcggttcaatatactaaagcaatttctattcaaagtagcttagatgtatcctttattaaacaatcaggtttatatgcttgaacaaattttttataattttattttgcattggtttatgtagtgctatcctctgatcagagctcgaatgtggtggataattctgctgctgatgttgaggaaactcaagcaaaaggtgcactaacgattgagccttttacaaagaatttgccattttggaagacatatgaaatggagaagggatacaagacagtgccacagaatcctcattttagcccgttgttggagttcaaagaagatattcgtgaatggtcagcagttggcatgatggtgagtttctatgggttattagaagaagtaaaaaagctgcagctcgatgtttcttcaagcaaactaggtagcctcagtacttgttttgccgagctagagaagcatggtttcgacattgcaacccctcagtcacggataaacaaagtgttgtctctccaagttgggcgagcaaagaaagtggaggaaaggaaatgtcttgagaagaggattgaagctgaagagattgaaatgcaaaaatttgaacacgagatggttgaggtagaacgcaaaatgttggaactgaagagacgagcagaggttgcgaaagagaagaaagaagcggcggacaaaatgattgtcgaaatgaaatcatctgcggaaaccattgatcaagagattgcaaatgtggagttggagtttataacatctgtgttggctccgtggtaaataagaaaacgaaactatgaatgacccctcttaagctcgtatttattttggtaaaatgaagtagatgtaagtgatctgtcaaatatctttagaccttatgggttattgttgacgatgcggtttagctctgcttttggtaaaattaagtaatgtaagttatttgtccttatggtttattgttgacgttgatgtttattttttatcttatgatgattagaatcaatctaaattacacgcatgttatcttaatttttcacaccaatgtaccaacaaagtcagcaagatagtggaagagcatgagaaaataattatctttaatgcttaagtacattaacaatatcaaagagacagaactcgccagagactgaacaaaattggctcaaaatcaacacaacctttcttactcatttaattcacagcttaaaccaacactaacttaggcttcccaaacttcttggaatcaacatgggtgtcggatcctttatcagtatcttggagctgcaccatataaaaaaccacaaaagtgaattcaaataagctaataccaagtagcctcatattcaaatatcactaaagaagagatgacacaatgcatacctccaccgattgttgcttcaggcagtttctctattgagtacttgcgttgtgtcacatacatgattggtacaccaggaatctataaacgaacaataagaaagttaacatccaaggatcctagccatggatttcaaaaagcatatatatcaaactaacatctttaccttgcgaatccttcgctttagatctctatcacaagtagctactatgaagcatttatgctgattaattacagaggaaagaaacaaacagaagattagactacatgcataaacagagcatcttcttagagaaacaagacacgatggtaaacaaaaccggagctgaggcattacctgagtaactctgtccacaagacagtcatcagcatatgtccctttgagtacacaaggtagtctttcaaatcgtggatcttttgcaatcctaaccaaatataaaagtaacttattaagaatcgacaaaaatgatacaattctactgaaaaactcttctttgaagtcaaaaagctttacctcagagctacacgatacttctgacctaacttctccagctcagccatgacacagtccgtaatacaaggagtgccttcaaatccgaaacgattcaaaggttaacaaagagaaagagaatttgcataactgtaaactgaagatagtttaagtaactcacattttgcgtacaaacaccatcattcccttctcaagatcaatctataacataaaacagaagaaactaagtaaaaaacgatacccatttgcacaataaacaagaagatttcaatcaagttattcaagacaaaaagaactcaaccaaaatcgatattttctttatcatgcacattccggttacagctctattttagataatgtaattgattgtgtagtaccttattctggatagagaagttgatgaaattggtatccaccaaaacccggtaaggaggaaccaaactagagttgtgagaaaagaaaagccctgaaggaacacttggactgatacaaaacaccaccaaaatcacaaatcaaaatccaaagtttctaagaagatccaaaatcacgaaggtaccaatttttgctggagggcaaatatagcttacacgtttctcggaagttcagtgaggtccttcttgtttggattcagaacctcctccttgtaactgaagataagtatcaagtaaacaaaccttaaagatatcaaatttcaaggaagtagaattgttacttactgtttcaaagctttgtggcttatcatcatcttcattactgcaaacttttgaggtttctttgtccttcccatcgtttaaccaaagactaaaaaaaaccttataaccttagaaggagcagagagaaatggagactaaagggccaaaaaatgctctctttcaaaacaaaagacaacgagagaactttagttcttgctcttctctcagatgcaagaatcgagcagaggagactaagaatttgtttgttaaaaattagggttttgagtcgtttgacattttaaccaaaccgaaccgaaccgaaccaagctaatgtgagctcggcccatatatggagctctgtcttttacggcgtctctgcatataccggcgatgctgaaggaagaagctgagggagtgaaaatggaagatgatgatgaagaaccaccgatggctgttcaaatccatccggatgtttctgtcggaaaggttcactcatcaagcgatactgtttcagttggtgtgtctgttatcactggctatctcggcgcgggaaaatccactgtaagtcccttcctttcactgatttacgtgttgggttttggtttttgattgtggtgtgtaatctgattgattttgcaccagcttgtgaattatatattgaacgggaaacacgggaagagaatagctgtgattttgaatgagtttggggaagagattggagttgagagggctatgattaacgaaggagaagaaggtgccattgttgaagaatgggttgagctcgctaatggctgtgtttgttgtactgtcaagcatagtcttgttcaagctctcgagcagcttgttcagagaaaagacaggtgctttgtttctctatctctctttaaacgctggttcagctcaaatttatgatcttctatctaatttctagacacactgagatattcgtgatgattgttaggcctaaagctctaagattggtgatggctttacaaaccataggcacatatatcgccgaaattgtagtattattacttgcattttggagaagaatgtatctttcacttattagacgttctgctttttctttcttctatgcaggcttgatcatatattattggagacaacaggtttagcaaacccagctccattggcttctattctttggttggatgaccagttagaatcagaagtcaagcttgactgtattgttactgtgagtatcttattcacttctcctttgttaagcttgaagctgctctttatacttctcctatcatcttgtacacatcagatgaattgtaaaacatagaattatgctattgacaccattatttctcttagtaaaacatagctagtgatctttcttttttctggttagctctttgtaacataaatgtctcaggttgtgtactgtctccctgtttccactaatttattgcttaggtatcttgttccaaatgcatttactgacctagctgcttgaacaggtcgtggatgcaaagaatcttcgttttcagctcaatgagcgtcgtgactcatcctcgtttcctgaggcctttaatcaaatagcatttgcggtaaccattttctgacaaccaatgggtacactgacttatggccctctacatcatgacatgacttttttaattcgttttgcaggacacgataataatgaacaaggtggacttgatttctcaagaggagtctgatgaattagagaaggagattcattccatcaactcgctcgccaatgtcatccgatctgttaggtgccaagttgatttgtccaatatattaaactgccaggcatatgattcaactgttaagtctctgaaacttctcttctcgtcttgattactaattatgcttttgactgtaaaaactgaacttatcttccttgtttactgttgaaattagcatgttagtcgtctggaatccctgctggaagcaaataaatcattaacgacgacagatcttcacgatagtggagtaaggactctatgcatcagcgaaccgcaacctataaacctcgataaggtagcaaaaatgtattgaacattcttggacaagtagttaagaaatattgttgttcgtgatacaccaacttgttctcggtttgacaggttcgtttatggctggaggaaattctgtgggataaaaaatcggagatggatgtataccgttgcaaggctgtgttgagcattcaaaactcagaccagatgcatattttgcaggtaatgtagtctgtagtcatgaattaaaacatgagtaaggtcttatgatcctctcagaatttgttattgaatatgcgcaggccgttagagatatatatgagatagtgccagctcgaaaatggagcgaggaagagaatcgaacaaacaaaatagtatttataggtcatatctcctttttgcatcatagttaacattattgctcccaacactcgcttactgattcaaggcattgaatatattgcaggacacaaactggatgaagaagttctcagaagcggattaagagattgcagaccctagatgaaaaagcaaacttgcagtgacaactagattggtctttttttttttccccccaagttttaccgtcatgaacaatactctgatcaatttttgtataatatataacaagtgtgtaaggttatataggtgtttcagttaacgtctttacactcctggtttaattctgtaagcaaatccaaagcaagaagattgatgatcttgaataacttaataagatagatatatataagctaagaaataagataggtcatatgaagctttgttgaacaaaagatgtaaaagaggaaaagaaactgtcaccaagatttagctgatttgtggattaatttcatatatatattgatgttctcgacacaaaatctctacttacttaagtgggcttctgatgagactttatcttgggcttgtaaaatctgactcaacaagcccattggttatatatatatagttttactagttgctagaaaagagcaaagcaaagagtagacgcctagacggagagccttttttagggtttcgaaacaagagcgattgatcatgaagacacgcagcaaaaagaccaaaaccgagaacaatcaagaaaagtcaaaagagaaaaacaagtttgatcaactgcctctggacctagagatcgagatatttaggaggttgcctttgaaatctgtagctaggtttctcacactatccaagtcatgtgcagcaactatccgcagtccaagtttcatcacatctttccggtcgccgcagccttgtaccttaatcgcttccgctcctatattcaactgtcttcacccctttaaacctagggtactggtagaccacaagttatccttcttctcatcatcgtcttcctcatcatcatcaacgtcttttctatcgcgtttgacatgtccgtcgtccccataccctcgtcacatggagtactattgtcattatgtaaatggattgataagcgttggatatggtcgagagcaaatcgtaaccaaccctagcactggtagattcataactttaccaagtgtcagaacaaagagaaggctcgtaaaaagttttttcgggtatgatccagctagtgatcaatacaaagtgttgtgcatgacggaaagactttatggccatcaagaagacccatcttctcaacatcaagtgttcacattgggagtaaaaaagccatggaaaatgttagatcgcactaccattcctgatcaccgtccttggactaacggtgtgtgcatagatggtgttgtctattacattgctaaaacggggcaaggtatgtcacaactgagcttaatgagatatgatttgagggatgacaatttgaatgtttttattagtttacctgaagagattcgaactccaagtctatacagtgacactttattaaactacgaggggaaactagccatagccattccagttacatcatatatatttgatgtgtgggttatggatcaggatggcgaaaaacatgaatggttgaagaaaataactttcaatattgaaccttggcagagttcatttgacgatatacgcattaaaggcactactcttacgggtgagtttatcttcgcaccaatgaacaattattgtgatgatgagttttatgtcttccattacaaatcccaacaagaatagctttacaaatattaagattgaagtttcgggagacgaggatttttataaaagagtaattgttttctcggattactttgagagtgatagattgttgccggagagacaattcatgatttgatacccatatatgtaatcttattttttgtaatttcgttgattactctgctgaagtcttgttcttttttttttttggtttaattgagtatactacctaaatgcactatttgtgtatatggagattggacatagtaatcaggttgtatgtttcaaatgatggggtttgttttggtaaagggtttgttctgcttctagcggcaaatgtttggttaactttaatacttatgcttattttcaagttgtagcaaatgttgggtcaatagttatgcttagtttactttaaaacttatgtaaagcatgaatgtttatgtgctaatggaaaattatagagaggaagagagagatggagtaagtaggtcaaggaaaaggctttggacttttgaatgaaaattgaaatggtaacaagtgtgtatgagtctcttttgttaggttgtagcttgtgaggaaatgtaaacctttctccattagctaaaatcagtcaaccaaaataacaattatcgtcttctttacagtcgtttatcatcatcagatccatttgtcctaagatgatcatttctcttctttgatcttcttttggtgatttgcccatttccgaggacacgcgcggtagattctagatttagggtttcgaaactatagcgattgatcatgaggacacgtagcaaaaagaccaaaaccgtgaacaacaacaacgatctacaaaagtcggaagagaaacaaaagtttgatcaactccctctggacctagagatcgagatgtttaggaggctgcctttaaaatctgtagctaggtttctcacactatccaagtcatgtgcaacaactatccgcagtccaagtttcatcacatcattcccgtcgcagccttgtaccctaatcgcttccgccgctacaatcaggacttgccacaacttgccttccagctttaaatctaaggaccaaaggttgtacttcttctcatcgtcttcttcatcatcaactgtcttttctacgcgtttgacatgtccgttgtccccatatgataatctgatagagtactattatcattatgctagtggtttgataagcattggatgtaatcgaaagcaaatcgtaactaaccccagcactggtagattcataactttaccaagtgtcagaagaagaagagtggtcgtgaaaagttttttcgggtatgatccagttagtgatcaatacaaagtctcgtgcatgacggaaagacgtcatggccttcgacaagacccatcatctgaacatcaagtgttcacattgggagaaaaaaagccatggaaaatgatagattgtactagcattcctgatcaccgtccttggtctaacggtgtgtgcatagatggttttgtgtattacgttgctaaaactggacaaggtatgtcacaactgagcttaatgagatatgctctgagggctgacaatttgaatctttttactagtttacctgaagagcttcgaactctaaaactatctggtgacactttattgaactatgaagggaatgtagcatggccactccagttacatcttatatttaatgtgtgggttatggatcaggatggcgaaaaacatgaatggttgaagaaaataactttcaatattgaaccttggaagagttcatctcgctatctagacgttagaggcactactcatacgggtgagtttattcttgcaccatcgcactatcctgatgatgagttttatgtcttccattacaatctcggcaagaatagctttacaaagaagaaacttcaagttcgtatttacaatgttagaattgtgtctacgtcttcaataattggtctctatctctccttctctctcttgtagtcatcttctctccatacctctggaatatatcagccaaatcaaacaaactcacttctctaagtttcttagccatctcttcaaacataaccacaccttcctcattagaataataatgcaagaacttgctataatcaaacctaggaacttcaagccctctcttcaacgttctctcaatatactttgtagtttccaaccgtttccccgccttgatcatacctccaacgaatatcgtatcgaaattcactaacgggtccggccctttccttccccttctccccaaatgtccttgcaacaacataagatacgtatgcattattggctcgcaccctctctgtatcatcttcctgaaaacctctgttgcttcgcttgcccgtttaatcttcaccaacccttttatcaacccatgatagatactaatatccggattctcaaccccttccaccaacccataagcctctacaactcttcgtttaaccaacagtccatagattaacgacgcccaagttaagttatccacataaacacctctctcacgcatttcatcgaacaccttacgtgccatatcaatcctaccgtttttacacaaccaatcaatcatcaccctgtagaaacccccatccaaatcaccacctcttttcgaaaccataacataaaacaccttagaagcttcatcaaactgattcttcttcagaagtgtttccataatctttttaccagcttcgatatcaacatcaaatccttcatccatcatcaaattccaaagcttagcagcttcaatcaaatcaccaacatcacaaaacccttgtatcatcgtcctataagtaatctcatcaggtttaataaactccttcagcttaataaaaacaaacttagcttcttcaacaagcttctccttacacagagtctccactcctctattcatcgtttccacattatacaaatacccaaaaccgttcatcaaatggaaatagtttacacatttcttcaactctctagcagaagcaagtgttttcaacacaatccgaaatgtcttatcgttaaccaatccacgttttccgatctcttgagctaattcccagaaaagatccatgtttcttgagttcccgatgattgctagcatcttattagaggtagtggaagtgtgggtgaaatcagggtggtgagtttgagaatagaggaagaaacggtgtacaggacgccacgagagtgggaaattgttgcagacttggaggaagaactcgtgagttagttgaaatttggtggaggagagtttagagacgagacgtgaatcaggtgagttctgttgctggtagagaattgtacagactcggagaagatggtcttggtttatcggtgtgattgtggttggagttagctcggtggagaagaagcggtggttgagaatgaagcatcgccgaattgagtttccgatgttaatcatcctccgagaagtcacgacggccacagccataagtttcccggccaatggagaaaacaaaagacaagaactaaattaaataaaaaaaattagggtaaaattataagaggctacaaagaagcccatctaagcctatgtctaaaaatgagtgggaaaatggagatgcgggggatcgaaccccgtgcctctcgcatgcaaagcgagcgctctaccatttgagctacatccccgttgatgtttaaatacgtaaccaaaaacatatataggattagataaaacggtgtcgttagggagcgaaaagttcgttaagttagttagaaagaatagcgaggaaaaacccaggaatttcgcagacacagaggtgtgttcggatctcaaggttgagattcagtcttcttccgccatttgcgaaccatcttcgaaactctttttatatttctctctttccctcccatctctttcgattattttatttatctcaccaaggaaaacaaaacacaaaacaaacaaacaaacaaacccataaatcaagatctctgttttcagacagattattatcggaacaaaatgtcatcatcaggatccgacaaagagagagagacttttgtctatatggctaagctctccgaacaagccgagcgatacgacggtaacataatctctttattattttcgattttaattgcgagaatttatagaaaggatttggtaatgaatgtgcagagatggtggagacgatgaagaaagtggcgagggttaatagcgagctgactgtggaagagaggaatctgttgtcggttggttacaagaacgtgatcggagcaagaagagcttcgtggaggataatgtcgtccatcgagcagaaagaagagtctaaaggcaatgaatcaaacgtgaaacaaatcaagggttatcgccaaaaggtagaagatgagctcgctaacatttgccaagacattctcaccatcattgatcagcatctcatccctcacgctacctcaggggaagctaccgtcttctactacaagatgtgataacagaaaaacactcttctttttgaatcatcatctgcaaatgaaactcaatttgatctggaatttgtaggaaaggagattattaccgttacttggctgagtttaagaccgagcaagagaggaaggaagctgctgaacagtctctcaaaggctatgaggtattaaatttgtttctttagtcaaatactagagaattatgagaagtttggtctgatgcatctgtattttgattaggctgcaacacaagctgcaagcactgagcttccttcgacccatccaattcgtcttggccttgctcttaacttctctgttttctactatgagatcatgaactctcctgaaaggtttcaatctaaaacatcaataaataaatataccaatagagtgtcaactttgttgtaatgtggtttctattaaactgttgcagagcttgccatttggctaagcaagccttcgatgaggcgattgcagagttagatactctaagtgaggagtcgtacaaggacagcactttgatcatgcagctcctgagagacaacctcaccctctggacttctgatcttcctgaagatggaggtttgtctgaaaatcacacagcacacatgatgtctcagaatgtttgagcttataagcagtggttttgttatgatttcaggagaagacaacatcaagactgaagaatccaagcaagaacaggccaagcctgccgatgccactgaggtagtaattcactttaaaatgaggtgtatgaatagttcttgttgggtctaaaggctcactcttttgtttgttcgtttcagaactgatcaaagggcttggaagttgaatgagatttagattcgatgtccagaagggggaggcaaattcctttaaattccatagcttggtttcatcaggaagatgagatcagagacaattgaattcaatcctatattgtttcttttttgtattacttttcgtcttctttattttgttctcaattttcatgtcatcaagtattttatgttacgcaattttattatgatttgatcagcatatgcttttgctatcatacattcccatcagatcaatcaaatgtgtatcaaaaattgccaaacaaacacaaccctggctctaaatgcaaacatgaaaagagcgaaaaccgcaaaaagcttgttatgattattaactctctggacagagtaacaaaaagattattcattgatcctgatggttttattgacattaaaacttcagaatatatagaaaaaagcttatcataagagctgaagacaaaacctaaccatatacaaaaagatgggagaagatgaatgaaaagaaaacatcttttcttcttcctctgtcattcttcttccttatcaaagaaactctgcggcaaggtaaagtcttcctcgtgattcagaatgtctatgtcctcatcatctgatttctaagaaacaaaacagaggtaacagattaataaaaccatcaccacaactctaaacaatgccatgaagtgaaactaaagctatgggaccaaaataacaatcaatgcttgttgtaattactactcaccagcatctcaatgttgtaaaaacgatcgagtagctgcagaacctcatccgcagtgaacggtcggtcaaagctatgtacaggaatagtttgatagaaagactcaatcaataaggatcagagactcatgtatgtattggaagtatgaaagaaactctgagaacaacaaaccttcttccgagatactccatcagaccataaagaacaaagtggcgatgtatccctgcacaccatcatgatcccattagcagaagaaatcaagaaaccaacaaactgatcaatgtgcaagaacaatagacattgaaatgattgcatttgataatggtttctgataactatcatgatacaaaagtaaacattggcagaagcatatagaacgtagctaaaggatcaagatttgagaagtgaaacttgcctcggagtttaacaggaggatagatttcaagggcttctaataaccttagctctaattcaacctgtgactgctcctgagaagcaaatccaataaaagaggaacctttaaaatctcaggaacagaaatggtagagagatagagagaaagagagagagagaccttggagagagaggaggcggaggaaggtaaagctttacagggagagtgtacggacaaaccatcttgctcttcctctttctctttacctcctccgccactttcgtccgttcttccacccattttttagggttttgtggctttgatcccaaatgtgttgaaaacttctcataagctgtttgtgatttgtgtatatatacaggagtgcttgtttgatctctgaactgggccggcccatatttaaggccttgtctttgtgctttcatcccacacacaatgattattttaaaatctaattctttttctgcactcattttaaaatctaatgttattgaatgttattttttgcactcattttaaggggttttagataattttgtttagttaaatatacaaaattataaatctcatggctttaacttttttaagtgagatttgggagattttacaacaaataacatttttcctaaagtcatccaaaaacataaaatcattttaaaactaaaatcaattaatatagggttgaatttaactctttagattcaaagaagataaaagtcaaaatattccaaaggttttgacattattggtcaatgcaaaagcatcttcctaagactatcgatcctaagaaagtaagaacccaactctattggtttccgaaaaagaaaaaaagaagccaagtaatgtattggataaaaatcagattaagagactcggaagaataaaatgaagcaatatacatcaatgaaacactgggcatgatgatccataacttcaaaactagatgagccggggcttcattccttacttctcacaagggttcgttattacaaccatccattttggatttcaattgtttaatgctcggcccctggagtagtctatgttgaacagcatgttcctgcggttctcgcttcccattctgatctgaaacttcttggccaatgcctccacttgatcatcgttttcatcgtccatttccctgacacatctccttctcagctttttcaatgtctccctagagggttcaaatccagccttgatctgtataattagaacatgcattagtttctcagacacacatcattctctcatagaggttaggttttgtctgttaattctggtttaccatgtcatcaacgacggtcagagctgatttgggatcccggttaatgagatgagcatcaaccagtaatgaatacgtccgggaatcaggtttaacacctatgctaaccagatgctcgaatacattcgtggcctcgaaagtctgcaaagcaaatagactagagtcgtaaggccaaatagttaattcatgaaaagaaaatattagagagtgatttgacatagaaacagcaccttcttgacttttccaaatgcatatagtaaagcgttgtatgaatcgatattaggagtcagcccaaaagaggcacttattgcctcaaacgtctgataagcacgatccagatcccatgtgtttgcgcagccaagaattatacagtttagagcagcaacagacttatatggagtatcaccttgactcaaactctccaactggaagtatacctggtggattatgtgacagtgcaaggtcagataagctaagcgttatagctgcttcactctaaaatgcattaatatccagaccatgatactcgacttcgataaacaggttttctggttttgttctattaaatttcacaactatcttagccaaagaccctaccttaattcttgttacgaacaaagctgagaatatatagaatatttacccttaggaagagtcgaggtatacctcatccaatgtctcaaaacctttcttagagcacgccacaaccagcgggtataatgatgtaaaaggtgaaagcatttcctccacaacttctttttcagagtctgcgtatgcggattcaagttcatgaagtgaagtgaaagctttttgcagattccccaacgatgcataggcattaatctttgcaatgtaagatgcagggttggctgccttcctcccacgcagactctgtttcagaatcgtccatgatccttccactaaagatgaactacaagtcctagcagcacttgcaaggcctgctactaccaacccttcatcaacagaaaaaataaccgacggcctagccatttcgcctctagtgatccacttgaacataaattcaaacgcataaaaggccaacttgctattatcctcttgaattgcaacttctgcaatatagttacacagtatccagctagggcaaagagacttgttccgatcaacagcctgcaaaacaaaaatacacatataattgataaacgagactgcaaaagcttcaaatgtcaatagaagataacaaaaaactcatctgtaccttacacctctcgatgatggagaccagtgtatctgtcctacctttggctacacaactacgaacacattcagtaaagacactggtggataacatataaccagatttcagtgccgtgtccataactttcatggcttcgtcattcttcccaactccaaaatgcattccaataaccaaatcatatgattcatcatccggaagagagtccttccccaagaggagcatcctgaccaaattacatcaagtcatgatacattttgaaaagatctacatttacatgacaacagtatcagtagctgctatgcagagataacctttgattcatcagcaaatcttaccgttcaatcatgtaaagtcttaatctttacactatttctagaagcattgttcattgtacaaaaaaggaatctatctacgaactcagagaatctaaccgttcaagcagcttcatggcggcttcagtctctcttgcctggtacatagccttcaaaactagattataagacgctgtattaggttcaacagaaaactcctccattggcgcaacaagatcaagcatatctccagcagaagcacccatcatcaagttagctcgaaggtaatgattgtaaaggttcacatcaggcttattcggcttcccattcttgtcaagcgatcgaacccaaacctcaaaaagctgcttcatgtcagaccaacgctgcgaagcagtccaatccgcaaacatattcagcagcgagttcatgtcaagcgtctcagagagagctctgatacgaggagcaggagcttgatttagaaatcctaatggaactagagattggttgaaggaaggagtgtttgggatcggactacgccaattctcttggtaaagaggacttcctgttgctggattcggtggaagcggcgtggaggttgattgatggtttgatgggtcgtgatctgttgattcggttgcgagcagaggatcttgagagaggaatggtgtaccggaaatggctctgatgggtgaagctgaggtaaaaggattgggttttagggttttgaggagagagattcgagatcgggtaaagagatgagacgccattgttggaaagatttggtttttgagttttggggtttatctgtgtttagggttttctgagttcttctctctcagatgagtttttagacactactaactccggtcgtgacgatctgttctcgatgacggcagtggcattttagagattatccaagaaatctgatgtctttttttcagaagttgtctttgactcctcgacatgttttagtcttttagtataaagcccagcccattaatagatatagcccaaaccttgatttttcaaagaaaccacacatacatcatatgagggagtcttccacaattaaaatttaatatttaaacagaagatatattatttaatgtttaggtgtgtctttaaattaaaaacattgtgtctaaatgtcttggtgaagacctttttttgaaaagatgtctttaatttaaagacctctcacatttaattattaatattttgtaatttaaattttttaaatgttgctaaagacaccttcctcatatgtgcaatggacatgctatggtttttcttcttacaagtgtgtttttgttggttttagttttaaacgcttggtttttatataagttaaggatgtatataacgtcaaatcactttttaatggttggtgttgggatatttttcgcttattcggtattagcgattcagtttgcaacaaatttaagcgagatctttcgctcatggttattgttggtgatgagtttcatacttgacatcagcatgataggaaaacatccatttaaattaaatagaatgataagaaggaatttttatctaagattacggcatattattcatggagttcggtccaacaaagtcccttaatcggccatggagcttgtataagaggttgagtccatctccagagtcaaagagaagcaataaaaataaattactgagaaggaaaaagtgattacttacgttagagctaggtaaggtttatagctatttctggtcgccctgtcaacaccatttcggattatttgtgtgactttgtgacttgtacgttgtaacacaatcacacgttttgtaatgcggatgcaaagtttgtcctgcacatggctccctcgcttagccgctttgcctttaaaaagtacttaatacttaagtttttgcctttaaagagtgtatactatttccaattgttttgtgttcttttccctgtttttctccattattttccatcggttagtgcttcaaaatcaaattactttactttaaaaacatctttatcttattttatcttataatatgttaaataacattttacatttgcaaacgtgtgcatgcatcttttgttgtctttgtggaaagctagactcttatctaaatcctaaaaaagaatgcatcagatgtacgtaaacttaggtgacaaattagtaagaataacaattaacaaagctagtttttcacataaagcctacaatattacgtgcgtcgaccgaccacagtcacacattgactagacgacaggaatgcttttcaccttctctgtttcagagacccacattgctttgagtactcaaaatctaacatttacaagtcatcacacaataatatctgaacttttctttacttaagccttagggtattctgcttattagtacccaagaaatatcataaagagtataaattgtcgatcatcatatcagaataatctcctctctctctaacaaactcgcaaactcacatttgtggtactctcagtgttagacaagtccgatcaagtttaagcagtcatggcggttttgcttcctctgtttcttctctctttcatgtttacctattcaagtaagttctttctatcttctttgaacatttctttgtcccttggcattaagactcaaaatggttccgacattttcgcttcttggttacgttttccttgtaatgctaatccgagatatctgttttgtacagacgcggcggtttgtgtgtgcaaggacgctaacgagctggatcttcagaaggtgatagacttcgcatgtggaggaggtgctgactgtgcacagattcagacgaccggagcttgttatcaaccaaacaccctcaagaaccactgtgacgttgccgttaacagctactatcaaaagaaagcttccaccggtgccacatgtgacttcaacggcgccgccgtcatctccacttcccctccttcgagtattccttccattaaaaccacaacttcttttcatcaaatgtgtatctttttttttttttgctgattctttatttactctgttcttgcagctacgtcaagctgtttatctagttctaggtatgtttcacatcaccttgccttagagtttagattagggttatttccctctgttttcgtttgcttagtgttttctttagatcagtaatgagctctctgatgattctagtcgttgaaatagttcagtcatttgtctactaatgtgtgacagaatctttattactgatttattaccaaaatattaattatatcttcttaaaaattgtgatgatgatttaagtgtgtttataagagtaacctttttgtagttccaacggaacccccactgccggatatccatccaccggaaattcaaccacagcaagtccaggcaccacaaatccatccacaggcaattcaacaaacagcacactacccactaatgataagccgacttcatctacgataacgtttcctgacagtactactatgggaccatctagcagcacgagtggtgatcccaacggtggagaagagctatccgtcagaaccacgacgatcatcttactgactaccatcgctgccgtggcattgagggtttaggtaagatcatctcaagatgatgacgaggacgcttatttgttgtggacggctgagataatgccaagttaattagagcctatctttcttcccaccgaattttaatctttaatttccaattaggattgtgactctcgctcgtcttcttaagtattttggtttatagaaaatcttaatcaagagcttttttcttgctttcttttgtaaatccagaaaaaatgagatgctctttgggttgtattatttttacttataattatgccttcgccaataaagataacatgtttctctttgatagtttcttggttgtttgctaagaagaaaatgttgctacaaggatttcaggttttttttttattttatatttaataacagatgtttggtgttagtgcaccacttatcaattctcaatactataatgtttaatatggtttgtggtaacaattaacacgatctttatcaaggtgttccagaaagcgcaaattgtgatgtttttactctctttttttgggtagttcaatggacttttagttaaaattgttttaaggccttcattccaatgcccaccatcatgatgattttgttctttttttcacctgctttccaatgtatttattactgtaatgtaaagagacttgttcattttcttttagtgaacattgagagtaacatctgcggaatagcagcatatggatcatacagttttaacatcttagaagcgtgtgacaaattctttattctaaaccaaataacaaaattttaacatattagagaaaatggtaattgtaatatctcatttttaaaaagaacagcaataatctttatccttcaaggtaggtttggacgtttggatatttgggttggcttttttggttttagatttagaaatataggacccatttatttatttcaaaacttcagattcggttcagatttaggtttaacgaagtatttaaatataaaaaaatatcaaaaagtatttatattcgattctatgcgaactactagaaaatattcaaaaatctacaaaacccaagtatttttatccgaatatagccaaaagtatttaaaatacccaaaaacatcttaacctccaaatattgtaggcacttaggttattataagtataaatagtactagtaatattcatgatgaaagctaagtgagttcataaaattcaatgttgaatacaataaatagggacaaaatcattgttttctttggtttaaatagtatttttgaatctgatttatatgaatcaattgaatctaacttgtatgaaattattgaatgggagatactagcatcttggtcgctaaatgagataatattttgtgatactttgtgtaacatccttcttataatatgaagaaatgaggtcaataagatttacacatcaagaaaaagaaagctacttgttgtagtgattaataaaaacttcgattatgtccttttttcttaattgataagcttgttgtgagtgatttgtacttgttctgaaatttgaatagatatgcagactttacaagctagtgaagtctagtggaataaaatttctgaagttgtacatttttcaaaacaaaatttacaagaaaaaaaagattaacaaatctttaactgtaagtgtatttctttgtaagttctttgttagcttaactaattgttatgttaacatcattttctgacaatgaaggataaacaaccttacattgctaaggctgatgagatgagggttgcttatgaccagaagctgataacctatataaaaaaactggaacgtccacatcacacaacaaatctggaacatcacagttttatgttcggtacgatagacaagtttattattttataagtaaaatcaaatttaactaaaaataataattagcaacattgtaagtaaaaattatctttcaaaggtaaaaaaaatattttcactcttgtattgtttctttcaccactaaaattattgattaaaatattatttgaatggaaaatatataatatagcaataacttaaattatttgaatgaaaaatatatcacatagcaataactcttggtatacttatattgagaactaaaattaaaagtatttatcataaagttggcgaatgaaaccaaaatgttttaaatcagacacattaaaaatatagatttttaaattagacacattaaaaatatagagttaagttttcaaaaacatatattgatttttcctgcctaaaatattcgggaaataaaatttccgccaaaacaaataaattaacgagaaatagatttgcagtggtttttaactgatttttaaaggaattctaagggttttaaaaagatttttaaaggatttgcaaggattttaaaacccttgtaaatcttttaaaacctttgtaagtgttcacaagagttttaaaatggttcaaaaattattaaaaagatttttaaatggtttacaagggtttttaaaagatttttaaaagatttacaagagttttaaaaactcttgtaaatcttaataaaactttttgtaaggtttaacaagagttttaaaatggttcaaaaagagttacaaaatgttttaaaatagtaacaaattttttttaagagtaaaaaatgatttaaagacttcataagatttttaaaatgatttttaaaagatttacataaaatcatttgtaaattcttgtaaaactttttatattttttgtaaaaaaaaaaattttgtcatctaaaaataattagagttcaaaaaagctaaaataaatgatccaaaaaatataatccaaatttgcatagatataggcttatggaattattcctggcgtagaagagaatctaattataattaattagtgaatttgtcaagcatttgtgaaactatgccaaaatatccaaccaatatatagtttaataaaataaaatatagtttaatatattcagcttcggtcgctgttttggattcatgtacaagctcttcgttgacttgtcttcaagagatcgttcatctggaactctgttctgttgcaaggtaagaaaataaatcttgaactctgcttttagggagcttactagtctaactctggattcttctgcatcttcttttcgctttctaaagtctgttgcgatgaatgataaaactcaactgttttctcaatcctgaaattatggccgaaaactagtgaacgaaggcgtgcacatgatcctatagctgactaggattttaatttgggaactatgctgagattctttagtaatttgatgtttccttgtactctcagtcagaatcaaaccgttgactatctttaatgagaaacaggaacttattgacgaagaaggtcgatgatgatagctcaagaattgggaatatatgttgtggagagcaaaggaggagcaatattatgtctattgctttctctgctctgtttaggcacttggcctgctcttatggctcttcttgaacggcgtggtcgtctcccacaacatacttatcttgattattccatcactaactttttggctgcaatctttatagcctttgtgtttggtgggataggtgaaagtacacatgaggcaccaagtttcattacacaactcactcaggttagaacttgaaggattttgatctctataatggagattgcattgatgaatctcttgctgctgctgctacagattcaagataattggccctctgtgttgtttgcaatggcgggtggggttggtttaagtattggaaaccttgctactcagtattctttagcttttgttggtctgtctgttacagaagtgacagctgcgagcatcaccgttgttgtaggcactactgtcaattactttttggacaacggattgaacagagctgatattcttttctctggtgttggttgcttcatggtagctgtttgtcttggttctgctgttcactcttccaattctgctgatatcaaggcgaaactcggaaaactctcaggggattgtgaaactgtgacccctgaagagtgccagagactatttggaggtgaaagtttgacatacataattgtctgatagtgttaacaagatcactcatcttcacttctttagttttatagtagaagaagaagaagaagaagaaaaagagatggagaatgtaaaggaagggtctgcagcttttcttatagcactcgaaaacaaaagagcaatcaaagtaggatctttctctttagttcttctaagttggtcttgagtttcgaggcaacaacgtaaatcaatctctatgaacttcttttggattcaggtgttaggaaagagcatggttgttggtctgggaataactttttttgcaggactttctttctcattgttctcaccactattcaaccttgcaacaaacgatcaatggcacactctaaaacaaggcgttcccaagctgattgtctacactgcgttcttctacttctcactatcttgctttgtaatcgcggtcgctctcaacattagtttcctgtacaaacctgtgctagactcaccaagatcttcctttagagaatacctgagtgactggaacggaagaggttgggcacttgcagctggattgttatgtgggtttggtaacggtcttcagttcatgggtggacaagctgcaggatatgcagcctcagatgctgttcaggtcacacaaacacttataatcctaaactagaacgtttctttgatctttgcttgcgttttagtgattcttgattggtattcttgtacaggcacttcctttagtatcgactttttgggggatatatctgtttggggagtataggagatcatctacgcgaacatatgctttgcttgttggaatgctggtgatgtttactgttgctgtggggcttctaatggcctcggctggggaaagagagacgcgatttacttagagagctgatcgatatgaccaaaacagatggtgtcgctcttaatatgttgtacattgtggttacttcaattgaaagaaaatgtaaatgattgctgtttgatattcgtttttataagaaatgaaatgaatacagataatatattagtaggtgctacaatctccaaagtttgcaaaaatttgagtttcttctattcggtaagaaactctaatatcaaaaaatctaaatcgctagaaggagggatcgaacctccgaccttgtggttaacagccacacgctctaaccaactgagctattccagcttttgttaatatgtgttagttaacttttatatatcttaccataacaaaaaaaaaattcaacaaagattaatcgtgcaccgggggtcggggggatatttttaagataacattcaacaaagattaatcgtattcaactttattaaattctctatctgtattcaacttttttccactattgaaatttgcaatatatatactagatagaaactacaataatataatcccaaaacatgcatgtcaaatagcgaagtaattccatagtcaatccctgatcccagtcatgactcatgacaacgacttctctgtaatagcgttggaaatcatttccactagcttgttcaaaccaaacatctacatgttgactaaagaaatttcaaaataaacctgcaaaaaccaaattcaaagtaaacctatatgacaaaacagaagtcaattatatattaatttctctctattctataaactaaaatcctaatagagacgtaagacaaaattaaataaaaatatgaaagaagcactttctattttgtgtcttgctcttttggtttcggtttcagaagcagaagtaacaaaaccaaattctgaaaatttcattgaatgccttcgctatcggacaagttcggagaatccaatcaccgattccatctccattgccgataacaccaccaccttcttgtcttcttacttgtcctacacgaaaaacaagaggtactcgagccctaacttcaaaaaattactagccatcgtagcggcgaaacatgtatctcatgttcaggcaacagtggtctgcgcaaagaccaatggtatacaactgcgtatccgaagcggcggtcatgacctcgaaggcctttcttacaggtcgtctgtgccatttgtcattctcgatatgttcaatctcagatctattactgttaacgtattgagcaagaaagcatgggttcaagctggtgcaaccttgggagagctatacgtaaagattaacgaggcaagccaaacgctagcatttccagctggcgtttgccctactgtaggagtaggagggcacataagcggtggagggtatggaaatctgatgagaaaattcggaatcacagtggatcatgtcagtgatgctcaattaattgatgtcaacggcaagctcttgaatcgagctagcatgggagaagatctcttttgggccatccgtggcggtggtggagcgagttttggagttatcctctcttggaaaatcaacctcgtcaaggttccaaagatcctgacagtgtttaaggttaataaaacattggaacaaggaggcactgatgttctctacaagtggcagcttgtcgctaccaagttccctgaagatcttttcatgagagcatggcctcagatcataaatggagcagaacgtggcgatagaaccatcgcagttgtattctatgctcagttcttgggtccagctgataagctgttggcgataatgaaccagcgcttgcctgaattagggctaagacgtgaagattgtcacgaaatgagctggtttaacacgacgttgttttgggccgattaccctgcaggtacaccgaagagcgttcttctagataggccaacgaatccaggattctttaagagcaaatcagattatgtcaaaaaaccaatcccaaaagaaggattagagaagctttggaagacaatgtttaagttcaacaatattgtgtggatgcaattcaacccttatggtggagtgatggaccagattccgtcgaccgctacagcatttcctcatcgtaaaggaaacatgttcaaggttcaatactctacaacatggttggctgcaaacgccacagagattagcctaagtatgatgaaggagctttacaaggttgcggaaccgtacgtgtcaagtaacccgagagaggcattctttaattacagagacatcgatattggcagtaatccgagtgatgagacaaatgtggatgaggcaaagatctatggatacaagtatttcttggggaatttgaagagactcatgcaagtcaaagctaaatatgatcctgagaatttcttcaagaacgagcagagtattcctcctgttcgtgtaatagagtaacgttactctttgataagatttatttagtagtagtaataagtgatgtgggcttgttaaagcttaagttttcactattgtcccatttgcattatgatagttatgttatatttgatctttactcaataagtaatttcatgaaatcggttttaattccttattacacattaggatagatcagttatactttacctctataactcagtgtacgaacctgaaactgtttcagagaaaacacagggagctaggagagttcaaatcttatccttggaaccctcccagatccgtttcaatctgagtttttttgttttttgttttttctcagttcagaatcttctgttttagaacaagtctttgatgtgacctcttcttcaaacgacttcttcttaatgttctgactataataaatacatcttgtgtatgtataaacgtaaaaaatggatacatatgagtatgacgtataaacgtaatgatcacttgaccatgaggccaatgacttaaagtttagtggtttatgttactatttggattcaatatgacttaaatgtttttggttttagtgttaaacctgccataatgtctattttactatttagattcaacctgagttattgaatttttttaaattagatttatgtatttacagatttaccacagaataaataatcaacatttaaaaaaaaaaaatagtcaacgtttcggctatttgaaaagcctattgcatgtagttattatgtaagaaacaaataaaagtctatttcaaactcttcggctatatataaaatcattagtaatgttcaacaaacgttatccattaaaattcgaagtcaaggaggtgcattcatgaaatatcttttaaataaaaaaatcaacaaaattcaagaataattttctcaataaaagataggcttcttgaaaatatgaaggaagaagtctcacttacgacttaactacgtttgcatttatgaaatatcgtttctaatctctgtatttaactttcttcgtactacgtactaaaatctatatattatgattatatattacgttgtgaaaaaaacttgcaaattgccttgaattcaatcatgaaaaccattaatcctctgtcacatacgttaaaatttccattgtattagcctggtcaaaacaaacacctacatgttgacaatagaaaattcaaagtaaacctatatgacgaagtcacttttaaattaatcttctccctatattttgattctataaactacaatcctaatagaagtgtaggacatactgcataacagtaaaaatgaaagaagcatttgttttccttctttgcttgaccaacaagtttccaaagaagtttaatagttgctcaaaaaagaaagaaacactttatgttttgggtcttgttcttcttgtttcgtttatagaagcaccagtgacaaaaccaaattttggaaagttcatcgaatgcctacgcgatcggactactccggagaatccaatcaccgatgtcatctccatcgccgataattccaccaccttcttgtcttcttacgtgtcatacacgaaaaacaagaggttctcgagccctaacttcaaaaaactactagccatcatagcggcgaaacatgtatctcatgttcaggccacggtagtctgcgcaaagtccaatggtatccagctccgtatccgaagcggtggtcatgacaacgagggtttttcttacatgtcgtctgtgccatttgtcattctcgatatgcacaatctgaggtctattgatgtcaacttgtcgagaaagaacgcatgggttcaagctggtgcgacattgggagagctctacgtaaagatcaatgaggcaagccaaacgctagcgttcccggctggcgtgtgccctacggtaggagcagggggacacataagcggtggagggtttggaaatctgatgagaaaattcggaatcacagtagatcatgtcattgacgcacaaatcattgatgtcaatggcaagctcttgaatcgagctgccatgggagaagatctcttttgggcgattcgcggtggtggttcaagttttggagttattctatcttggaaaatcaacctcgtggaggttccaaagatcctgacagtgtttaaggttaacaaaacattagaacaaggaggcactgatattctttacaagtggcagcttgtcgctaataaactacctgatagtcttttcataacagcatggcctaggaccgtaaatggaccaaaacccggcgagagaaccgtcgcggttgtattctatgctcagttcttgggtccaacagataagctgatggagataatggaccagagcttccctgaattagggttaggacgtgaagattgccacgaaatgagctggcttaacacaacgttgttttgggccaattacccggcgggtacacccaagagcatccttctagataggcctccgacgaattcagtgtcatttaagagtaaatcggattttgtcaaaaaaccaatacccaaaaaaggtttagagaagctttggaagacaatgtttaaattcaacagtagcgtctcgttgcaattcaacccttacggtggagtgatggaccggattccggcaacggccaccgcttttcctcatcggaaaggaaacttgttcaaggttcaatactctacgatgtggtttgacgcaaacgccacagagagtagcctggctatgatgaatgagctttttgaggtggcggaaccgtacgtgtcaagtaacccgagagaggccttctttaatttcagagacatcgatattggaagcaatccaagtggtgagacaaacgtggatgaagctaagatctacggatccaagtatttcttggggaatttgaagagattgatggatgttaaagctaagtatgatcctgataatttcttcaagaacgagcagagtattcctccggttcgtgtaaagtagtgatattaagttatctgggcatgtgttataggcttatagtctctatgtagtttgccttgtttaatcattagtactcaataaagaaatctatacgtgagtagtaattagtttcataatcaattaagcatgttcatctaatttccttttgtttatatatattgatttctatttttgtttatggattgatcttgcaactacaataatggattatgctaagaatgtaacaactctgtcttcaagccatcgtaagtacattttacaggttaatgttttaagagttagttaccgtttttatattagaattgtgatttgatctctagtaatagtaataaaatacacgtgtaaacgtacttaattactatttgactaaaacatgtaatatagtgatacaagattagaatccaatattcagcaagaaactaagcctattaaccaaagatggaataagaaattaaatcatatatatgaaagttggccaactctctcctacaacttgacacatcagcatatgagaacttgccacctagatttcttaaatgagtaatacataattagtaattaattcaacatatgaacctatcataagtcgaaacttcaaccatcactctttctaaattttttaattcaatatatccttttttatttttttaggcatttgggtagagaatattatgagtacattttccggatgtaatcttttctttaatggatttctgagagatgtttatatatgagacttagaaaaaaatttagctggtatgcttcattagttacgttagattaagtgattatctcaaaacggtattacactacgtgaaacgtgttttatctacaaacaaatgtttaagtttatctttctgatataacttaaacacatcatctagagagttagaaccgattttaaaattaacaccaatgatgttttaggcgatgaactatcaaataaatttatgttctttttttttcatgtttgtcctctcttgttgttgcaagaaatttttaattaaaataaaatccaacttttatattacctatcattacatatagtattttcaatatattgttaaaactgttaaccatccataaaaaaaaaagaatgtatggggcaagaaataaaaatatgcaaaaattatgtagcaaacatttgaaaaacaatagttattattaaatacaattatacaaaataacaaaagaggagaacaaaatcaaatttataaaaatatgcaagagtaagctaaaatggtgctctactataatcttttacaactctcaattaaaaaaaagttactggaaaaacagattttattacatccattatattattaaaaaggaacaaaatgatattttttgccaaaacatttgtgaaaataacaaacaactatataaaaaaatacatatcaaaaaattggaaaaatattatgaaactagatttatatctaatcaaaaattcgttaaagttaaacaattaggattacaacaaaagtaaaacaaaaatttgatatagaaataaaaatctttattcaacaatattaacccatatgacagacataagacacaaataaaaaaaaaaactatcacaaaaataaatacgcaatatatatgtacacttaccaataccaaacaaaaagtatatataatacacctacaaattaggttcggaataaagccaagtggttcaactatggattaaatgcggtgcggttcaaatactaacaaaattgtatacatattcatatatatgtaatttcttttgttactattcaaacagtaccaaagcatggggtttcatcaccacctaaattaccaaccatttaaaaaattagagtgtcctaaacaatagtaataaataaccattatatgttagacatcattaaaatttaatcctcaaaatataaagaatgggaaccaacatccaacacactcaaagcttttacataggagtaaaaattaacaaacaatatatagtggttaataaaaaatatatagttttcatccttcgtaatacaatctctcttataaaaataacatttctaagaaagaatgataaacccaaatatataaaaaaaaataaagaaaatcaacaacaaaatcccgcgcttagcgcgggcactcacctagttatatatatgaaaattgaccaactttctccatatggatgacaaatcatcacataagaaaatgacatgtgtcatttaacattgattaaattaaaaatcagcaaaattaattgagagaaaatcaaatgtctcatattgtgttaaatcctccattaattcacttcttaaattattttttcaaaataaaaataaaattataaattatttatttaaataaatcaattactacttttattattttctatttttttaaaaatttaatggtcaatggtcatcactctataatgattaaatagttatttgtgttgtagtttagttgtttgctacctaatattagtttagttattttacgttgattttttattattattacgttatggttcatatcttatcatatgaaattctgtcttttcatttttgtatctttaggtaagtttgtaacattgacattcaacattttcaagtaatagacttttaagacgttagacataccatgaaattcaaaacaaatccatttgtcttatatggctatatgcataaaatctaaaaagtgttaataaaataactttttaatttttgtttcatttatttttttttcgtacgaaaactcttgaaatcaaaatatcttatatttttgttgtgtgtattcatgataatgaacaaattttagaatcttagatataaaaataatcagattatacataaaaatatatagaaattgatatttagagttaaaaatgaatctaacaataaaaaataagtacataagatgagtctaattttagtaagtataaaataacaaacaaaaaatacacataaattagcgacaaaaataattaacatatttttatctaaacaattttcaaaacaaacccacaggtaacgtgagaattcatctagtaaaataaaaagataaagcataacacgtatcaaaacaactacacgttttgaaacctaaagaacaactctgtcaaccactacttcgagcaaaacaccaccgcttccagcaccaccgcatcagagccctgattctcggccatcttataatcattaatatttataacaatacaaacgtaacttatttgaattcaattatgagggaaacaaaaaaacacaggaaatgaaaaagaaaagaggaagattcattgtattcgaaatatatatatatatctttacacaaaacttgacaaaaattaatcgtttcttgaaaatatgaataaattcattttcaaaaccatttatcaagtgttttttggcgtagtggctttttttgaaagaaaacaagaacactgatatttgttttttatattttgaagttaaaaaaaaaacaagaacactgacaagaaaatcatgggttttgagtgcacttggaaaataatatttgtgttatagtgctaaatatgcttcttgctctgcggagtttaggaaaccaagatcctaatttcacagaaaataaaaatatgtagaaaagaatatgaatgatgtctcaccttatgttccattattcaactttctccgattaataatctctccattcaacgttcttccactaataatcggaaaacacgctgatgtaataattcgatatgttcgacgcaagcgtgatgaaaataactagtcctctgttaaatccgttgtaatttccattagcttgatgaaaataacgactacatgtacaaagcaaaatttaattttaaatttattttctctctaaatttttattatataaactaaaatcctgatagaggcgtaagacatattacataaaaataaaataaaaacatgaaagcattattctctgttttgtgtcttgttcttttggtttcgattttaagagcagcagtgacaaaaccagattccggaatcttcaccggatgccttcgcaatcggactagtctggagaatccaatcaccgatgccatcttcacctcccgtaacaccaccaccttcttgtcttcttacgtgtcctacacgaaaaacaagaggtactcgagccttaactaccagaaattagtagccatcgtggcggctaaacatgtatcgcatgttcaggccacggtggtctgcgcaaaggctaacggtatacaactccgtatccgtagtggaggtcatgactacgaaggcctttcttacacatcgtctgtgccatttgttatcctcgatatgtacaatttgaggtctattactgttgacgtgtcaagcaagaaagcatgggttcaagctggtgcgacattgggagagctctacacaaagatcaatgaggcgagccaaacgttagcgttcccggctggcgtttgccctacggtaggagtgggtgggcacataaccggtggaggatttggaaatctgatgagaaaattcggaatcacagtggatcatgtcattgatgctcagttaattggtgtcaacggaaagctcttggatcgagctaccatgggagaagatctcttttgggccattcgtggcggtggtggtgcgagtttcggagttatcctctcttggaaaatcaacctcgtcgaggttccaaagatcctgacagtgtttaaggttagcaaaacattggaacaaggaggtactgatgttctctacaagtggcagcttgttgctaccaaagttcctgaagatcttttcataagagcctggcctcagattgtaaaaggaacaaaactcggcgagagaaccattggggttgtattttttgctcagtttttgggtccaaccgataagctgatggagataatgagccaaagcttgcctgaattagggctaagacgtgaagattgtcatgaaatgagctggtttaacacgacgttgttttgggccaattatcctgtaggtacaccaacacgcgttcttctagatagaccgtcgactccaggagaatttttcaagagcaagtcagataacataaaaaaaccaatcccaaaagaaggattggagaagatatggaagacaatgttgaaatttaactttgtatggattgaattcaacccttacggtggagtgatggatcggattccagctactgccacagcgtttcctcaccggaaaggaaacttgttcaatcttcaatactctacgatatggttggacgcaaaggaaacagagaataagctgactatgatgaaggagctttatgaagttgcgggaccttacgtgtcaagtaacccgagagaggcgctctttaatttcagagacttcgatattggaatcaatccgagtggtttgaacgtggatgaagctaagatctatggatacaagtatttcttggggaatttaaagagattgatggatgttaaagctaagtgtgatcctgataatttcttcaagaacgagcagagtattcttcctgctcgcgtaatgtaggaaataggaatatgcgcttttatcagatatagtatttagcaagtgtaataagttacgtgtggacatgaaaaaaaaaaaaaaaaaaattacttggcatgtgttatagcctatgcaggtcatacagatatcaagaagtatatgcttttttgcaaattttgcaaagaatttatgaactctgtcattagtcatctcaaactacattttaagggatgtagttgtcgccaacaaatgaaatcgacaaaataggtttgacgatatctgcattagttaagtattaaaagcgtagtttaagctagcgtactcaaacccagagactgagcattttaaagtttaacgattcttatgcaagcaaattcgtttattataaaattctctctttttgaagttttttttatcttcataaattttaaatgtcactattttcagaaaaatggagaaaatgagattttacgctgtcaatttatgtctcaacgaataaaaagctttatgtactttttttatttggtaaatagccgcgcacgagagggacccgatataaatgctggacgctggaccgactcgcacgcagtctcgcaccaagaatcaaagacaagacttttcaggcgaacccctatacttgttagatgttatgttccatacccaaacttttaattatactacattaaccaaacgacgcaccatcgtatgtctaaacgtttgagtttaatgcccctaaacttttaattcttccagaattaaccttaggtttcaagctgtagacatttttttttttcttttttgaacactcgagctgtagacataagactcctattatcaaagataagaatgtatgggaagatcaaatatcaatatatcatacttcatcaaaaacatcacatttcatacactactttcaagtatacgaatgtttcataaaaaaaaaaaaggttatgcatacgaaaagtctactgcacgttatatatatattaaaaaaaaaacgtgacatcaaatttgtcgtccatcttaaaatgttgggaaaatcgtattatacagtatttacagaaatacaaaacgtaaactattgaaatttgaattcaacgagtgagaaattgaaaaataagagataggaaaattattgtattctagaaatattttatgcataaaaatcaacaatattgaatcctaattacttcaatgaaaagataggtttcttgatccttacgtttccacttacaaagcctcgtttgcgtttatcaaatctctatattcaactacctaaaacaatcccaaaacatgtaaaacaaagaaattcaatagttacgacttaatccctcgcctcaatcatgaaaacgaatcctctgtagtagtgtaatatacgttgtaatttccataagcaaattcaatataatcctacattttgaaagaaaaaaaaaacaaattcaaagaaaacctatatgacaaaagtcaaacataaattaacgttctcactacattttcatctatatatagatcctaatagaggcgtaagacatattacaaaacaaaaacaaacacaatgaaaggaacactttcagttttgtgtcttgtacttctggtttcggttttggaagcagcagtaacaaaaccaaaatttggagacttcatcgggtgccttcgctatcgtactagtccggagaatccaatcaccgatgccatctccttcgccgataacaccaccaccttcttgtcttcttacgtgtcatacactaaaaacaaaaggttctcgacccctaattatagaaagctactagccatcgtggccgcaaaacatgtatctcatgttcaggccacggtggtctgcgcaaagtccaatggtatccagctccgtatacgaagcggcggtcatgactatgaaggcctttcttacatgtcgtctgtgccatttgttattctcgatatgtacaatttgaggtctattactgttgacgtgtcaagcaagaaagcctggattcaagctggtgcgaccttgggagagctctacacaaacgtcaatgacgtaagccaaacactagctttcccggctggcgtttgcgctaccgtaggagctggtgggcacataagtggtggagggtatggaaatctaatgagaaaatacggaatcactgtggatcatgtcattgatgctcaaataattgatgtcaacggcaagctcttgaatcgagctaccatgggagaagatctcttttgggcaatccgtggcggtggcggtgggagttttggagttatcctctcttggaaaatcaacctcgtcgatgttccaaagatcgtgacagtatttaaggttaacaaaacactggaacaaggaggcactgatgttctctacaagtggcagcttgtcgctagcaaattccctgaaagtcttttcgtgagagcaatgcctcaggtagcaaatggaacaaaacgcggggagagaaccatcactgttgtattctatgctcagttcttgggtcgaaccgatgcgctgatggctataatgaaccaaaactggcctgaactagggctaaaacatgaagattgtcaagaaatgagctggcttaactcaacgttgttttgggcagattatccagccggtaccccgacgagcattcttctagatagaccgtcgagtccaggagattttttcaaaagtaaatcagattatgtcaaaaaaccaatccccaaagaaggattggagaagctttggaagacaatgttgaaattcaacaataatattgtgtggatgcaattcaacccttacggtggagtgatggaccggattccagcaacggccacagcgtttcctcacagaaaaggaaacttgttcaagattcaatactttacgacatggtttaacgcaaacgccacaatgagtagcctgagtcaaatgaaggagctttacgaggttgctgaaccgtacgtgtcaagtaacccgagagaggccttttttaattacagagatatcgatgttggaagcaatccgagtggtgagacaaacgtggatgaagctaagatctatggatccaagtatttcttggggaatttgaagagattgatggatgttaaagctaagtatgatcctgataatttcttcaaaaacgaacagagcattcctccggttcgtgtaatgtagtgatatttctgttttataagtttatttatcaagttcaataagctatgtgggcatgtgttatatagtctatactgtatgtaattttcataattgtttcatttgcattatcatcgtttattcattactgaataaaaaatcaaatttccttaaacatattagttgcaggtataaataaaaccatgcagggccgaccctaagtgttttcgggcgtacattaacatggtcctgccaaacaatgattcactgccctcttctccgcagggcgatactaatatgtggtaggttgacaaaaagaagatctattttaggtgataaaagggtaagcgattcatattaaaacccagcaattgtgcattttaattcgaactttcgttatgtgagcccacaagcacaagtttgcgttcacaaatactataaaaacaaattcgacctcaaaattttgtgtttattaagtagtttagtggtaaaggctattcggagtaaccttcagcactcaggttcaaatgtcaagaaaagctaatttttcataatatatatatatatatatatatatatatatatatatatatatatatatattttttactaaaacaaatctgaaatttaaattattatcataaagctacttctttattttagttacttgtagtcttaaaatacttagggacggtttatattaagtcacataaaaatcatgaatcattctattatatactaaaagtataaaccagaatttatcagtagtatcatagttcatcaagaatatcacatttcatatcaaactttcagtatatatacgaatgtctgataaataagttagaaaaaaaaactaaaataattgtgaagcataacaattcacaaatcaaaattaacttgaaaaacatctaattaaaacaaaacaaaaaaaaaagatagttacatgcgtaaataggtttaagtctacataaattaatataacagtagacgcagacacaatttaatggtggtctgatttaacgatgacggataggatcgacatttctactataagaaaagtcaatcgcacttttaaattaaaagataagttatgtatcaaaatttctcggccatcttaaaataatgggaaaataataatatagtcattagtattttacaacaacgtagccttataaaatttgaattcaacgaggggggacaaagaaaacaaaggattcaaagagaagagagaggaaaattcagtgcattctacaaatacatttggcataaaattcaacaatacttaatcgcaattatttcaattagtagatagctaggtttggtcaaaatatgaatgaagtcttaccttaggtttccatttataaaatctcgtggtcacttaaaaaatctctgtattcaactacctaaaatgatcatttgaaataaagaagttcagttgatgcgactcaccccctgatctaaattatgaaagtcatttcccctgtactatacgtattacgtacgttgtaatttcataactttgttcaaaataaacagctacttgacgaaaagtcaaaccaaattcaaaagtacaccgatatggaaaaaatggtcaagattgtcaagttgaaattattgtctccatatatattggtattctataaattacaaagtagaggcataatgaaccaaacagcaaaatgaaagaagcactttttggtttgtatcttgttcttttggtttcgggcttagaagcagcagtgacgaaaccaaattctggaaactttattgaatgccttcggtatcaggctagtccggagaatccaatcaccgatgccatctttaccgtcgataacaccaccaccttcttgtcttcttacgtgtcatacacgaaaaacacgaggttctcgaaccctaacaacaaaaacctactagccatcgtagtggcgaaagatgtatctcatgttcaggcaacggtggtctgcgcaaagtccaatggtatccagatccgtatccgaagcggtggtcatgacaacgaaggactttcttacgtgtcgtctgtgccatttgtcattcttgatatgcacaaactgagggatattactgtcgacgtgtcaagcaagaaagcatgggtccaagctggtgcgaccttgggagagctctacgtgaagatcgatgaggcaagccaaacgttagcgttccctgctggcatttgcgctacggtaggagctggaggacacataagcggtggagggtatggaaatctgatgagaaaattcggaaccacagtggatcatgtcattgatgctgaattagttgatgtcaacggcaagctcttgaatcgatctaccatgggagaagatctcttttgggcgattcgcggcggtggtggtgcgagtttcggagttatactctcttggaaaataaacctcgtggaggttccaaagatctttacagtgtttcaggttaacaaaacattggaacaaggaggcactgatgttgtctacaagtggcagcttgtcgctaacaaattccctgataatcttttcttgagagcaatgcctcaggtagtaaatggaacaaaacacggcgagagaaccatcgcgattgtattctgggctcagttcttgggtcgaaccgatgagctgatggagataatgaaccagagctttcctgaattagggctaagacgtgaagattgtcaagaaatgagctggcttaacacgacgttgttttgggctatgttaccagcgggtactccgaagaccgtccttctaggtagacctacggatccagtattctttaagagtaaatcggattacgtcaaaaagccaatccccaaagaaggactggagaagatttggaagacaatgttgaaattcaacaatattgtgtggctgcacttcaacccttacggtggaatgatggatcggattccgtcaaacgccacagcgtttcctcaccggaaaggaaacttgttcaaggttcaatactataccacatggttggacccaaacgccacagagagtaacctgagtattatgaaggagctctacgaggttgcagaaccgtacgtgtcaagtaacccgagagaggccttctttaattacagagacattgatattggaagcaatccaagcggtgagacagacgtggatgaggctaagatctatggatacaagtatttcttggggaatttgaagagattgatggatgttaaagctaagagtgatcctgagaatttcttcaaaaacgaacagagtattccccctcttttatcaagggtgaggagagacgacgaattgtaattgttagaagaaaattatgtttaccttaactctgcatagataaaaggttgaaatattggattgtatgctctaaattttactagaaatttgaaatgtacactacaatattttaaaatttgttcggtatcttattattctctcaaaaagactttttgcacttaattaataattaaaattttgagaaaaagaacaaaataaaataattaggaaacatagtttttacaaatattattaaaaaatctagaaaaactattcattttaaaaaaattatactcaaaaagttttttttttctttcttggtgaaaacagatgatgataaaactaaaactaataattatgaaataaactatgacttttaattatgtaataatttagataacgattcgtttaatattacaggctcatcattcgtcagtcattgactcgccataacaaatgcatatcctaaaacatttcctacgggtacaaaatttccaacatgaatatattttttcgtaattgagacacatagcttgtaatattcgaaaagtcttgaaagtttggcattctcacggatagatggcacagtacaaaaactatgtacgtagttagcgcaaaaaatcagctatcatacatataacataccgaattcacaaatgatataacatcgccatctatggtaggtataattttatgtatttttgtatcataaatctttttacaataacaatttatactgcattaatatatatttgtgtaccgtcatatttagggttataatatatgcgtatataatagtttttgagaattattatatataatttagttatgacattttatatatgatataattcactcttttaaaacaaatattttttgggtacggtagaagtattgaactgttttttattggctattatatgtggttttacattttagagagctatatatattgatatacctaatcttgtgatattgcatactataaacaaaaacatatcgaaataaaaatcatttaacataaaatctgattccaatctaacatacagtacataagtttataaaatcattcatcatacataacgcaagtgtgcatctaaaatacataatacaagtcatattgattagcttagtcttaaacttatggatggaccattagaaatcaaagattgcagttaataaatatattgggccatggaatgctatgactgggccgggtcataagaaaccaatccggaggaagcgaacagaaaataattttgtttcccgtattactgtaccggttcaaccgtcccggtatattgaatcgaaccaaaatgtggcaaaacctaatttctttttttcctaagagagtttttatttttattttctcagaaccagaataaggagacgaaaggagcacaggcccagagacccccccataaacatcgtctctgagaaaggtgctgttcgaattgagctcgatcttaactacttctgttgttgaatttcttgccccgttcggaaaaattgagcttaaactactttgaagaaaccttgtggaatttttggggatgccatcaatggcgcaaggagaactcaagagctttgtacaaaacagtagaccgaaccctaaatctcctactgtttctcccttcaggttagtctctcacttcctactactaaccatagtgtctgatatgattcccagaaaaaaagattggattttgcgtaatgatttgtgaattttgacttaccacagcatgagacaaaagatagcagaacatagaagatctcttcctattgcttcaggtgcgagttatatataaatttggttatgtctttttattttgtgatatgttcattgctaactctgtcggtgattgtgttaaaaccagtggagaaacgtttggttgaggaggttcaaaagaatgatattctgattatcgttggtgaaaccggtagtggcaagactactcgtaagtatgcttgcttaatctcaactacacttgttggcaaattaaaagtgaatgtattgatgttgatcattttttttttttttttttctcacatgaagaattgcctcagttcctctacaatgctggattctgtcgagagggaaagatgattgggataacacaaccgaggcgtattgctgctgtgactgttgctaaaagggtagctgaggaatgtgaggttcagttaggccaaaaggttggctattccattaggtttgatgatactacttctggttcgacaaggttgaaatacatgactgatggattattgctgaggtaaacaaaataccacaacttataattttagcctaattttatgaaattgtgaaaatctattgctgatctctgttttaacaaactgaaaaatcaaaaactgcagagaagcgctgttggatccgcatctttctagatattcagtcattattgtcgatgaagctcatgataggagtgttcatactgatgttctgctggctttgctgaaaaaaatacagcgtactcggtcacagcctgttagtgagaaaactgagtttggtaatgtagcatcacaagtacagacaacaacaagggatgcgaatggtcctcagcagaatggtgtattaaaagggtatcaaggcagaaagttatctccgttgaagctgatcattatgtctgccagtttggatgcacgagttttctctgagtatttcggtggtgccaaagctgttcatgtgcaggggcgacaatttcctgttgacattctttacactgttcatcctgaatcagattatgtagatgccaccttggtcaccatatttcaggttattggtttggtgatctaaatattgttcctgcctctaccagtatttgtggaatggacttgcgaatgttctagtaaactaactctgtgtctgatttttcaatttaattcttttagattcattttgaggagaagccaggtgacatacttgttttcctcactgggcaagatgaaattgaatctgttgagagacttgtccaagaaagacttcagaacatacctgaagacaaacgaaagctactgccacttgctatcttttctgctcttccatcagagcagcaaatgaaagtttttgccccagctccgactggttttcgtaaggttagagaagtttagctatcatttgcttattttggagatttggttgtcaactgtgttgagatgataataaaccagtgtaaggtattttatttgcacattttaggttattttggccacaaatatagcggagacatcgattacaattcctggaataagatatgttatagaccctgggtttgttaaggcacgaagctatgatccaagcaaaggcatggagtcacttgatgttgttccagcatcgaaagcacagacgcttcaaagaaggtatcatgttctacattcactaattctttccattcaagatggtttgattgttttgcaaaggttagagttttacctgcaattttatttactttctgttttttttttggctttgaatttagtggacgtgcaggacgtgagggtcctgggaagtcctttcgtctttatcctgagagggaatttgaaaagttggaagattcaactaagccagagatcaagagatgcaatctctcaaatatcattttgcagctgaaggctctggggattgatgatatagttggatttgattttatagataaaccttcaaggtacttccttttgttgtggatatctctgtcactcttatactgagaatatccctgattgggtgctataactaaagtccttaaaggaagtttgactctcatagctgaagcattcattctctaatggtttttcataaacactttgttgatctagattgtcatctgatgttaaacaggggggcgattataaaagcattggcagagttgcattcgcttggtgccttggcagatgatggtaaactagagaatcccgttggctaccaaatgtcacggctcccactggaacctgtatactccaaagctctaattttggccaatcaattcaactgtctagaagaaatgctgatcactgttgccgtgctcagtgtggagtccatattttatgatccgcgtgagaagagagaagaggtgagtataccaaaggaccatgatatattcacattttcctttatatcaacagttgattaaaccagccacctttattctttgttttgccaggcaagaacctcaaaaaaccactttgctagcgttgaaggggatcacctaacttatcttagtgtttatcgggagtcagatgagttcttggaaaagagaaaagcagccggcagtggaaacaatattgataaaattatgaaaaaatggtgtaaggagaactatgtgaatagccgttccttgaagcatgctcgtgacatatataggttggccatgccttcttcgtagataattacagttgactgttatgccttatgatgaattatgataatcacacaaaggattgttgcaggcaaattcgtgaacatgttgaacagataggctttaatgtgtcttcatgcggaaatgacatgcttgcgtttcgtagatgtcttgctgcatcatttttccttaaagcagcacagagacaattggacggtacatacaggttggttccgttcttggttcacttattgtcttaacatgtaaatacgcctaatatactctactcttttgctcacaacaaaaacttccattgtcatctaattacttgacagggctttggaaagtggtgaggttgtccacatccacccaacttctgttttattccgtgcgaaaccagaatgtgttatcttcaacgagctcatgcaaaccagcaagaagtacatcaagaacctcacaataattgattccttatggttgtctgagttggctcctcaccatttccaaacggcagagtgaattttgcttataacaaggtaaaacacaaccgatatctctcatcagtttttgaacttggcatagacagaacatttacatctctatacctctgttcctagagattacaagtttctgactaaaagcttctgatgaacaagaaagcaaaatctctggttctttttgtaagaatcatttctctctctgaatgcagatataactatttctattctgatggagatcgaacacggataccactggagactgatggtaaacatttagaggaaactcgtttggttgaaagaagatgactgtggctgagcttagcattaatttataggtagcaagacgaccaagcttaatctatgctcttttatggagctggagacacctaacatttcaggtttattattgtatcttgtaatagatttatacttttttggctttcgcctgcacttgactcatcttgaaagtcaacagaatgtgccctccatgttccttcactatacatctgtctctccgtctttggcaaccaaatttaattttacatataacaatttataatagagtattgtcttattatatgtcaaattacaaacattccaactctgagcacagttatttctcagatatatttctgattaccagtcagatttagtcaaataattagttttttgagagtacatgtaatgtctagtgcagcacataccttttgtcacaacgtgaaggtctcaactgtttcgttatcaaccaccaacagaggcaagcacgaatatgggaacatgtagtatctataaacattctcttttgttgttttgttgagaaactaacacatagcaaattcagaaaaatggggaactcgttcacatgcatatctcacgagcaggaacaacgtcccaagaaatcttccggcggaggaggaaataactccgggaaatacaaatacgtgcgtcgtctgtcgctgatgccttcatttagaaggaggacgctacttccttcgctctcctgctctggatcatcatccacttcgtcttccaagaaaggcgggatcaaagcaaagacgaagaagataagagagagacatcatcatcatcatcaagaccacgaaaaagactctcatataattcaagagcagacactagcagccactaatctcctcttcaaccaaacccctcgtaacagcaactctgttgttcctcctagtttcagacgctccacctctgttgtatatccctctgctcagccatcgggtaccagctcaggacccgtttcagccgtccagactcctaagaagtcaagcgcgggattcgtaagaagctctagctctaggcaaaggtccagtaccgatcccatgatcaagcctaaccagctcgttgacaaggcaagtacttgtcttaaaactaatgaattagcctaattaaccatacgttaagattgtttcattgcatgaatttatactttaaaatatgataactgttttccaaattcaaacaacaatttttttatgttgattaataattaaaattagaaatattgttatatttgaagaatattaattttcgcatgcaaactcaaacaaaagctgctctttgagcaatcgcagcttatttatgtggtgacatgtatgtgtgacaggagctaaataaggtggaaggttcggagacgaagcggtttgtgctggttcatggtggtgggttcggagcttggtgttggtacaaaaccataactcttttagagaagcatggtttccaagtcgatgctgttgagttgaccggttcaggtgtgagctcgattgacacaaacaacatcaccagcctcgctcactactccaagcctctcctccatttcttcgaatccctcaaacccaccgagaaggttccaactttgtcttataaaccagtctttccagtgctaattgatgatgaaaagttacaacaattggatcatgtttaagaaattaatattataacaggtgatactggtgggacatgattttggaggagcttgtatgtcctatgcgatggagatgtttcctacaaagatcgccaaagctgtctttatctctgctgctatgttggctaatggccaaagcactcttgatctctttaatcaacaggtactttttaatcatgtgtatagcttacatttggtatttatttgtaaaaatgataccataacaaaattatagaattaatagatagaccttttaagtctttttaatcaaataacatgatatatcatgtaaaaatagcgtgtcaacggataaaataatgttgtatttgtttagcaaaataaaataaaataatgttgtatttggttaaattatttttaaaatatcatgctatttgcaaaaatgttacaatttttattattttttttttgcaaaaatgatacataaatccaagttttcatatatttgcaaaatagtatcaaaattgattaacatagtgcatttaccttttcattaagataaaaagaatctctaatgcttacaaatttatttttaactgtattaatatgtaattctttcagctggggtcaaatgatctgatgcaacaagcacagatatttctgtacgccaacggcaaaaagaatcctccaactgccgttgattttgacagatctttgcttagagactttctctttaatcaaagccctccaaaggtaaattaaaaccgaaccaatcaatcttataccggggcacttcgatttgattactgaaccgatattttttttgtatcataggacctcgcattggcatcggtatccattagaccgatcccattcgcaccggtcagcgaaaaggttcacgtgtcggagaaaaactacggttctatccgacggttctacatcaaaaccatggaagattacgctgtaccggttcttctccaggaagcaatgatcaaattgaacccaccggaacaagtttttcagctcaaaggctccgatcacgcaccgttcttctctcggcctcagtccttgaacaaaatcctcgtcgagatatctcaaataccgttcaagaaatcatcctgatatttttgtaaaccggatacatgtaaaccaaaccggttctaggattcttgttacattttagagatttgtttttgaaagttgctctgacagtgagaagaacaaaacccaatttgggaaacttgttcttaatttttttatttatttttgtcatttattactatttaatttttcattttttttctaacaacattatatattatctatctggtaatttgattactggatttaaacaacagtaatttgccaaaaattcaatggacgttatgatagatagcgattactgtttcataatgtttctgttggaaatatctgttttggccttttatatagaatatgaagttgatttgattttgcttcatatatcgtcgtcgtcactggcattttgtcttttagaggaacaggaaatcgaatgggtcgtggagtgagcgtaggtggtgggcaaagttctttagggtatctttttggtagcggagaagctccaaagccagccattaacaatgctcctgcaccatcatctgaaactctgcctataagtgctgatccttcaccaaaacatgttgctgctcagacggttaatgttaccaagcaaatacctgctggtatcaataaatcctctacaaacaactacattcgagcagatggacagaacacaggcaacttccttacggtattgattaaataagattgttgtttaattttatcccctggatatgtcatttaccaaaagcaaaaaccttgtccacaactagcatatattttcaaaagcatctctgaagtttcctactttcctattgcggttattcatttgaaatagggaaatttgcttgatacttcggtgcgttaagatatgaaattaaacaacgtcactcaagtttttgaatgagcgtttgctaggagtatcatttcttgtttacatataatcatctaaagatctacgttttggtgaaccaaggcacagtttactaacgcagttttggttgaatgcaggaccggccatcgaccaaggttcatgcagcccctggaggcggctcatctctggattacctcttcggtggtggcggaagcaactagcagcttcttctaattcacaactcttggtcttgtgggaaaatatgctctcatcttttttaacttggtcgtctcttaaatctgctttatctcatggtgggttacgccccatgctaattaataataaagttatgtaatcgataatagtccatttaaaccacttagctcatttagttaagactttgagagttaagagtgccccatgcaatggtttggaaggcgaattcgacgcccttctttgtaaattttttttatccttctattgaactttttttatttgttgctagttccaacttcaacggaaaaattaacaaaaatgccacattttagtggacctatttccatttctaccacatttgccttcactttttttatttataccacatttataatatcaaatgacaatttatcctcatatttatatatctttcattctctattctatctttcattctctcttattgagaaaatatgttcgtgtccatgtccctaactagatctctaaatttagtcttcccatttcttgttcctacttacttgttcccccatttagtcttttaattttctaaaagtcattgtttatcgtttttattctcagcgtccctagtttttattttgttttcttttgaaattattatcaaaagaagcgtctctgagtatattcttttttcaaattgtttcatgcatggtggctttttccatttttatttgcatgaattgattatatatagattagtattagactctcctccatgactcaatgtatttatactgttatgatttctctgtttggacgttgtgggactgggacgtaattgacacttgctcgataatgagcttatgatgttgcttttcaaacgttgatactatatgattttatgacgttgatactttaagaaatttacaatggagttcaaactccactgaaaatgaaaatgcacttgaactccactagtaacaacacttgaactctagtataacaacaaaacaaaactaaattccttgtgtgccaaggccaacattagatacataacatactctatctagtctctacatattcttctttttgctcacaacgaacaagagctttctcttttaagaaaaatggcttcaaagatttaccaactatttaaaggaaaaaaagcttccgatctttacaatgtgctaagttatggatcacaagtttttggcaaagttaatgaagttctcaagaacaaaaaatgctagggaggaagagtccaaaagagtaaaagaagtaactcttattgtgaagaagaccgaagatcctcctcaaattaaaccaccaacactcaaagaaatcatggctacacatggtacgtttaatttttctttctttttttcttaaatttgttttggtaaaaatttttttttttatatctttgtgttattttagttttttcttagatgtttttcatttgaagtcaatgttttattacaaagatctcgtagtttttccttagatgcttaagtctatatttttatactaagatcttttagtttttccttaatttgttttggtaaaaattcttaaaaaaaatccacaatgttatatttttgtgtaattttattttttgcttagattttttatttacttaaagtctaatttttctataaaaaaaaattaagtttttcttagatttgtttggttaaaggtctatatttttctaccataatcataattttagtgtaattttaattattttcttagatttgttttggtaaaatccacttccacaatcttatttttattattattgtgtttgacaggaattactcgtgatccctctccgttgctctatttctctcaaatccaccaagctccacctcctcaaggacctcaaccaattactgcttacgtggtttttcaatttctcaggagggagctgaatgtcgatgggtttggacccgataacctcgagtaaactacatcatgtttcttttatatttgctccattatataactttatattattaatgtaaggagtgtgatttttacttcaaggttgaatgatgtgtttgtgtcatgattgagatatgcgtaaaatgatttgaacgagtaattttttgcacattgttaatatgtgtaaaaagctacatacgtataacttgggaactttattaaaaatagtaatttataatttggtaattgtggaaataatttaatttgatgcgtaaacccatgaaaggcttaattaggtgttgaggttctagaagttggggagcgtcggagacttatgtctcgttggatatagtctcttctcaatttgttgcaagtgatgctgactgttataaattttgggggatgttgaaatcaatcaaaactgagaaccgagtcctgaattgttttagatttccaagaaaaattttggttgttattttcaatcaaggagagtaacacaactcaaaaaacaaaggagtgttgttgcaagaattagacaaagctgacgcagaccataataccaccagcattatcatcaacagaagccagaaccaacaagatctaacctgcaggattccctttttggtactggctggtcttatagaccgtggacaatttcaattcagaagcaattagcgatacatcaggtcctataattgcatgaacttgagaggagatctcatgtaccaatacaaagcaaagaaattctacaaagaagtggctttctcaactggaacctagagatagagctaccaactttcaggaattgggatttccaatcctaactaatatattctcatcgctatatgatcatagatccaccagtgtctcatactctctcagttacatatactaaaaggacaagcaaggaagatattttggtacatgtttttggtctttctgaatcaaatcgacagatactacataatatcaatgctatatagataacgtcggctttgcgaggttatctgctaccaaaagggacgatatgcaaagacttcttctaataaaaagattgataccagcaaaccaaaccatccattaatcatatataatcatatcgataataagtgtattgaaacatgatctcaactcaaaatctgataaaaatgaaaaataacaattatctctctatcatatctgttattcaaaaaatctataatgggggtgtaaagttgattccccaagtaattcaatatcccagagcatatcaaggtaagaaagagactactacttattaagtcttgcgagagaacaagacactaaccgctacagagatggtgataatggagacaggaacaacccaatactgctttgtcaagtcaaaaagcttctgaacagagtcttgtggctggtccttcttgtagatcttaagctcaggtatttccggtaaagaagattcatctagctcgccaataaaatacttctccataagttccctagcatctttgctgtgccctgcgtcttcaaaatcatccgttgcatctttgccttcaacaacaacatcatcacatttacttggattagagtagagacaacaacagatcagtcatttagcaaggatgggcaagaggaagaagaagaagcttacctgcgacagcaagaagcacatcatctcctccaggatgctcatccatataagaggatacatcatagacctgtaaagagaacgcatcagccatatcattttcttggggaccaagattgtgaagtcaacacattatcaacaaaaaaaaagaggaagaagattctgattagctcaatctaactacatataaacagcaattacaagattcttcattagattctataggcaacaagacacagatatggtttctgaaagcgaaggaaacttcaggattcacaaacacatgaacaaggattgaaattagaagattgagaaaaagagtagaccttgccgtcgatgacgacccagcagtcatcttgcttgttgtgagttgcggcttcttccatggaataaagctttgtgagtgtcggcatcttcttctgaaactgagtagcgagcgaaatagcgaatggtctttgatttttctctttttgggggttttaggtttggtcgaccacgcgaaaagatgagcagactagaggagaaagataataagagctagagccctctcagcaacgacgtcgtttaatttaattatttataatttcatattcttaattcctttttggaaaattagcaaaaatggaataaaaaattactgagaaatcagaaatgccttgtaagttgtagcaacgaatatacataaaagatttatttatcatcatttatcatttacatcttcgtacaattttttttaactagattagaaaattctcaacttgtaagccatatggtaaaagtttacaagcataaaaacttagttgacttaaaaatgtaaccaagccaattgaagtcattttggcaaaacatctttttgttgttaccctccttgattgattttgagtttacttttccggatggcaataaactaggagctgaccatcttcacttgctatgcatatatttctggaatcatcagtactgatgcatgaaactctttgacctgacaaaatccatgtaacaatattaacttttgagaattgacttcgttattttcatggatatatctagttaaaacttcaatcagtgtatacctttgaaatcatggagagagccgagtttagtgccagtggataagtcccacatatacacaagtccatcaagtgtgcctgctactccatggccagatattgtaccggcaacatcagccctgtaaaccacaaatccatagccaatgaaccatggatttagaaatgttaccattcatataccatttacttctcatataatccccaaagcaaaactaatttctcggaacatggagaaaccagaggagcctgagaaagacagtatccatgtaaagaaagagatgtgtgataatacctcggatccaactgacttcccaatatgagttggtctttcacaaggagagcaagtctccaacatctaactggactttctacacggtcacatttagcatctgagtcaagatcagtagagactaaaagccaaatagcagtgtctttgacttcagctggaaccaatgttttgttgttgaccccttttgagaaccataattttgttgcagctaaaatcatgtcaacgttatcctcgattgtagaatgactatgtacagggtgccatgcaaacaagctcgtcggaatgaactcaaagatcaaattgctgggagatacaaatcttgatactaggcttcgcttcgagatatccctaaatcgataataaacaaagttagcaggccgaaacaatggagacaggaagaaaaagatcaagcaaagttggctgctcctcatcattccctagcacggatagtgttctgtaatttaacaaagagatgggcagagaaaaaaactctaaagatagagggagagagagaaagagggagcaaaataccatattgtaaattctcctataccattatgcccaataacgagatgaggacattttggtatcttcttcagttccatgatgcatgatgatatgcaaggatttgcgagtataacatattcttcggtaggaccactgcaaattaaggatacaagaacattagcaaaaattccaatgatgatccaatagctccaaatagaagaaggatctgacaactattttaagagaagagtaatgaactctgatgagagtacctccaatgcgagttcatggcccagacaataaggtttccactcttaacagctgcaatgagattgttaggatcgcacaccaccacacactgcacactgtcatctgcttgaagttttgtcacaagagaaacatgaccagttttcacctggacaatcctcactgcattctcctcaaaacaggctgatgtacaaatcaaacacgagcaatcagtttccctcttcctgcaaaaaagggaaaataataatctcttagctaatatctttattctgtatctctgtaccatatgaaacaataaagagtccaaacctgcaataaggtgttttgatgttgccagttaaaataagatgcagcccgtctggagtgaagtgcaaattagatatctcgagtgttccctgacgaaatgtaacaactaacaactattagataactagagaggaaaaacaagtttaagagaagaaactacgaaaaagtttaatgaatttacatttccactagatttgtcatccacaatggggagtatggcaggagtgtgaccaatgatagacgggaatcctttgcttggtgcctcagctgacatcttgtacataaacagggtcctaactctatcttctgtagcaaagctcaacaccaaaatatagatttcatttccaacagtcctgagtaatactgatgaaacaggcatgggatgaaagtagcagccaagcagctcaacagttttttccatctcattgttgatctttacatctctgttgagctttaaatttgaactagctggaaattcctgcacagacgtgcatttctcgctagtattttccttatactgagactctgtagaaggtggttcagagacttggatgcccaattcctcaccaatattggcttgacaatcctcaaattttgaagctggaaatgaggatgatgatatacttgcacttccaaaagcatgagctgaccttgtatcttgtggtaccacacacgcctcattgctttttacattggtgaatgtgttgttattcaccttcactaactcaggaccctggtattgttctgttacatgaccgctttcattacccagaggattcgttctatctgatactgagttggtagacaaggtcggctgaagctccaagatacgtgaggaattaatcggagacatattccttatggaatcatcttctccagtatttctgcaactgtttttactttcagaggataaatttctgtttattcgatgttgattggtcgagactctttttctgatatacaccttatgattttcctttttaactgaacaagctt

SEQ ID NO: 995 - DNA, 106753 bp, Arabidopsis thaliana
aagcttcattggtggcattggcatatctcagatcagtgatatagtgttgatgtgttctgaagaaggtatgtgaggttgggaagaagatatatgggattcttattctagaacacaaagttgtacttcaaagtaattatccgaacagcgaatatgcaacaaacttgattgtaaacttaaatctccatggtgatgaaagaaaaaaaaaaaaaaaacttaaatctccatggttagaccatttcggtttctttgatatagctgctgcactcgtcttcctagatgaaaccttaaatggaacagtgaatatgcaacaaacatggccctaacacatgaaagtctattcaaattatctactagattacgcatgcgcacttcttgattgctaagtctaatatttgaatgaataaactctctcttctgttagtaggcactcttttgacggcagtttctattcttggtattgagaacctcataccaagcatgctcgaactcgatcttgatgcaccgtttcccccagaatatatatgttccatttgaaaatatctcacggctgctagaactttaatttcacttatgtcctaagaccggagtttatggaatattgttttaggttaagattaactcattgatgcgcagaatttgagggataggtaagagaaaacaatctttaccttcatggtactagatcattcggatggtatagctcacaaaagaaacaatcataactgataagcatagagttcggtggtcaaatcaagaaaaattagcaagtgaacatggaggtaattataaacttagcgagagctatgagtaaaaaaccatcaatctggttgacaacattattacataaaagtctggaagtttccagccctgataatggtgcaaactaaattagtctccatcaagttgtcaagaaaaggaaaaagaaactacaaacaaataaaccaggtcaaattatttgatacaaatgaattgttttccaaaacaaaaaatcttgactagtaaatagcacttcaggatgagcaagttttaagtagctcagctgctcaggtatggtgaattatttttaccttctaccatacatatccgatccgtagcctaccaccccaattataatgatattgttactatttgcttttgagctaaaatgaacagaaaacaaagaacgatgtctcataaatgaaatgacttgctaaggttaggaagaaaatgccacagataagaacatatgtccgtcttctttgatggggaaaaaacttagcaaaagaagaaaaacatgaaagtttgaccaaaaaaaaaaaaagaagaaaaacatgaaaagagtcctgtctcaaaagaatggccacaaaataaaataagggtttagagtcctgtttcatatcggcataatagcggagccattctggtcaattgtcacagatttttaatgcagaagattagagtagagcagaaaggaatataaaacttcaacatacgaactcagacctgatcttgcagtggtaacaatagtgataggtcggttcgaagacagcaaacctaccagaaaaatagagatcagacgaagtaaatttaagtcattcctaagtctttcttaatcggctctatcaaataacgtttctgcgtctctttctctcgtccttagctgctatgtctaacatacgatctggttgtggcaatttgtggaagtctatcttactttcacagaggcatatgtttaaaagtgcatgtatgatgattttatctgaattgatggtttgaaatttgaaacctaagtccaaaatatttaaacactggcaatgtcacagattatacatcaaaagaaaaagaggataatagtctggaaatgtgagaacaacaccagaaagcaacagaaagaaacagagcaaggccgagggagaaaccatggagaaggctagaatcaagaaggaagaaaccactgagcatcgttgaagttgaagttggagagaccgtggaagcgtttgacggtctttgttgcaagattgaagacaccgatgtcgaggcatgacaatttattgtgacagatacgatcatcacgagtgaaataaatggagttaggctcaattccaagggtatggtcagcaggcacggtaatacccaaatcatagaagagggcctcatcacctagagaatgtacctcaagaagccgggtgtcgagggttttcgggtcaagatctttaggatccctcttgtacagatggaacatcctgtgactttcagaggtacctaaatcgtacgtaaagacaaccaaaacttgacctgctcttgtaacagcaatgcctttgttagatgggatagacctcttttgcttcatacgttcacgttccttcattgtcatacttggcatccacattggaagcctatgtttctcggatacatccttgaaaccatcttcatcttgtccagacaaatctaagtgtcgaatgaactcacgggtggcatagacgtaaagattgtaacctttcagtaccatatcgtttaaacctcgtaactccctctgaacctcgagctctgttggaatctcgcggtaatgatcatcccctgtcctgcaaaaccctagaaatgggtacatttcaaactgccacacaacaacgtagtttccattcttgtcgtcaacccacaaacgacctctcagatcttcggcagcatgaggaaattcatcacgaaatggatcctcatcatccattagcatatgcttgacattctcctctccttcacgccaaatcttaaaatggctacccttaaatgattctagtggtggaagatcgatcctcttctcgctaaatacatctataatatagagtttcattcgggaatctaccaccagaaaccacttacctgagtttcccaggaatcgataccctgaaaagtcactcttcgtctcgtaaaccctatcattgtatgggttgtacacactattactacgacaaccatccttttctgcagaaagcatcagcaatggagatctggcttttggccgctgaatcaaattcgaacgcagagccttagcagagtcaagcgttagcgtagtagacctttgcattattgggacggagatcgattatctcgtgctgaaaaaattgagcaagggttaaattgtgcacactgtgtgtaaatataggtaccaagcccaataacagcaacaaaaaatattctaacgggtctgtggcccaatataacatcatcatgaattatttttggttattcaagattttgagaaacgtttgtgtgtaaactcatagtcgtagttattcaagattctcttgatattttcaagttgaattttgcaagagatactctcagttgtacaagcttcattggtgtcattagcatatgtcagatcagtgatagtgttgatgggttctcaagaaggtattaatattatgaggttgggaaaaagatatagaattctttatgaattgaaaggaacctattcttaccaaaaaaaaacaaatgctatgtcacagactgtgtttgaatttgagaattacgttcagttgtgtgtttgactcaaagtagacggtattgcgacgatccgttcatggcttcatagtttttgtgtaggcaatggcatgcgatgtttagtgagacatatagtcgattttgtttccacattactactaattcaataaagctatagttagttcaaaatggctgacttttgtttcgaagttgcttagctttgataatagaattattagtttcgaattttatgttagtctttcaaaacgaactagctagtgatgtaaaatcgaatttatctgcacttgtacatagcaaaaactctttattttggtttgtattttgtaaacatcaatgacgtacaaaattggttatgacaaatttaataaaccaaaagaaaaacaaatataaacatgttgtgtagaatgtagataacaaatttctgcaataaggttattcagctgtctgaatgaacctaaactatgctaagatagtgttactataagtcttagttaggtgaacaaaaacggcgctcattggagctcctacaaagtaaaacgacaagttgtttctgcgtatggcggacctaaaagtttttttagaaaattaattgaagccatccggtttttctgttctgcatttttgtaattgcgtaaatcgcctaattgctcttgtgtgctgctgcttctgtgtcgccaagattcttcttcttcaaccttgaaaaaccctaaaagttaaccgccactgcgatacggcaccgtatttgacgtttccgccggacgaatctagaattcagtaatggcggctccggctgccgcgacagcgagggcacaggcgctctctctcctcgccgctgctaataaccacggcgatttggcagtgaagctctcgtctcttagacaggtgaaggagattttgctgtcactggagccgtctttgtctgctgagattttcccctatctcgcagaactccacttgtcccgtgaaattctagttcgcaaatcccttatcgagtgagtccctttagcaattttacggtttctccctttcttcttccactccgttttgatgttttcccttgctctgcacgaacttgtagaagaatttttatgttgttgcgtggttagggttcttctctatttttcccaatctggagaaaagtttatggttattaatttgtctgacaaggtaagagactggttgatcgattcttctggatggcaggatcattgaagaggttggtttgcggatgctggatcattcttatgttctagtgagtgtcttactagtcttatcaagggacgaggatccaactgttgcaaagaaatctatttctgttggcacaactttcttttgcaccatcttggaggagatggcaatgcaggtccatactttttctcaagttggatatcttgtcgttttaatatgcatatttgttttgaaattccttcttgggatcttttcaaaatcctacatttggagtcagtaattaccagcaaaagtattttacatactcgtagttgctgatgagattgaactattattaacccatggaaactttcctcttgttttcattttcaaaacttcggttggtttttacgttgatgctacttatttgaagtttaaggctagtttcataaggctgcattgtaaatttctgttttaagtttttgttggatattatatatgatactctcgctgatatgtattattcttgatgatctctgcagttccatcaccgtgggaaagttgatcgttggtgtggggaactgtggacatggatggttaagttcaaagatactgtctttgccactgcattggaggtatgctggctgtttatggcctctctttttttttgtctgtctgttcctctcgcgaggtatgatctttggttgagtatttgttctgcttctctctcaatttaaggttttctaacccaagtccgttgtttctttcacaatagcctggttgtgtaggggtgaaagttcttgctctaaagtttatggagacttttattttactctttactcctgatgcatctgatcctgagaaagcttccagcgaaggtattatgctctaatcatgcagtttttattattattattccgataatattgtatttaaccgggaactgcaccatacatgatttgttcattttgttgcgcgcatgtcaacttttcctactctactgcaggaagtagacatatgttcaatatttcctggcttgctggcggtcaccccattctgaatccagcaacgctcatgtctgaagcaaataggacatttggcatcttagtagatttcatacagtcagctaatcgtttaccgggtgcattgacgatatctgttattagttggtatgtttctgaatccatcccactatgcttgtgtaggtacttttctttatattcatcatgatattaattgtgcttttgcctgttacagtttttgctattctacttttttagttgaaactatgttagttcttttggtcctcagtatgctgatttattcttgcaagttagttgatatgggtgctttggcgctcataaattttagtttcttctcgttaccttcataacgtgaaaaactcattctcacatgtatgttggtgagaaatgagccatacataatgtgtctgtgtcctgaatgatagggtgatattagaagtcttcttttgcataagttttatgtgtgcctcatttttgtgagatacaacaataagcagttgatcttccacttgtaagtagttttatgttcatgattggctgtcctacttgcactttcagtgtgtcttgaatcaaattagcttgtaaatgaataacatcaggggaatgaaactctggtttccatttgtatgtctactaaacttttggctgggagagataaagcgtggagacaggttatagcaccagttcaacccctatgataaggtttcagctaactgaatcaagtcctggggaaattggctcagttgatgctgcaccagttacagatattgacagttacctgggtatatgtggagctccagtatgcaagtgataaggacatcagacaatggatagaatggtctcagctctagtagttagaaatgtgttttccaagtaacacaggaacatgtttgaggaaatttttatttggttgtgtgaactggatgtatatatacacacatatatatatatatacacacttatgactgttatgttgggatattaaaaatgtatacattacagtataacagtttatgcacagtatcatttggcaatcagagctttctagcctatattttacttgccttgtggttttatcttctgttttgatgatactgctaggttaggtggatatttgatgtggttgatgatgcgttgaataaattatactgcttgatcttatattatgtgttgctctttagatggatatagaacttatctcatggttatcaattgtcatgtccagtagggggcatatttctagtcactttgaactatcaaggttccttcatctgtttgatagcaccttcagtttaacttagaaatatctgcatagcaaactaatttgtcacttctgaattttatttcaaaaagtagtaattacctagcagatgcttgtttgtttgaactaatattactaatcaatgcttggggacactatctttgaagaaagatcaatgtcaaatcctgagaggagagacattgtctagagagatggtttttgatttttatgttatatgcgtccagaccagaacttctgactcctcaaactgtgataatgggatatgtaaaaattttgattgaggatagtttcgtgttgttaaggagctaatttgctgtgttgtattctgcagaatcatgagtaaagtttctcacaggaatggttgcgtaataaagttatatcaaactctagtatatcttacgttagataattgtacatgttaaaagcagctcctcacacctagggatgtttctttgacatcagtatagttatttttgtttgctgagatgtgcagtgattcattaggacatgcttgtaggagcatacctgaaccatttgcaattttgaatatttcctgtttaagcactggtttcttatctgacagtagcttatctttcagtcttgcagtggtagcaaggaagaggcctgtccactacaacactgtcctctctgttctgctggagtttcacccaaatcttgagacggttaaggggtgccatgctgcaagcgttcagtattccattagaactgcctttctgggatttcttcgatgtactttctcaccaataatagaggtatagagttcacactttatattatttttgtttatgctgaaatatatctaaattttagtcatttgttactcttcgtatctttatgctaatgaaaagatagttgtttttaccacctttctggtcaaattctgaacctttggttatctggtttgtctactctaggaatgtgtcatgtcttttttccctcaaacgtgccattcattttctttagtaaaaggtcttcaatgactacaagcaagcgtatgttatttagtgtcatttcatagagcgaagccttgtagtaggtcgaatagagtgcaaagaagtgtttactttatcagatcatataacacaagtatcatgtattttctttttgtttgctgatatttcttttgttactgagataattttattttatttgtattttagtcaagagacaagcttcttagagcatttcgagcaatgaatgctgcagatgttgctgaccaagttctccgtcaagttgataaattggtcagaaataacgaacgtgctgcacgtgaaaattggtcaggcaaggtaaatgttttgttttcattctttatttcctactttttctttagctctacatcacctttgatcattctgaccagtaacgtctcatgataaacctacttttcagaataaccaggtgattagtcatcaaaattcttgggatctgtcaaagaaacgaataatgccccagggtgaagatgatacaatcaatggagaggttgctccgaagcgcgtacgccataatactaacatgcatttgacccagcaagttcaaacaaatgaatccctacagggacctgtctctatcaatggcatttcctctggtaaccatctttcggacagtgagttgactccagtggaacaaatggtttcaatgattggtgctttgcttgctgaaggagacagaggagctgcctcacttgaaattctcatttctaagcttcatccagatatgcttgctgatatagtaataacaagcatgaaacacttgcctagtacccctcccacgttggcaagttcagtggctactccagcagatattgtggtatcttcttctacaaataccgtgcattctccgactcctccggcacaacttccttttgatccaatccttcctgctgggtcatcgttttccgaagtgcctagcttgagtagctcggttgccgaccctagacgcgacccaagaagggtacaaacttctatatgttgcttgattctttgttgaatgttctttctccaagataacttattcatagttatgcaggatccccgtcgcatggatccaaggcgtttaaattcatctgtgggaccaacgtcactccctgtaggtgagggtaaagaatcagttccagtacagaaggacatctctaccttactgagtaagccagtctcagtttctgctgtcacgccaggggctactggttctgtacattcaacagcagtagagcttagccagaataagatgatgggaagttcaggaatcagaataattgatccgcctgaatgcagagaggacttgttgactgttcccaatgagtgttcttacccgtcaaaggaaatatcatccttagatgttccactatctccttgcagggatgatgaaggcatcagagagacaaagtattcagtcccagatttggatatgttgtctgtcccagattttgatcaacattcgccttcagcatcagtcccagattttgatcaagatccccctgcagcatcagacattactgcaccagaagaaagctatcgagagttggaccctgttccgtcatatgttgaacttaccacagagcaaagcaaaactgtaggaaagttggctattgaacggataattgaatcaaatagacatgtctttgggtttgattgtaacaagatacgcatggcattgattgcccgattgattgctagagtgagtgcctattttatatctgttacttgtggttttgctgtcaattctggctaccacttccatcatttggctttatccttagggaatccttatttcaagttcttcttgaattctttctttctacgaaaataaatattttttatatactatttttccagatcgatgctggcagtgatgttgcaaccatactaagagagcttattagtgtggaccatcgagaattcaaggtacttgttggctgcagtgttccccaaactcagccatcacttatttatataggttttggattttgaatgtcttttccaaatgttgagagtgtgttggctgtcataaatattgtagcatctttaaagtacgcagccagtgcactgctacagtgcaaatatttatttgtctgaataacttttccctccaattcccagtaaccgagagtctaccatatgtctatgcaaacctctgatctgtttgcttctttgtatctaggggcacgatcttgttttacatgttctctaccatctgcattcaatggccattctggacacagatgaatcctctttctatgctactgtttatgaaaattttctcatatcagtggtgagtgtttattcaacttttttccaattcttgtttatgaatctcgcttattaagatgcttactgtaggcaagatcatttctggatgcgcttcctgcttctgacaagtcttttagtagactttttggagaagctccacatttacctgattctgccataaacctactggatgaactctgctccactcgtcatgacccagttggaaaagaagtttgtgatagtgagcgtgttacccaagggcttggtgctgtttggagcttaattttagtgcgtccaaatgagcgaaaagcatgcttagctatagcattgaaggttacttatctttcttacaaaatcctgtcacattgcagttatgtaattatgttatattctcagtgatggagaatatgagaattccaataatataagttttggattttggttgattgaagaatgtatagcaaattgcaattacagaagcagtgtgttctgatctctaggacccagaaaggaatgctgtgctcgaaactttctttaaatctacatgtttcatggccatatggtcctttagatttttccgtgttcctaacgcatgttttattcctgttatcgcagtgttctgttcattctgaagaagaggtccgcgcaaaagccatccgacttgtgaggaaattagtcccgtatagcactatggtttttatttactgctggtacagcaattctaattgatgtttctcaaatgcatgcacaggtcacgaacaaactatatcacctaacatacatagcagagcatgttgagcaatttgcaacagatatgttgctgactgctgtaaactctgagacaaatctctcacagactgcatcaactgcagaaggaataaaaatggaggtaatagccaataacacttcccttgagtgcgtggagcttagttctctttaaattgtatgtataaaggctcattagtctatagaacttattagatgtcagttactttttgcgcctgttctcgtaagactctaaattttcgcttgtgagggttacctagttttgcaatgaacgcacttcagtttgtaacctcgaatttttgtgggttgattatctgacaattattttcaggcaaaaagccagataactttgacaactgagtctctagggtctggaaactccgacattccctctcagcaggatctacaaacttctcgtgaagtttcagttatatcaatttctgaagctcagagactgatttctctgttctttgctttgtgtaaaaaggtctgcgtagtctttggagatgctccttatgctcaaagttattttctatttaaagattcccctagatctgatgaatctcttttttcagaaacctagtctccttcgacttgtctttgaagtttatgggagagctccaaaaatggtaaaccaggtgagttagtctattcctaataaaccctcgtgtcacttatgtgcatcacatgtggcatggtacagaattatttttggataggatattacttttgattatcagatttttattgtgttggggcgatgtatggcatttcttatatgcatcacgtgtgttctcacagttttaatgggagtaaatgatattcacaaacttcaaattaattcattttggtgacttactgaaatggttcaggcttttcatcgacatatacctatcctaatacgagaattaggttcatcttatacggaactactccaaataatatccgaccctcctaagggaagtgaaaatttattgacatatgtaagtgacttctgtgtttccttgtagtaaatccacgttagcctcaaaagtagattctaattttgaataacggtctgttacttgtgaaggtgttgcaaatattgacacaagaattggcaccttctttggatttgattgctactgtaaaacatctatatgaaacaaagctaaaggtttgatttgttatgaagagctcgctcgtatctttttcttgtgtgtaaataattatgaaaataaagttcagaaagccttacagaaaatttgttttgcaggatgtttcaattcttattccattgctttcttcactcactaaagacgaggttagtttttactttctttccatagcttctgctctttcgctgtacgtttaccctgaagaaagatgaagaggcttgttatttttattatatatcttgttccctcgttattttacctatctgaaatgtggaaataaataagaactagtaatcatggaaggcttctgataaaaattttggtcctttgctggtggatgcgaaagatgatgttttgttattgcctatcaattgtggaaattccttattttatgacggacattatttttcaatgtaacaggttttgcccatctttcctccccttcttaatcttccgcctgaaaagtttcaacttgcacttgctcatatattacaggtatatgcatattctccaatccatcctttaattgctactcactgatcatgctatgcatagaggattgccttgatattttaatatctgatgaaatgagagattggtttgtccagttacaaaacaggaacaacagttcatttcatgagtatattttacacacctgtagtttttctgaactattccgatcttttgtgttatatctgtgatagggttctgctcacacaggccctgcacttacacctgccgaggtactgattgctatccacgatattgttcctgagaaggatgggccaccacttaaaaaggtatttccaacttttctatctggtttgaaagtacttctgaagggacttgttttctgcactcatttgctcaaaatcagtcgtgatactagacctacactgctgtgtatattttcctattggcatgctttctttactatccctatctcttttcgatgcatcagctctgcttaagttctgtggcttttggcaagtgtgcataaggaacttataaaacttcatcatcagttgcatatggccacgttatcataacttacgtagaggcagttatcataaatcgtaaattcaacagagacgaggtcatccagaaattagggtggaaatggtgggttgggagtgttggggattcaaataatacgttggtttaggtgtgtacgtctattacagaattttggtagcgtgaagcattgctgctatgtcatatcaaatgccctttttattttctgctatttcctcactagtaaaataggtatttcccagtaacttccaggcaagctatttacgcgaatattaatgattcatctcatgtcactcgctttaggaaggtagaaaactaggggcaatcagcaactggctaattagattgtcagagttgctatcgacaagattaatctgttttacccatggacgaccctttatgaaattctgccactatgctagctgttctatctagtctctattgatagcagagtcacatttgactgtgtttttttttgttttttgttttcagataacagatgcatgctcagcttgctttgaacaacgcactgttttcacgcagcaagtcttagcaaaggccctcggtcagatggtatgtcaaatatcatggaaaagaacttcctatttagttagatattgagatctgtgatactttttggtttcaggttgatcgaactcctctgcctttactcttcatgcgaacggttatccaggcaatcgatgcttttccaacactagtaagtgtcctactataagtttaaagacctccgtgacatatttacctaaaagcttttttattacaaaagaaccaaagtaacagaaatagaatttgaaataacccaaaagaactgcattcttcccttggcctaacccaaagctctctctagcttggatgggtctcacaaacccttaattataaagaaaatgtcaaagtaaagtgcaattagtatagttttagtctaagctatattataagattgtttagttgagaagtgacagtatatggtttaagtctatagatcgaactctggattcgtttggtcagaagtaaaagaactttctgattttttgtccaggttgattttgtaatggaaattctttccaagttggtgaggaagcaggtgagtaatttaaagatcaaacacaaggatcagcattgagacttattttctattttgtgtggttatgactgaatgtcttgccgtgtcttttggatgcagatctggaggctgccaaaattgtggcctggcttcttaaaatgtgtgtctcagacaaagccgcattctttccctgttttattggaggtacaagaaaacgttgtggaagaatatacgagtttagtgtattacccaaaaatccaaataactctttggtgttgttttgcagttaccagtgcctcaacttgaaagtatcatgaagaagtttcctgatctaagaccttccctcactgcttatgcgaatcagccaactatcagatcttctctaccaaagtaggtcttctaaatcaaacagacactctgttatcctgtattttaagtaccacatgtcagatactgaatggtgatgcatgttttaacagttcagctctttcagttcttgggcttgacaatgggcaagattcacgttcacaaatgcacccttcagatgcaacttcgtctattcatggggcggccttaacgtgactctctctggaagaatatcgccaagttgaagttattggaggagacaaagcacagatgattagatcctgtgtcaatggtgggagactggctaccacgcgtaaatctgactactaactacatgtctttgggattagtagcatgaccagtatggtagcccagcgtgtgtggtcattgataatttcttatttgttgccctttttgtgtatattatgaaaatttcaccttggccgtgagaaggggttcacatgtaatggatgtacaatcgcatcaacgttgttcctataaaaagagaagataagagttgaggataataatatcaagaccaaatatcaattgccattgagtttatacggtttcgagcccatcccaatttgagacaccctttaggtcctgtagtattatatctttttcctggaaaatgtaaaatcttatattcaacgatacctttttcctggaaaatgtaaaatctttcgtttacttttacaccctatctaattgtttgctatagcatcaccatttgtgttctgtattaagtatggtttttaacatgcggttgtttctttctatttcttctcttcttaggaagtgatgatttaagctctagactctagtatagactagactttgattatataggcggtgaatttttttcttcattgcaaaaaaaaaaaaaggaacaagaagaatttggttagccataggcgaatacaatgctgtggaatcatcaatgtccgaaggtaatataattccatctcatactaaaacaccaaggccttcaatttaattccaagcaactcttgcattcaggggaggctcacgattccagcaacgtttatccaaaatgcgtgcctcatcactatcctaaactaccctcgctcgtcttcttccattcttcatatgcttctttgatatatatccagtaatgagcacagcacatggggtaagtagaaacctgcaagacatataggagggagaagtcagatgattcttctgcaaacaaacacgcatagcaccatcaataggtagagaatccgaattttgattaaggatcaactagctagcttcaccctttccaaatccaaacaaacactgacttttcacggtcttgagttcacattaaaagttcggaaccttataaatcttaccagtcaaaactatcttcaaactatttcatagttatgagagcctgcagattcttttggatcgcccacccttgtggataagggacatccagggcatccaagtgaagatgccagttcagtatactcgagcaagctggtggaacaccttccatctcgctttcatcagccaccacctgctctataaatgatgtctcctgcttggaaacacacgatgtcatgtataagaaaagggttgactgcacaccagagaaatccaaagatatgggaaaaactcaaactcatacctggaaaccctccttcactgtgtctagttggcgggttggatgtgaaaagggacgtcgccaccttttagggtcccagagtatagtgctgttaaaagcaaatcccgacatatcaacatggaacctccttagtcttttactcttttcattagtgtgccatcctattacttgacttccattgcatactggaccttcaaggatggccttgtttttgctttgtgcgagcatagcaacaggccaagtcccaaatcggctacacaatgtaacagataagtatagcaaattaaaattggggacaaatactttagaagaagaaaagctttggaaatcaagccatcagcatttacactcaatggatgcttagattaaccaagacaaggtacaaaaagaatgtttaacagagtcctttccaataacgaaaaatgaagtattctctcaagtctcaaacaaacaagactgagcacatggcagagcaagcagaaaagtaagaatagaggcaggcagacaaaaaaaaactcagattctgtgcagaaaacttcaaattctcattactttcaacatcaaagtaataggcgtatattcggtgttcaacaacactagaatcacaaagactgcacgcaataaagccaaaaagatgccaataaaataagcgcagacgatagagttgctcaactaacaaactcaaacataaaccgcagtctctctaataagtctatttcacacaaaattaccatcaattagagacagcaaaagtaatgagcagtctttttgagtcacctgatttgtctcaagctttgaaagagctcaagcgagtagatattgtcatcatcagcaaagtagacaattccatcaagcttatgcaactcaatatgttccaatgcagtgtttctctgatgcactcctctatccttgatactcgtcatgttcctcttgcaaaccaagtgcctgtacatcactcccgtcttcctcagaatctctgaggtttcaaacgacgccacgttaccctccaccactatccacagcacaggcgactcaactagtctcagcgtttgagcaaccctgttcaagtaatacgcctgcatcgctctattatacgttggtgtgaccacaattagaagcttcttcggcacaaaattgacctccttcttcccattttcagtctccgccacgaaactcaccgcatctacagctgcttcttcccgtttcctattttccaaccgttcttcaacgtagggctgtttgatctcgaaggagaatcgatcggaaccgtttacatcttccatttttccgaaaggtgtcaaacctaatacaaatccaagaagaaagaagacgagaaactggtaaaacggtcgcctccatggacctctacgcgagcttttaggatcagacgttactccgaggagcttggtgagatacgaaagaaattgcgaagaattgtgtttgctgctactaccaccaatggtgaaacctttgtgtgaacctccattctcgtgagaacgatcgtgatacatcggcgagagagttcgccggattgacgccatcagataatctcactccaccgtcctatttttcacagctcccaaatcaaacatccaaaacagcaattttcgcagagatccgcaccaagtttgcaggagaatccgcgtaggatatagcaatttcaatctgaagtcggattgagtaaggtggttggttctaactcaaagtcaccgatctgaaacacgattggaatggatccgtcgccgccgagatctgaaattgagctggcggagaaagttgcggaaaaagcactgtttgtttgtttgttaaaaaaaaatctttaagctatgcgagttcgtgggacacgtggcgagattatggctcgtacactctggcaaaataatgattacgtttaagtttcgaggaaatggtctactatggtaaaaacaataattaaaacataaattggatttagttgtaattgtaaacgctgccaaaaaaagaaaacatgattaataagtaattctaagttttatcatcatataaagtaatggcctctacttacctattatccactatacttgaatgagttctaagttctaattacattgaaaattttatttattttagcggtaataaaaatagatataactcatatgtcaactagatttactattaaatttagcatgcatttcttacatcattgcaacacatatggtacaaaaagatattatattccgttttggtttttaacggtgcaaaaatattagacaaaattttaaaacatgtgtaatttacagtcctttttcgaaagtttgggttattttaataccagttttctataatatcaagcttggcgacgtaatatttgattaagcgattaattttttttgctgtggtgttttttttctttttctttttttttcaagtagaattagatttagtattgtatgtttgaaagcttagtcaaaaaaatttctcagttgttttgttaaatctatttttaacggtacaagcagatatctagtttcaaaaatagatttacataagtttttgtgtcaaaatattaaaaatttatgtagtgatttttaattatttattaaaataaaaatgtttaggtttacaagatgttaaatctattgatttgatctcatggcaaaaaacagataaaaacataaaataaaaacaatcaatttatcgactcaacgtatgttgtgaagcaaacggtatcagataaacgatacacgattctaaagttcttctaaagtgagctacaaaggaaaaaagatggctatgaaaattgtaaagacttgcaaaacaaaaacccaaagtagcataagcctttcattggagggcttcgtaggtagttcgtccatgaacccgtcattaatgaaggattataaataaatgtgatgaatatactgttcttcgtctccatccttctgatcaaacgacttggatgtacaaatccaaggtactctgaagcctacacaccacataggtgtacaaatccataaaatttgagcaataacccgataatatagcagaaagcaaaaaaatgtaatccaaaacctaagaaagtcctataaatgataatcatataagcacataccttgaaaagctcgaagagcttcttaggatcttcttcttttttgttgaattcctcgcggatccacttctcatccttagtggagaagggtttgtaggaatcttcttctggttgatagttgctttgaaagaagaagctccaacaagcatgtgttataagctgtctttctggtgtgggaaacagaactcttatatgaatatttataaaggtgttcattagtttccttcaatgtttacaatcttcctcatgatttcactagagacatccagagtacaaacgacttcgggatcggatgatttcttaagaatttctgaaacttttgtggatacttcagccatagaacaaggatcaaggattttaacaactgagtcattgcaagttatgtttacttttgcatactctcctccagtcatgatagatgattttacaaggagagaaaaacctaacagagaaaggaaaaaaaatcaaagcgtagagagtcgagaggatcatattcgtttacaaaagaaaatagaagatcgttactttagagatgaagatcgtgatggtttcagatagatagagagagagagacgagcgaggaagtgaaagaaaatacataaacttctattttatatcccaccctttttcttactatcaacaaaaaaagaaaattgtttaatgtcggttttccgattgttaaaaatatccgcttaattttcttacacacattttttattacaaaaaccaacttcaaactaaataattatgagggttatatatatgaaggataacaaacaaattacagattaagaaatactataatgaaggataacaaacaaatgacacattaataagaaatacttaaatttggcatgggtccgagatagttgaagactgacccctgtttaagcggattccaacttttaccaccaatttagctctccccaatcttgcttactactttcccttcccaccatctctatccatttttcctatctctctcaaaaaacaaagtgaaaaatataaacggaggatgcaagaactgccggattgtttgtacgaggaaaaccaaccaaccttaataactcctttatctcccacaccaaatcactctctctacctttcaaacctcgacgaccatcattttctcagattctctatcaagtacctttaccttttccaaaaatctatatcccctctcaccctgaaagattcgctctctagggttctagttgattactaccctttcgcgggtcggataagagtctccgatgaagggagcaagctcgaggtagactgtaatggagaaggcgcagttttcgcagaagctttcatggatataacttgtcaagattttgttcaactttctcccaaaccaaacaagtcttggaggaagctcttgttcaaggttcaagctcagagtttcttggatattcctcctcttgtcatacaggttcgtaatcatttattttatttttttcttgctgggaaacttatgatttcaatttcaaaagtcaaaaccatgactcgtattgtttccatattagttaatttcgtgaaagaattatattcgaatttgttttggagggggataaacgtagctcgaatattttaggtttcttaaagttagttggatcgactgttctgtttaaatataattcgtaggaataatctaaattgtttttaaattcctaactcctaaattgattcggccactttgttcttttcaaattagaaatgcatacttttactggtcgtgcataagcattcgatgtatcaataacataaagttattttctactcttaaaatacgtgaactttaataaagagattatatggaagaaaaagaagggcgcatagagaataatttgtctgttcaatcatactctttttcttttctcgtttacacgaaaaacaaaaccctttttttcttgcattgaattagttcattctataagtcgttttgttcaactcatgttatgtgttttattaaaactgcgtttctatgaacttacgtataaagtatcagcaagtttgattattaacgcttgaaagctagtcgaatgtaataataaatcgacattttgatatcttacgaatattaatgcctcaggtgacgtatctccgttgtgggggtatgatcctctgcaccgcgatcaatcattgcctctgcgacggcattggcacatcgcagttcctacatgcatgggcccatgcgaccactagccaagctcatcttccgacccgaccattccactcccgtcacgtattagatccgcgaaaccctccacgtgtcacacactcacatcccggtttcacccgaaccaccaccgtagacaaaagctccaccttcgacatttccaagtatttacagtcccaaccattggctcctgccaccttaaccttcaaccaatctcatctcctacgcttaaagaaaacctgcgctccttcgctaaaatgcaccacgttcgaggcactagcggctaacacttggcgctcgtgggctcaatctctagatttaccaatgaccatgctggtcaaactcttattctcagtcaatatgagaaaacgactaactccagaacttccccaagggtattacggtaatggattcgtactagcttgcgccgagagcaaggtacaagacctagtcaatggtaatatttaccacgctgtaaaatcgatacaagaggcaaaatcaagaattaccgacgaatatgtaagatcaacgatagatttactggaggataaaacggtgaaaacggacgtctcgtgcagtttggtcatttcacaatgggcgaaattgggattagaggagttggacttgggaggaggaaagccaatgtatatgggtcctttgacgagtgatatctactgtttatttttacccgtggcgagcgataatgatgccatcagagttcaaatgtccctgccggaggaagttgtgaagagactagagtattgcatggttaagtttttagacggaaaagataacgaagatgagaattctcgtgcatgctaaagtttctatatacatttcagtggtctataataaaagagtacttcacttgtcgatttttgattggttttaatatgttttatgtacgaaatattttcttatatataagtttgaaaacagaaaatagacatatgaaccccaataaagactaattaaagagagtactagagtagctcacttgtcgatttttgattggtttttattaaacacaaaatggataatatgatgagtttaaaaacagtctttctccatgctagtatgataatgatattgactgatcgatgaattcaaaggaatacatgttttagtttagttcatcaactttagcttaacgtacggttcttaaatcgaagccaaaattcaaataaatattaatatatatccaattttggtaatctctatcagattatagctttatgaaaataaaaaatttaacaatgattcaaattgctaaatgctaatatattggttaaagtgttattttctgcaaaagttcaaataatgttaagactatttctatgtagtttgatcatttcaatctcaaccacataaaaaacgacactatatattaattcgaagcccatatccattatcgaatatgatgaattgcttacaatcataaagtcaaagcccatatccattttataaatagagttagatatttatcttttttaggtcgcaacaccgcaatagatcttttccccaagtttcagacaaacataaagcagcagagaaaattttcaagtttcaaagagcttttccctcaccaagcaaaatttgggttagtgaaatctcaaattttgctatccaatttcgttaatccttcctttgttagagtcgatttcgttgtcctctgatctcatctcttgaatcaatcggctcctctaatcctttacctccttcacgtttcgtaattattcgatctgttttctgcagatttcgtgaatttaatttaatcgcctcctcgattttaatatttcgtgatttgatagaatctgttggaaatttcttgatgttgcgataatgggtcaaaaaatatatatgtgaagctgagatcagatttgtgtcgtattatgtcccaaagctatttaacaatgaatctgtgtttgctatttgcagatatttgtcagcaaaatctgcagctaaattgggacttgtcttgttagttcaaagattgaaacttttttggttaattgtttggcggaagaagatttacaatgggagaggagcatccgagaaagcggtctagacaacattttgaagcggaggcgagaaacgtatcgttgtttgaatcccctcaatgcgaaacctccaagtggtatttcagcagggaagagattgagcgtttctctccatccagaaaagatgggattgatcttgtgaaggagtcgtttttacggtcttcgtattgcaccttcctgcaaagacttggcatgaagcttcatgtgtaagctcaccatagtattactttgttgttttgtcatctaggaagaaatagtgtttgttctttggttgtttgctagaaaatctacttatgacgtctccttgtcttctgatatttcttggtacgtttttttagctaaagagggtgcctaatgcatgacaatggatagcctaactgttgaattttgtcgtagggccactgtgggaggtggtctggaggttctccaactatagattctcgattttgtctacatttatatctcgtgaatggaagaattatgtaataatagtcagaatttggtgtccatgcatcatatattgactcacttgtcacttctcatcggcaatgggaggatttgcatctgttgtgaatttgcttgggagctgttcacctgtttagacatgaccttctgatctatatgtctttgtatttgtaattctctgctgggttatcaaaaccctcagctgtgttcctacctttaccaactgatgttcttagttttctgagcaagtgcacgtctctctccggcctacttttttgaatcatctaatcataggtactggtgtatttttgtcttctgcattactcacgtgtgtcggaaaagtttataaatgctggtttcggtgaaagtgatgtctagctattagttgctgcccgagatatcataacattgaccttgttcatgttaaaggtttttgacaatctcattgcttcaggtcccaggttacaatatcatgtgcaatggtgatgtgccacaggttttacatgcgccaatctcatgcaaaaaatgactggcaggtaagaatgctttagtattcatatggttcatcaattgcgttcattggagctgacatgtaaatattaatgattgaatagtctgcaacagatatattgattcttcttacaaaatttgggttatgagcaatataatgttgatgaaaacaagtcaaaagtggttatttaatagttattcagtcttcctggttaattagaagtgtatatgattgctgctaaatatttccacttcggtttctcactcggtgattttgcagacaatagcgacttccagtctgttcctcgcttgcaaagctgaagatgagccatgtcaactgtccagtgtcgttgtagcgtcttatgaaataatttatgagtgggatccttctgcctcaattagaatccatcaaactgtaagtgtatacatacatctatgtattggtaaattcgcactgtgcattttgctaatttattacatgttgctctgcctgtaggagtgttatcatgaatttaaagaaattattttgtccggggaaagtcttctgctgagcacaagtgctttccatttagacattgaacttccctacaaacctctggctgcggctttgaatagactgaacgcttggcctgaccttgcaacagctgcatggaattttgtgcatgactggtaaagacccttgttaataatatctgcccgatttttcccctacattgagtttgaatcttattatgcattgtgtgtaggattcgaaccacactatgcttgcagtacaaaccccatgttattgcaacagccactgtgcacctagctgctacgtttcagaatgcgaaagtaggcagcaggagagattggtggttggagtttggagttacaactaagctattaaaaggtttgctgttcaaactctattttttcctctggtattattgcagtcatttgatcaagtgagatgtagtgtttctataatgttagcgctaggaatatgtggtactgtagctccagctcatgttaggttcttaccctgtgcacatattgagtttggaattaggtagtggcctgaacgaagagatgtgctgctattgattttagcggttgattaaaaataattggatgttttcattatggtgacagaggtaatccaggagatgtgcacactgatagaagtggacagaaggaggaatatgccacctccacctccacctccaagaagagagttaagttgggcaatacctgcagccgtaaagccggtccatatggctagagcttatccgtttcacagctaccctttgcagtcctatagacaggctggcatctggtgagccattgttgagcagcatgaagatgtaatctctcttagagtcttgagttggtttagcaataaaagatttccgtagagactcatgagagaggcagtgtagcattatatagagatccgagtgaggtgcttctgtctaagttaagcgtctcatgtatgaccaaagtggattctctcgagattcttggtctctgttctcgatagagagagattatgtatagaagtgtcccattcacatgttataatactagctgactttatatcgtttgtatatctggaatctatgtttttggtttctttaaaaagtttaaagttgttttgattttgactaattctctcattgttaagtaatttggtttttgatgaagtgctattaggtctgtgttgagttgagacttgagacgaacacaatcatcatatgatcaagcttataccgatcggataagtaattaaccggttcaattaactacacctagcttataccgatcgtataaaccggtcaagaaccaaaaccgcttggtttccattctagaccaaaccggattctagtttccattattattatcttttttatcggattaaaaatataaatccttatgtcaggagatcccattctctgtctctctgtctttctcccccaactcgcgaacaaagcaaaccctagatcatccatcggcgagtgagacggcagctcctcgtcggtaattccttccaccggcggcgaccactcaccctcagatctctcaatcccactcatctctgtaacattctgtacgctttctctctctctttcttcgcttttgtgatctattacggctcggtctctgtgcctcccagctctattttggagcactgcttcgtctctgtgtttatttggctcctttgtgtgtttctctatctctgcttttcttttgtattgctctgtttccgattttatatccatatgtctctggttatttggttatatctatgtgtgattctttgttcttttttccattgaattcaatagctgactaagatctctgccttttatcttcaatagttgctcaatcttttcgctttcgtaacataatttagtttcttgttgatgtttttgatatctaccaatctcttttcaatttatgtctatatgttgctaaatatcttgttcaatgactgatttcttaaactcagggtggaaattctgccatggcggagcatttggcttcaatctttggtactgagaaagacagagtgaattgccctttctacttcaagattggcgcttgccgtcatggtgaccggtgctcgcgtcttcacaaccgtcctaccatctccccaacactccttctttcaaacatgtaccaaaggcctgacatgattacccctggtgttgacgctcagggccaaccactcgacccgcgtaagattcaggagcactttgaggatttctttgaggatctttttgaggagcttggaaagtttggcgagatagagagcctcaacatttgtgacaaccttgctgaccacatgattggcaacgtatatgttcagtttaaggaagaggatcaggctgcagctgctttgcaggctctgcaaggtaggttctattcaggacgtcccatcattgctgatttctctcctgtgacggatttccgcgaagccacgtgtaggcagtatgaagaaaacaactgcaaccgtggtgggtactgtaatttcatgcatgtgaagcttgtttcgagggaactaaggagaaaactctttgggagatatcggcgatcataccgcagaggaagtagaagcaggagcagaagcaggagtattagccccaggaacaagagagataatgaccgacgtgatccttctcacagggaattcagtcatcgggacagagatcgcgagttttaccgtcatggaagtggaaaaaggagcagtgagaggtcggagaggcaagagagggacggttcaaggggtaggagacaagcaagccctaaacgaggagggagcccgggtggcgggagggaaggaagtgaggagaggagggcaaggattgagcaatggaacagagaacgggaggagaaggaagagggaggagcataaaaacagttgtttactcaaatcacaattgctgctatgtggtttctgcgtctgcttctctgcgtttattctgaaatcggtaaaatctggtgatggatttttcatttggctgttctaatttggaacttgaaatgagtggaatcaacttctttagattataaaatgtttggggttactttcttgtagttttgattaggaaaaaccgctctgtccccttgttattgattttcaccagtgttctttagaactttgtactatcttctgttggttaaaacttaaaagagttctagtttaattcgaagttgtctattgttcttcaatgcttgggaatactaacgagtttctgtgtcatggttcagttgtggcactaattcgggtcaaagcacctcagaattttagacaaagataaggggcaaacactttgggcctttgattgcattgatttgtgttccaaacacgtcagaagttaagtctttttctaaaccagttatcgaatgggttagtcttggttgccatttttcaaacatactggcttccaattggtcatgccaaatatgtagcttactagacctatatactttccaaaattacttcataagctgtttgtctaattcacgcaatgaatacatatatgcataaaatactccatatgagtaaaaagatgtataatatagcggaatatataacagaagtcgacaatgcaatatacatcaaccctaaaccataaaatcatgaaggtcattttggcttgtaggcgtcgtcgagtccctcttcagtgatcgttgtggttcttctggacagaatattcaaatggtcatataactcataactcccaaacggccaaaccattgttctaattgtgatgacgagtcaaaccactaatcacaataaattaattacttttttttttgtcccacacatgttcacaaatatatgtttagttaaaaaactcagaattaatcaattacaatgcattaaaatatcgctaccaccgtcacaccaccccaatacatccgtccgatctagcatcaacacccacagcccatcccattgacacggcggtgtcatttctaaagcatcaaacaaaacatgtcattgtttattcttactttacattgactgaatagtctgaattaacataatatatatatatatatatatttacggaattttatcatatgaattctcagttatggagattagtagttcaatagattggccacgtggagaagtctttgccgtcttcgcttgagtggatatattatagtaataaaacccatacgatatcttgttaactttttaaaagttttcttacatcaaaaatatacaagatatcaaagttcaaaaattagaaatctgaaagatcgtagctacatagtgaaagatggattgttgaacagcgttataaagtcacattaattccatgtaataataatacctcaaaatctcaaatacaacacatgcacgtgtctagcttgctgcgtttctatatacattatgcaactgaaaatcgaattataatgatactaaaatgaaatatatgatcttaaatttgttattgttaggaaaatataaagatgaggaatggggaaagtctgttggacagtgatgccctaaatttgagaaagcatatattcccctgctctaaagcctttgtcctcttcttagacaactttaaaataaataataatgctttcccatactttttaggaccctccttttaaggcctttgttctctacttttttctatttgacccccaacaaaaagagattatcttttcattttttcgtaacataaaaataatttatgattgaccaactacgactatctatctttaatttcttttgaaatcaatttaatcatgaaccattgtcagtacatagccttagcatcgcctttcctgtcaaaggatgcaattttgttatgttttggtagtttaattgaaaactcgtcatagtagacagatataaatatttctcttcatctcttttttgtgcttatgttatatgaatcaaatgagtatcccattaagtaaaagagaatgaatcaaagcagttataataatacaaaaaaggaagattgtagagttatatattattaaaagttcaaaacattgagaaaaagtaaatgtaaagatcaaagcttcaagtgttgagaagcatggcacctaggtggtctagtagactttggttataaatttcaagtaaaagaaaaaatgatcagcacacgaatttttttgtgccaaccagtaatagcaactcaatgatgtgtacactaattgacaaacaaaaactgaaaacaaactttgctttatataccattactattagtattactacatctaattaataccattgatatttattacttaaatcttcaaatattattttctatatattcctctacatattaatttatatttatcaattttatagtttaataaaatcataaataatttgaagcaaagacttcgttaattatacttataaagtgatgtgttatgaaagcgattggatgattgaaccctgattggtaacagatgtaaaacaaatttagctcctacacctaatactatacttttgaaattaatacttaaatttcttacagaacttttaaaaagagacacaaaatataatagattaacacaatatagttttttaagatctaaggtcaagttggataatggatagagggagcccatcatttcttaatcttccggtacatatggtgtatctaagtggtcatcaggtagtttgttataaatgagaccatggacgtaattagtgcaaccttagtttctatattttgcatattgtatctattagtttggctccatataatgattccaaggacaatcaaatatacaaatagacacattacaataaaaattttattgatgcaagtagatactctgacaatccgcgtggttagttaggtatagggcttgatgacactctagaatttcaggacgtaaattcgaagagactctatttttgattctcttgacgaataattaagttgtgcatgggccattcgtgctcgggttaggagttattgtacatgataagcttgttcaacaagagttcgttcatcttcgagattaatcgaattagatccagattactgctacaaaataaaatagatattggaatacataaatttgttttaaatattagaaacataacaagaatataaagaaggtgagatatgtgagcgtgcaagtagagacgagaaagaaacataaaaagtgaaaacaaagtttttcccatactctttttgatctcaacacattctccaacgtgcctttcttctgatgtgagtcttgttgctctctttttatatctggttgatctatttttcatttcttttatacttgtgaattattatgaactaactaattgatcgattaagttagttgttttccacactattaattagttaattaattaaacattctttttagatgcgatcgaattggtgacagctttatcaacagtacaatactcattttcgtaacttattgcacttttgagtcacactagataaggaatcatttatgtataaaatgagttcttcgctcttctaaaagcgttcatttcaaccaaaaaaaaaaaaaaacagccaaccataacatcagaatatgaagcatgttctttccaaaaccaataacacaaattacattgcacgacacatattatgtaacaaccaataaaagttcgccgcctcttctatatgctaataatgacaatcaactagcaccttgccaagttattatctcttgcataatttttttgctctatctctacttactattgattgtaatagttatcccctcctttcattgaatgtctctgatggttatggaattgaaattatgtcggactttctctagtgttccgatatagtgacttcgaccttaaaacacgcttataagtcaatacatggcagatatctagaaatatcgtttagccggagaaacataattttttaattcaagggagaactctttaattaatcaaaatgaaaagagaaaattcaagtaaattcattaccctttgactcaaaacacatagttttaaagtcacttatcaatattaagccagaaaactaaagcatttaaaacatgatatacattgatttcacatttcagtatatcgtaacttagttcagcttcttccggagggacttgacgtcatcatgacaaagagtgatgaatggtttcatgtcatgtactcctttgtaaattattttgggtatttatttattttttctagctgaccttggtggtggttcctgcagcttcaacaattattccacttggaaaaagtaaaaaaaaaaagccttggagatcatcatttccatctctagtagctatacgtaactgcctccatttaaacaacacaaaatgagtttcgttgttggctttccaactgagtaacctcataaccaaactttgttacttggatcctcaatatatatctaattaaagagaagcgagatataaataaattgttacctttttaaaaagttggttacagaaaaacaattgttttacgtatcagttatgtaaatatttgctttccatggaatatttattaatagaataattttcaactttgctatgatttcttacaaaaatcttagttttaaagactatttaacgtacaatatcatctcttatccatcaaaatagaattaaacgcttatttcttaccgtcgcatgcgcaccatgtaacatgtgttaagccttttttttgggataaagaacatgttaagttagaacgatgagttctataactaagaagttagattgggctcaatatacttggagttggacttgatccactcattttgagttatcgtaattagacatacacatgtacccctacaaaaagcaatatgtattcacatacataattatattcatagataaaattaagagagataaagaaggaagtgttatatactgtgggggtgagagtagacaaagatagatggatgccatcattctcgtctgagacaactgttgcaaagccttgggatcgaaggcaggatagcttgggacactaatcatggctttcatgaattttaatcatctccctctaattgcagagagagagagagagagagggcctaaaagctacattagataatacaaaatcatatatatacaaatactgaaaaatagaaaagtagggcatatactctagaaagcgagtccatgagagagaatcatttcataatatacattacaaatatagatttatttaatttgttattgtattattgaatgatttttcccctcctttcttttgaaggttttattgcttttcacaatataggtacttgaaatagtagagagagagagagagagagagagagagagagagatgcgtcaagcttcaaaaaagctaaggtaatgttatgtgatgtgcttttgaaaggaatagagagctatgagagagcacatatatacaacaacaatttttattaattacacttcatcttaatctcttgggatttgtaagagaaactcttcaaaaatcatcattctttttcatctttctttacacacaaacacacatacacacacatatataatacagagatcaggtataataaatacttatatatatagcatcatcaactctcatacatatatggactctgctaatctccatcagcttcaagatcaattacagcttgtggggtcttcttcatcttcttcttccttagacaataactctgacccttcttgctatggagcttcatctgcccatcaatggagcccaggaggtatttctttgtaagtttcctcactcaatctctctcctctgatgtatcatatatttacatggccatgtatctattatatacatccatttaacacgtgtatgctactaggtttccgcagctatatgtgtgtgtttagaatattcttggtatcaagatgatatgaagaatttggaatctttcttcttctttttttccttcttttttggtttttgaaagataagttagtgaagaagacaacaagatagaatttaagtggctgataaattattaaatgtctattacattatccttcatatatatagacatagtactctgattttgcattgattcgaaataaagaaattttttgtgtggttttctggcaggaatagtgtgagcttgagtcataattataacaatgagatgttaaacacaagagctcacaacaacaacaacaacaacaacacaagtgaatgtatgagtctctccagcatccacaatcactccttgatccaacaacaagactttcctttacaatggcctcatgaccaatcttcatatcaacatcatgaaggacttctcaagatcaaagaagagctttcctcatcaactatctcagaccatcaagaaggcatatccaagttcacagacatgttaaatagtccagtgataacaaactatttgaagatcaatgaacataaggactacactgagaagcttcttctcaagagtatgtcttctggattcccgatcaatggagactatggtagcagccttccctcttcttcttcttcctcttcaccttcgtctcagtcgcatagaggcaacttcagtcagatttacccaagcgtaaacatatcgagtttgagcgaatctcggaagatgagcatggacgacatgagtaacatctcaagaccatttgatataaacatgcaggtttttgatggaagattgtttgaaggaaatgtattagttcctccttttaacgctcaagagattagtagtcttgggatgagcagaggaagccttccttcttttggcctcccttttcatcatcatctgcagcaaacacttccccacctttcttcttcccctactcatcaagtaagtttattttgaattattactttctatttcttttctcttttcgctttttaaaaaaaaacttttctatatatatatataaatgatggcttagaaggattggtctgacggtgaatctcgtgaagttagtgcatctgaaaacattacgtttagggctctatttctattatgtaacatagattcactatatatatatatatatatatatatataccctcatttcttaattctaaaatgtagtttaatattactgtttcataaaatactacggcctagttacctttcagctttaatcatataatttcatttcactcatgaaagagtgtctaaaagattagttttctgttttatttataaaaatgcttagttctctgtgtaccccttcaactttatttatgcatcaatggaatgcattgcaatattattcgcataactttttgtaaacgtaaaatcatattcataaggtggataaaatatcatgttcattaaaagtttgtggcataaatcagaaaaaaaaaaagaaaaaaaaaagaacttgagaaatagcaaaaaacaaaaaaaatatatactgaaatattataatcacgaagtatagatagattaatcagattagtgtaaagtgcgagacctttgtgcaatattgaagctttgcaacaaagttatgaatagagagataatatttaaatatatatgtaaaaacttttaacctcttttgattcatcttttactttgttgttgtgattcttggttggagggccaaagcttgagctaaaaaaccttttaacataattcataagcagcactctttaagctgaaacatcaacctttgttctatcttttcttttcctttctctttattccttactttgttttattgtctttttatgaatctcttttcttaacatttttttctctcattgtcgggggtattaattattacgttacgttctattattatcctttacatcgaatagcaataatgaacgttatttgatacttgcatacatatatatgtgtgtgcattacttatggggttttggtttgggttgaagatggaaatgttcagcaatgaacctcaaacaagtgaagggaagaggcataacttcttgatggcaacaaaagcaggagaaaatgcttccaagaaaccgcgcgtggaatcacgctcctcttgcccacccttcaaggttattacttttgttttaaaaaaaatacatgcaattaattataaatgttttttttggagaaattaaataaagcctgaataaattttagtagttaagaagaaaaaaaaaatgaaagaaatttttctaattggaggatattaatttaaaaaaatatatatagtcaaatgttaagataatccattgaatgatcattgtagtgtttatacgttgtgaaattgaaaaacaggtgaggaaagaaaagttaggagacagaatagcagctctgcagcagttggtttcaccctttgggaaggtaattaattagcaacaattagttttacccaatttattccttacttcaatatttcatttcctttttgccccattttagaatatgagcctaatcattaataaaatatatagctgtatgaaaattgattttgttacaataagatatttttgtttctaccatttaaagatagtaaggattttaagaaaaaaattcacaagtagcggattgttattttttgcttgttactcgattgttgatgattaattacatgatgattaaaatgttaaactgcagacagatacagcatctgtgttaatggaagcaattggatacatcaaattcctacagagccagatcgaggtacgtaacttcaatgcatgcatgtcactcattcatatccatacatcctatacttatagttatcagtacatgacatttgcatgagaaaaggaaacatattcaaggaatgaatttggagtggtagaataacggtatttacatggtaataccgtgctaagttccagacattcttcttgatcatcgttccgttttgtcaaatattctcaactttttatatcaattattactaaatatactatcttatatattaaggactttgacatgtactgaattatcaaactttaaaacactattgtgtatgggctaacttattacttatgaacttatatttaattagttccatagggtttagcttgcctttaaattaaagcaagagattagttagaattgatctttattttatcatatcctcttaggcgcactacgtagtaattaagcacctttctcctgtttcttttatggatacatgtttagataagctcatgctcaatattgctcatggtcgtcaatcttaaggatctaaattatatgtacaaattaaagagtaaagtttttataactcaaatgtcaactttattgtttgatgagcagactttaagcgtcccctacatgagagcatctaggaaccgacccggaaaagcctcccagctggtatacttttgagaacctatataattcattactagttttacataaaagtaaatcattccggatatatttagtccacaaatttacttatatagtaaaatgttgattaggtctcacaatcacaagaaggggatgaggaagagacgagagatcttagaagccgtgggctatgtctagtgccgttatcatgcatgacttatgttaccggagatggtggggatggaggaggcggtgttggtactggtttttggccaacgccacctggttttggtggcggaacttagccgtggacttaacaaaccgtaggactatgatgagtacatttatcggacttggaggtagagaataagaagaaatgttaaaggtggagtattagttctttaatctcttttggttttggtttattaattgaaattttcggttttgatagtggagcaaagttggtcgtcctgattagaaagaagtgttacaggatagaccagctttgatccatttaagattagtagtgagacttgacgatatgtttctacttacatgatgggctgtgggggctacataaaatatcaaatagctttggattattttgttaaatctcttttgtagataatgtgtcaatatctttaataaatgtattccttaaaaataaaaaacatatgaaaatatttcgccatgtagtaagaggactagaaaaagtgtatgatcaatctatgagcaagcgctaaaagatgatgtctattaagaaaaaaagaatcttttagtcactgactttagttaacttgttgagttcacctatttgcctcacaatcactattagatgaatttgatggttgtcgagcttaaatggcctagaatgtgcagagtcactcactctcccctaatcagtttcggaggtagcctcaaggactttcctcgttttgctttgatctacttcctcttcttgctacaaatcttaagttaagaattcttttttatggtccttctctcacgattgcacggggtccatcaattgtttgagtcggccctggctacacgacacccaattcttccttgcatctactttcggcggtgctccattgtagctggttcaatccgtactaggtataaaagaaatcttgggtagcctgtagaacgaccggccaatggtccatgaagttaccactacttgccttattacatcgtcctttgaaaacttatgaccttgtaaaaagtggacgtggatttatgaatttcctaaatggtccctttagagcaactccaatgagggttttttaactaagtttcttagttttagaaagagaaaatatattaataaaaaatatatagcttttttgaatagtaaagaaactctcttcaaagtttcttatataaggtattttagcactttagaaagaatttcttcaatatttaagaaaaccacacattttttattagtatattttctatctctaaattaagaaacttatgtttggaaactaccaatggggttgctcttagaccatccccattggacaaatttagagggtgttttcaaattttaacagaataaaaaaatagacaaatgagaattaatgcactgaacaggagaaacacggtgactttaatgtctgtgagaagacattttttgatattggaagacacgaatgtgtcaccatgctattggttggtgctactgttttctatttttttccttcatttggccaacaaatttttctctcttttcattttgccaataaatttttctctctttatttgaccaataaattatagttaagacattcaatataaattaatatcaccgatgtggatgctcttaggagttcctggatatctatcatacgtgtcacacactcttctatttgatggtatttctcatagataaagtcacgcaacatgttcctcctcgatgatcttcccttttatggccagtcaacacgttttccctatatccttcaacgtgaggatcagttggacatgcgttatctctagtttgagttggcaaatatttggactagcttgtcctttggtgtttccatttccccaccttctagactagcatggtccgctatgtccaaatttaagtgaaaacttcaatttaccttccacttgggtcgggcccgtcctattctctccccgtttagaaaagaatatcttacgttttgtttagggaaatgtttaagataagtgaacgtacacaaaagttttcatttatagtttcgtaggaatatgctaagactcacgtagatatgactgtcactaatcatcccaagaaatatatacatccaaattgaacgttaaattaaaggcgaacaaaagtgttcctcgttataataagtcacggcttaacccattccttcgacaacatctttttttttccggctataaacgtctccaccgttgacctaaactcatcactgctcagatcatccatatcgcacaaccgtctcatactccggcgtaaatctccccgcacgtcaatcctctccgatttcgaccttctgtaaacctgatgatcagtagcagtactctcagtagtagctggaggcagaaaagtcatttcttgcttcctccttatagcatgagctgtctcccccacagaactgaccgcccgaaccatctctcgcctcaacggtcgagcctctccgacggttagactaacggaggtaagttccgtacccggcattccttctgaagtcttttcttcgctatcagatgccaaagattgtgatactacggcggaggaggaggaaacgtattgaaaatacagatcgtgttcggttagcttctggtggttagataaagagaagatcagggcaacgagaacgttcacgacgccaaatatgtatattccggcgccggtcataccactggaaataatacgccggagatactcaccggcgaagaaagttgacgttaaccaatagagtagaagtaacacggcaactagagcttcaactgccggaagaaagttcaaaaaaattctcgtaccctcgaacctcctcatggcgtcaactttctcagccgcaacatccattttctaagctctcttgcaactccggcttagattttccgaggaaataaagtgttttaaaataaagtggatggtcacttagacttgtcgatctaatcacttggttgatgattttataaagagatataaggactctataattggttcaataattgaaacaaactggatatatcgtatttctttatagttcggtcgtggaattttcatgactaaaaagcattaggtgaataagtccaattcctgaaaaaaaagaatacaaaataaactcattagatgaacaattgatcatagaattattggggacaatttgaataaagaagtattataataatgtagaagaatggttggaaagagttggcgaggagagagtgagggcaggtgaagctgcactgcacagcaacgaccgggccaatataatgcacggttgggcgacgtacaccgccggacgaaactgacacgtgtaccctttgttctttcttcttttttgtacccctcaattactacattcattgtaatgttttcgaaataatagagtatatatgtattttgtctctaaatagtagagtatgagtgactagattcactatatgataactggagagtgcaaaactaatcatgacaaaaagtaagggtatgaatgattttggttattcgtttcgattctaaggtgatttgtgagttagatttggtactaattacagtttagctcttttcatcatattcttacatgttatatatttcaaaggaattatctagacgcaaacaagctttgacaagaaaaatgaaaacaagcaaaatcgagaatacatcttaagtaaggcaggggatgcggcccgattcaaaattctatgttctaaaaaattatttattatatatggagaaattaattcagacaatttgtgggttctttggatgacgatctccatctcttcttgacactgggagaagaattctaattcttactcgttaatttatatgcatttgatgatattatttttctcacatttgtctaattagtgttagtattaatttaatttggtatgctagacgggctcaattgggtgagtttttttaattagttccaatgaaagttgatgtgaaaaaagtattgtgagccaattagattggtaattagtaaaatttagaaaagtcaaatgtatggaaacactatattaaaacatctattacttaatattgttaatgctatagcattttattaatttataagaaattgttagaaactcctttttaattctatttgtttatgcagttcattctttttatacattcttttattttaatgactgttttactcatatttgaaaatattttagattaacaaaatgaaataataattttttccgtcaaaaatatttcgaaaataagtttctcgtaaaacaaatccgacaaaaaaaaaatctaccaaaaaattttcccaaaaaactttttcttgtcaaatttttttttccaaaaaattcatttcccccaaataaaatatttttgccaaaaaatagatttacttgggtttacttctttttttctgttttctagctaaaaccaattgacaaaccgataccataaatctaagataatagataaatattgttatgaccgaccataattgtaaatttgtttggtgaaaatgggtttctcggagctgaatcttctctaactgtggagagatgtggagaaaatatagacattgcagagctcacagacttcctttgtgctgcttcgatggttagagaatttagtgagtttcacactgaccctgaagatcgaaagcttagatatgacgttaagaaaaaaagttagaattgaaatatgagccaatgtcagttgttgatgacgagccggtttgcctaccaatgataaaatttggggtttcaaaagagacatgactcatcacacatagatcacttccggagttagtcacaaagcaactttttttctactatgagaatgtctttctcacacctaaaagcgtttgaaaaactatctcaggatacttgtttgatatcccacctaagttttttgactcgaaatatttatgtatttcagcacaaatcagcacaaagagaggtaacatccacaatcttccaatccataatagaatccatcaactgccaccgaaatacacaattcgtgatgcatttccatttactaagagatggtggccaacagactaggataaaaaagcccaagctaaactgcattttgatttgtacaaggagtgcccaattaactaacatgatccgtttagcccttgaaccttacaatggagaactaaaaccgcataatctttttctgacgaaataatttaatgaaactatagatgagcaatactattgtatctaatgaaaattgatgttaaaaaatattgtgaaccagttagattggtgattagtaaaaatttagagaactcaagatgttcaataatggaaatccgaaaaactattattactagagttttttcttttttctttctgttttctagccaaaaacaattgacttaaccaatgccacaaatctaaagacaatagacaaatattcaacttatgctttccaagaaaatatcatcaggaccatattgagtgatactgtagtttgttttgctctttctgccattttggatctgatttgtaaaaatgtaaaatcatcttagaattctgcataatttttactaatcataaaatgtaacggattagtaattccaatcatttagtaattagtaaggaccaaaatcacatgaaagatatcttataagaaccaaatttggttattccaataaaacccttgaatgatattttgccgttttcaaaacccttaaaagaagaaaaacaatcagagggttggcggtgttcccgtcagaagatcacgaggatcatcacattaaactctgttttgttgatctctctttctgttccgtttctctttccactgccaaaagttaaagctctctctctcactcaatcacacactcatttctcactatttcacaacttccttgtggacaaaattagtcgacttctctgttctctccaacactgtttcgttttcactacccaaaattcgaatctgggttattgaaaaagttccaatttttttatctgggtttttcgaaagctgatatctttttagaatctgatctatctcttctacttcatttcccttgcatttttttaataagttgtagaatctgtcttgttctggaaaaatatggagtcttgctttcctgccatgaagctgaatcagtgtacctttggtctcaacaacgaaattgtctctgagagagttagtgcgttctggggaacccaagttgtcaagcccaatcatttgaggacaacgaaacttaggagtgcacctcagaagaagattcagacaaacctcattcgctccgttcttactccatttgttgatcaagagtctcatgtaagaatattttacacttgcaattcccaaaccaaaaaaaaaaagattctctgtttccttggaaatgaattgaagtccttggtttattagttctacttgtgcatttgagtctgcctagcatcaattctgtgtgtccatgtttggtgggaatttgatttggactgtgttgaaaatgacttcttatggtggtaagatgttgcaactgctcaaagtttagctttaggtctactataactagcctaggacttaatttagcagatggtagcgattgtgagttggttgagcagtttagtgagggctggctaataaggcttttaaggtttggttgggcaggagagtctgtcatcaatcaaaattttctggtttagtgaattgaagcttcttttcttaaattaagtcccttggtagctttatttcttccaagtcctattctgatataaagaatcatttttcaggaacctctgttgagaactcaaaatgcagaccctaagaatgtagcgtctatcatactaggtggtggtgctgggactcgcttgttccctcttacaagcaagagagctaaacctgcggtgaggattgttttgtttgtccattgtttcttatgattcattgtcaatgaggttttaaacttgttaataatcgtaggtgccaattggagggtgttacaggctgatagatataccgatgagcaattgcatcaacagtggtattagaaagatcttcatcttaactcagttcaactcattttctctcaatcgccacttgtctcgtacttacaactttggcaatggagtcaattttggtgatgggtttgttgaggtgataccattacctgccatagattagatttatcttcctgtgtttttatttgctactaaagtttctcctctggagatgattaggtccttgctgcaacccaaacttccggagatgcaggaaagaaatggtttcagggaactgctgatgctgttaggcagtttatatgggtctttgaggtcttcttttgtctttcatctcttagtaagtgttcttgtacattgttggaaacatgatatggcggtgtttctgtaggatgccaagacaaagaatgtggaacatgtcttgatcttgtctggggatcatctctatcggatggattacatgaactttgtgcaggttagttttatttttcttatttgtccacactgagcttcatgtaaactttgtttcatttctcgtctttgcagaagcacattgagtccaatgctgatatcacagtttcttgtcttcccatggatgagaggtgtgtctgaggatcattaacattgtttcttgccttgtttattcgatgaacttatttgagtttttccttattcacagccgtgcttcggactttgggctgcttaaaattgaccagtctggtaaaatcattcaattctcggaaaaaccaaagggagatgacttaaaggcaatggtaatgatttattttgtttgtcaaaacgttcagtttcttgcttgcaatattacgagaacttaaatgttttttgcgttttcagcaagttgacacttccattcttggtttaccaccgaaagaagctgcggagtccccatacattgcatcgatgggtgtttacgtatttagaaaagaggttttgctaaagcttctaaggtcaagttatcctacatccaatgactttggttctgaaattatcccgttggccgtaggggagcataatgttcaggtctggtttttcttcattttttgtttagcatatcacatcatcaatcaatatttgtgtttcctctgacctttatttattaacttgctgctacataggcatttttgttcaatgactattgggaggatattggaaccataggatcattctttgatgccaatttagccctcacggaacaggttttcaccgactctttattgtttcatctccagtgcagggtggtgactcagtgaaacctaatcatgctatttgtttctgttttggcagcctcctaaattccaattctacgatcaaaaaacacccttcttcacttctccaagattcttgccacctaccaaagttgataaatgcagggtacaatatcttgaattcgattatcccgttgtttcagctaatgattcatcgatcctcatgttgtaaagtgtattatggaattgcagatacttgattccatagtttcacatggatgcttcttgagagaatgcagtgtgcagcactcaatcgttggcatacgatcacgtctcgagtctggagtagagcttcaggatacaatgatgatgggagctgatttctaccaaacggaagctgagatcgcgtctcttttggcggaagggaaagttccggtaggggttggccagaacacaaaaatcaagaactgtatcattgacaagaacgccaagatcgggaagaacgtggtcatagcgaatgcagatgtatgttttcaaagatctttttggttattttgaagaaatggttgtctgattttttgttgtgttgggttgtggcagggcgtggaagaaggcgatagaccagaggaagggtttcacataagatcaggcatcaccgttgtgctgaagaacgccaccattagagatggtctgcatatttaagcttttaaacctctctttaggagcagtgtatgtggcttcttgtgattttgtaacgagactagttacgttcgattaataatttaataaaacaagaggcacaaacgaatgacagttttagcaactttaaacgtgatcgttaatcttggtaaatcttaatgattacgtaaaacacagagagaaaccaatcacaaacagacgagaaaaaagcatgtgtaaaattcttcactctcacgatcacaagtcacaacacaagacttgagactcccatccatatatacactttacaaattatagatatttcattcgagttttatgggactataaaaagagtcataaaactcttgtctcttattgcagtgagaatgagagaataggttctgaagactaaatggtctgatctttagagaaggtaaggaccactagaagctacctcaccaactcaattagtgtcaaattaatccaaggccaacagtcctgaaaaagtctcctaactttttatgtctgcaactgtatatgggacatccctagttttcttaattttgaatcttgattcttgagttaaaacaaaaacccaaatatacaagtatgcatgaaacgtaaactttcagagaaggtttctcacattaagtatcctttgagttaagtatatagtccataagactgtttttggttttaattttagtatttgtgtgtttgggcctcccaaagattgttggcagaaaagttgtcattatcactggaccaaactcgcatgctcaatatttatcatcaccagttataattacatacaccgactgcttttttaattttattcattttatattctctcggcctcatggcaccgttacttcccgcctcacgttgacgatatatgagagaatattttatcatcatatcatagtgaagataatagcacaaaatcacaacacaagtttttggtaagtaatgatcgtccgctgtaatgatcgtccgctcaatagggttattggtaagtaagaatgaacctgagctataataacttgatatcaaaatcgtgtgtgattgtagaaaaaaaaaatcttataaatgattatttgtttactttttgtcaaacacttatatataaggtatttaaaactagatataaggtattttagactggtaaaacaaaactaagaaaacaattatatgaactaaatatggacgacaaaaaaaaaaaaaaaaacataagaaaagttatttttttttcttttgtcgtccataattatttttctgtttgaacacacaaaggcgcacttgagagtttagaagtaccatggaaaatggttatttgaggttaaagatgaaaatgagtaagaagcaaccatataaatatatatccattctaatttggtcccatgaatcaaattgaaaactccagaaaaggaagactatttttaataattttgtgttatgttgaccttttgtgacttatgctcatgctcatgcacaccctactcgtctatattgtatattgcttttagtaatataacacctttttttttttgttaaaatagtaatataacactcaattgctttgttttgactttaattaatttccatctctaagagcatgcctttcgtgttccttaaggctaattgctcactaatttatgctgcttttgaaataaagtattatatatatatatatatataatgattaacatattatcaacttttatgaaaaaatcaaaacatattaagcaactccttttaactcgttgttgtggtcacaaactgtaacaagttttcttcttatccaatgtggaacgagttagcccaaaaaaaagacttgagagaaagaagacaaatatgaatgttttatgtcttataaatggaatgtaaaaccatttcaatagaaaaaaataacaaaaaaattcttataccaattttcataattaaatcttatcccgaatcccatttgcctgtaataatgagacttttaaaagtttttattcgagaagcagtgattcataatttcaacgatgtcgagaaaaaaaatgtgtataaccctaaataatagccaaaataagaaaagaataattaaattccaaaagaaatggttaaaaaagcgaattaacgaattaaattcgacatttatattttgcaaccttcccttcgacgcaaacatttctctcttttttctctaatcaccaaacctgcgtcttctctctcacactactaacaacacttccttcttcttcttccgactatggataagaagcacggcttgttctccaagtctaattcccggcgaccacgatccaagagtccagtcagaagcgtctctccgatcatcatccgtcgccggaaaggccgttacgtcacacaaccggaccggcacatgtctgagatgcttgctccggttatagaaggtcctgatccagacgctgaagactccggaagcagtggtgattactctaggttcgagagacgttggtacaattggatgaaatgtcagcttccggtggctccgccgtcagtatcgtcctcttcggatttcaaacgaacggatctgaggcttctcctcggtgttcttggcgcacctttaggtcctgtgcacgttagcgctctggatctccttccacacctcagtatcaagaatacacctatggtgagctcttaattcactgttgtctcctcaaaattaggacagtgttggggatttggagttaatcatgttgaattaagctcttctgtgccataatctagcttgaatttagctgaatcttcttttagttgcctactaattacggagaaagactgcgcaattaattgagatttatcaagttttatctctgctttaatgtgttgagggtaaagtctaatgactcttactaatacttgaattttcaggagacttcctctgctcagtacatacttcagcagtatacggctgcatcaggaggtcaaaagcttcatagttctgtgcaaaatggatatgttatgggaagaatcaggacgatggcttcagagtttgagacaggctcaaaaggttcaaagagcaagaataattcgtcaaaagctgttgagtctggaggatttgtgttgtggcatatgaatcctgatatgtggtacatggagcttgttcttggtgggagcaaggttcttgcaggttgtgacgggaagcttgtgtggagacacacaccatggcttggacctcatgctgcaaaaggaccggttagaccattacgacgtgctctgcaggttaggcctcttgtcccaaggaagccttctcatacacttttctttgcttgcataactgaattgttactgttgtcaactttcagggacttgacccgaggaccacagcgtatatgtttgcaaatgcaaggtgcataggagaaaaaaagatcgatggagaagactgtttcattctcaagctatgtgcagacccggcaacactcaaagctagaagcgaaggggcatcagagaccataagacatacgttgttcggttacttcagccaaaaaaccggtctgcttgttcacttagaagactcccagctaacccgaatccaaaacaatggaggcgaagcggtttactgggagacgaccatcaactcatacctagaagactacaaacctgtcgaaggtatcatgatagctcactctggtagatccgtggctacgcttttaaggtttggagatatgtcatcaggacataacactaagaccacaatgcaagaagcatgggtcatcgatgaaatctcgttcaatgtccctggcttgtctatagattgcttcattccaccttcagaactcagatttgattcccacgttgaagacttatctcaaggccccaaaattaggacattgcacggccataaaaatggttgatgtgaagaagcaggagatcaatgtgtataactcattcaaaaacaaaccctagaccggttattttacttttgctattgtcgaagctaaaattcttgtaggaagtttcgttgaagttgtaaatagacagcaggagaagttcgttctttttgccgcataatgttaggaatgtgtagtcttagtaaggtcagtccaatttttagtttataatattgtttcatatactatgatagaagctcccatctatttcacctaatagcatatagtataaagaaatattacttggtcatccataccaattggaactgatgaatacgatcttccttgtattgtatatcaataaattcatagtgtgagtgtagtttcttttgtagcacaaactagtaaatgttatttctcctcctactgtctatttcaaaccgttgctcattagtttactccaaaaaatggccataagtacttatctgtttgtctgtctcaaccatccaaatcctatttgtgagttggatttcaatgggacatgagcatttttgcatatggattgatccatttgctcactagatcgttttattttactgttgactgttgttgaccttgagaaaaagaattaggccggttcactgttgaccaaattcttttacataaaatcattttgaaaataatcccggttcattagttaaaccggttcgattaatttggtacgtctctaaaacaaatcgtcttcacctttcttctcttgctttcagggcttgcgattttaagtgggggaggtagagagagcaatctaccagattcaccgattaccaacaacaaacaaggtatcatcgggtaattcagattcgcaatttctgctcatttgaatttatagattcctaaattggtttctttttttttcttgtgaagatcactatggtgctctctgacttcactggagtcggtgttggatttggtaatgcccccattcgcaattgttttctccttttaattttgattggaatcgtaatttagttattggaattcatagggttcggtgttggttgtggatttggcgttggatggggttttggaggttcgttctcaacttctctctttttctgcttttacttgaacaaaatctggactgaattacaagataattctattggaacaattctcttgctagttgctatgggatgtgcaatgcactctgctgtgcttgtttagttttgtgatcatattgcttaatgtctcttatagagattatcaactcctacatatcatctttactcaaatgcttcttctttcctagctaatggttgcttaaacgcatagctagtatcagttgcgcttacattttgatggattcatactattttgcaaacctactgaattggagatttccgttgctttcatgcaggaatgcctatgaacatcttaggtgttggtgctggtaagcatttcaaacttctacttcaaatatcccacactcgcatagatacacaccgagcaggtttttcctaaattctaattacgtaacttatgcgtctggtatttgacaaaggtggcggttgcggggtgggtttgggcctcgggtggggtttcgggactgcgtttgggagtcactatcgttcatctagacttacatttcaaggcatcgagttagagactgccgataaacgggaggaggtggtggctaacatgtccaaaaactccacttaagcagtcgtgtgcttcaatactctgctcggattgattgtaaaagaattctgacaccttttcttatttctcaatgaaacggttacttcaaataatccaatacgaaatgcatttctgtattctgaattgtcatttttagaaggttccacttcaatcttgggtttagtcccaaataattctacaatggttaataggattggtgcctaagaaaacaatgattgctcaatgaaacccgtttcaaataatcgaaccaaaaaaatgcatttctatattacaaacaaccaaaaacagttggaatttactgtacagtaaaaatgtggattgccaaattcgtctctttcgctgttacacagaagatgaatgaactcgaaccttgctattccaaacctctcttctacattgaatgcactgcaactaccactgcaatcagaaaaaaaaacaatttatctcaaaactcaaaagtgatgcagtaagctttgcgttctaaacataaatgattcagagttcagtaaatcttaccaataagaaaaactaaaagaataatccaaattgcagcgtgaaccgatttactatatcgcattcgatactgagaccgttggagttgcctctgtagagctccataccaaccatgaagctgcttttcataacagtcctcctcacactccatacaactcttgcccctctctgaacatccattcatatcttgctgagaaacaaaaaaataaaaagcatttcttagcaaagattttcaaagcaggaggcaaaaatcttgcggttggagatcgatcgatcaaacttacttggttagcttggataggtaataaagcagcatcagagtctccttgacgatctaaacccttccactttctattgcaatgcttggacacaggatccatataattcaagaatccagagaagctaggtactttcctcggaggtcgaaccactggctcatcacaagatttcttcactaaaccatcatcagaaaccgcaatgttccaagcactgaattcagcagcacttgcagtccttctatgtccattaggatttgctttagcagattcagatggaccagtcaagaagagagcaagctcattacgatcatcttcatccaaacgaacccatctcggtgttcctttcccatcggattgcgcagcttccttgagagatttctcgattttcgacacttgagcttccattacgaaagtaaactcacgatgcctatctctagtttcatcactcaaacgattgtcatagctagatttgacagctttttggaattcatctaactacaccaaaaatattacaggtttcataaatcaacattacagattaagaatctgagttctgaggaaagaaagaaacctgccatttggtggttccaagagctgcgtgaagatctctatgaagctgctcagagtcccatacttttgaagagtctcgtttcccattgagccatgtcctgtacgctgactccatcctacacatgaatcgaagataacaacacacattgtgagatttcagatctaagacttgatttgattaatcagaaatcgtaatcccaaatccgaagcaacacgaatcgaatcgtcgacattgcatcaccaacaatgagagtttatggtatcacagattcaaaacgaaaattgggagatgaggatccgaaaaacgcaaacctgtcggcagattcctgaacttcttcagcagcgggaaagaaaggatctttctcccaccgatccaaactcgtcgtcatcacttgagcagatgaaaaaaaacaaactaatttcctaatccttggaagatgagaagaaacccagaaatggaggaaaatggagaagatggatggatcgagaaagatttcagagaagagagggaacgttcgttcatcgattagccaaattacggcctttcgttacacacacgtgcgaaaattagtactattaatgtttggtttattcaatgtggttctcaataaaccggtccataatctctaattctcttcattttggttaacgctttatttatgacagcataattaccaaaagaactagtaatcgaaagtatgattaaaggaaaaaaatatgccatgatcctacttttgattacttatgacttatctatcaattttattcatgttataatcattttattacagtttcataattcattgtttcctctggaacatatgtgtgataaccaatatgttcaaatcagatcaatggattggtacacgagtcactccttgttttcttttatttaagaaaaaacttgagactgcaaaatgaataataatgaaaaaatgcagcaaaaagtgtgggaaaaatcatgcgaatgagaaccatcacctgttacacctttctggtgagtcaccatatatgcacctctctctctctctactggcacgcccatgccaaccatcaccgttgtattatgtcccaagatatataaatagtggtgtgtgtttgtggctgtgtattattcaaacacacaagtccttttacttcctttttcagattctaagcaaacaaattgtgtcactaagcagccatcatggctagagtgatcttgtggtttcttgtttcctcgtatctttgtctcatcggtcatatgattgccgaggctgcaagagaaggtgcctccatgaggaaggaagcacactccagtgggattggaagagaaagtaagctcatgaggaatgaaaaacactccactgagattggaagagaaagtgcgtccatgaggaataaagcacgctcgagtgagattggaagagagagtaagctcatgaggaatgaagcacactccagtgagattggaaagagtatccgacacgtaaccggatttaagggtgaactcacagctggtggctacggcggtggaggcccgggatatggtggtggtggatacggtccaggtggcggcggtggtggtgttgtaatcggtggtggatttggtggaggtgccgggtatggttcaggtggtggtttgggttgggatggaggcaacggaggtggtggtccaggatacgggtcaggtggaggaggtattggtggtggaggaggtattggtggtggagtcatcattggcggtggtggtggaggatgcggaggttcatgcagcggaggcggtggtggtggaggaggatatggacacggcggagtcagcacgaagggatcaggcaaaaactagaaaaaacatgcagcttgctttaggtagtgaaaggaagaagaaataaggatgtactttagcatcttgatcatgtttaggagtttgtaatggcattagttttaatggaataagaacctttctacaaaaaaaaataaagaattggtcctatgtcttttcttggtttcaaacatccgagcagattctattgtatacgcgatacaatagcgtcgatcttgacatctgaggctccttttccaccacagcgatcacatccttcacagagattgaccggactacttttggtaaaccttggttcttcccaaattgtgtaccacctacataaagttcgaatatgcaattaggagcacgaaacacaagaataaccagcaacagaactgagagatttactctttcagatcatagaaacgggattaccaatcttaccagaaagtttcttggagtttcttcctggccctggagaagatctctgacgtgcttcagccataagtttccattttgaaaacctatcatctcctccaacggctgcacgaacagcaacatttgcagccttggctctctctttatcttcgtccttcttatttgcctgacttgtgatcaataaacctctttcagtgtacgtatgtgtatatctccaaaggtttaggtagttggctcaagttctaaataccttcacttcgtttgaacgttggtcttctttttcagtatcattttctttgttctacatcaatgaatatacaaaaaaaaaaaactagacattactactgataactaagacaaatagatattaagctcaggacaaaccattaccttttcttctccagaatgtttcttttcccattcctctttcaccttctgattcatttcattaatttctttccggatatcagatgtgataaaagtccgatttctacacttctctgcatcagtccgctgcaaaagctcttgtaacttcagaaagatttaggtacaacaagatctaaggaggcatgagaagagaaagtagactgacctgctttgatattcgtattatattaaacagtagtcctcgcatcctctcctccacacactgaatgcgcaaagccatgagaaaaacgaaaacaaaaacaggaaattgaaggctaataattccaagaaaaggtgttaacatctcaccagagacaagcaccgctctacatcatggtctatatgctttaaaccactttttcccactgtcatatatgaaagcatacataaacttcttctccaagtgattccaagtaaggaccaaagaagcagctaagatacgagttgaaacacaaactaatttctgtcagctttctctgcagtggaattttctgcaaaagcgttctttcttcctctccatgcacaagtcttcgatatgctttagaaacacgatcgttctttttaggaccagaatctaataattgtttttcctcttcctagaacagatgcagaaagtaatttggtttattgtttctctatatccaggttcaaaatgagaagtgtagcaactcgtaaacataccctgagattgatgccactgactgcagtgacatcattaaacttttcaatactttcatctgaagaagtcccacatattttttgcttctttctgtatattaaaaaatacataagacttcaatttagcaattctaaattgttagtaaggtaaaaaggatattatcagaaaagcaaagaaaaaaggaagagtaatttatggacgctgtaagtagttcatctttcacaaaccagccagctcattaccttgatggtggcagcgaagaacctagtgcctcaagaggtttcttctgaccaacagaaggcattttgggtgtcaccgtaacattagcaatcttgggaatggtctcagatggggcaggcatattaacctgaagtgtacacaaataattttcacgtaagatagatagtccatttactcttcacaaccaaagttcgaagccagtacaaggagaaatagaagccagggtggtccaaaatataagcaaaacgaaaccaaatgcaacatcggttgaagagaaatggtccccctatgagcttaaagagaagatcaaccaaattgaaatctgtcttttgaaagtataatttataagttaccatcgtgctagagtccagctgtgttgtcattgaaggaaaaacagagctggcagaagtggttgatgtgaataaacccattttagaagactgcttctccaagtcatcatttgaactaattggaatagcattcttctgtttcagtggaacattagtcacgccttgctgcaccaaataacgaggtttatgtgcctgttcaaaactttgatcaatcaatttatgctccacatggatcactgatgaagaaggtcccactgtatggtccttggtgactgatccttgccaaggagcagaatatagaggaaaggatgagttctttgggaagtcggatataggaccatcctgaaccctacttggaccatttacaaaagttggcctctcaaacttgggtactgtcgtcatgtttattgtagacttggttggtcctccaacactggctattcccacattctgattgttttccctatgctggaaatcagggagctttgctctcgatgatgaaccaggagaagtgacatttgtccctgggtatggattaagacttccagatttggtatccatatgaaaagaacttgatggaagctgcatgtgttgctcgggatgcttatttaatccctgcacagtagttgaactgtttaaggtgcctgaagttgtagaagacagttggttaacatgaacttcacgaggatcagattcttgagcagtgaattctgcagttaatgattgtatctgggattagttttgtatgctacaaggaaatcataagataagatctaccagaaagttaagatgatctatgataattgcaaaagtaaatggcatcaactaaataagttataccagcagatttagacactttgtcatggtttgagcgtccaggtactttgatccccatatttccctggttacacatacagttcattctgaaaccagtaagccacaattccaagacaagaagtattcagcttatactattaaagtgagaattctttatgttatttcctttttaataaggttcagaagtgagatttctttctcagcacatgttcatatacagagaaggaagcatataaaacaagaaactctcttggaggctgctaaatgaaaatcattaaagtacttataaatgctaagaaaatggaaagggtaataccggttttaactgaggcagttggctaattaccgatctgattatctgatcacctacaagatctctcagttgtcgcatgaactcttccattgtaagttcttttctctgcaatcaagtatgaaaagaaacgtaatgtattaagaaacttcgatcagagtgccaattcattcatggatgtaaactgtaaagccacaccttgagtttataatgcaggttaagacaatgcgtctttttgccgggttggtggtctaccacggtacgaagcaaatcagtaactcgtgctaatctaagattatgattcacagggtcaacagtcttttccacccaaggagtctctttgctactcatcttctgcagtttcatataccgaggttgcggtttttctgattcattaccagtagtattgtttatagacttcaagttacttccttggggcacatgagttcaagcaccaaaatcaattatgagtatgctctaatatttttctatgactaaccgtcactaaagcatcatcaagaactaacaatctaattgcatccatcaacattcaacagttaacatcaagtgaaacatgaagatacatgacaaaccacaaaaatacgactcgtgaacctaaatcactaaagaaatctaaaggcatttccctgttttgatacattccacagtttcgcatatgaattttagggtccaaaacgaaccttcaatatctcgaatcagagagtcctgaaacatttgcaagtcatcttccgaatgcttagagtcaacctaacgacacgattagcgggaatcgacatttaggagcttcgtccacagaacaagatagcgcgtggattttcgcagacagtacggaaatgaaaatgagagtgggaaattcgaaacctaacctcttcgtcttcttcgaggagcttgacaatggagagatccatggaggaatctcgcggtaccaaacgtcaatagctcaaaacgaagagggaattttcaaggaaacgatttgttgtatccaataagattccaaattccgcaagtttttatataaagggagattctgcgagaacaccgtgtcgttttttctttttgataaaacactgcgcgccgttctgttgatcttcttttcggtagttgtttcttttggataaaacactgcgcgccgttctgttcttcttttcggtaactgggcttgttcttgtatatcaaaatttatttttcttgaatataatgttggagttcttaaacagttattcatattagcatcagacttttgcaaaaaaaaattaattaacttttagatgaattttgatacacgtttatgaccattgagttttggacttcccgtagataattcaccaaattaaagaagggattatctacgttaattaaacagtgctactaaagaaaacaaacgacccgtcaagaaaggcttttttcaattgaaagttacggtattcttttggtaaaagaaaaatgaaagttgagttttctttggcagtcttccgtaagatatcacaactctttttatttgcttagagctttccaaaatataagaaagaacaatatgtggatggtagtagaaactagaacgttcttgattatgcttaattgtgttataaattttttgaaaaaaacagaaccaaaaacagagttgtagtggtgtcactttatgcttattcagataaaaaaaagactcaacgcgtttgtaaaatatgtggtaaagaatcggtttaataatttttaaaatgaaagaacaagaagaattggaatcagtcaaagtccaatttggtatgtacagtcaacaaattcctacacaactctcaacagtatacaaacgaaatcttatcgtctaagtaaatttccttaaagttgaagtttgaccggaaagtcaaaccgaggcttcttcgccggcatagggctcatgacttcgtcgtctccgttgaccatcgagaattcagggatcggagggatgttgaggtcaaacccacggtggctactgctaacgtggctagtggaccccgcaccttcggagttggacacgctactagtgttgatgttgttgtttccttcgtagtggcaccgcttgtgtccgccgagagcttgaccggaaggaaaagacttgttacagatggtgcaaacgtgtgatttcccacttccagtagtcacggcggatgtggttgtcgccgacgaggttgaatgatcatctcctccgccggagagagtctgtgataagttcttacggtggcttgccttgtgaccaccgagagcttggtaagaagagaacgtcttgtcgcagacgctacacttgtagctcaacttctccaccgccggaggaggaggaggctgacggttgtcgcgagcgagaagcatgaggcaaaaagctagatactcttcctcagtgaggttttggtggtggaaatcggatcttgatctcttagatcgcttaccctttgtccagtgctcgactccatggaagactgaagaatcttcgaacaaaggaggaatcggagaagctaatcttggtgatgtaagagcctcgagcgccattaagttaaagattctgaggatttcttgtctctcgagttttagtttgaaggttgcttgtgaattgcagtgaagaaattgtttaattgctgaagaagaagtaatgaaagtgtgtgtaaatatatagtagtaggtggagtgtggagaaggaagttgcgtgacaagtggtaggaaagtgtgaagagtgaaggtggcgattagataattactatatttttctaaaactctttttaatatgcggaccaaagttgtgatgaaagtatctagatgtttttttgggggtaaagagaggaaaataattagggcacgtttggtttgacctagtacacgtgtgtgtgtgtgcaagtggtgttggtaaaatgaagaagaggtcggctataagacttttccttcattacttagtttactagtactgatgccgccttacaaaatattctagagtttctgtggtttctggtcgttgtcatggatggtactcgtatggtacacgtttcggtttactttaagatagatagatagttataacttataacaactaaccagttgacaaaaaaagaaagaaagtctataacaactaaccaatattgatttggaaagcatcttcggaaatatctatctacaagatcaattcatttcgaaaacgtttttcttcttcttacttttacattagaaaattgagccatcacttaaattaggtgatatatgtaaaataaaacgttggctagttttagacttgctttgtctaaagaaacaatttaatggttcgaccttgctcgatggtaaaataaattctaaaacagcctaaaagaaaaatattcgtctgatatttacctgtttttttggttgggtatgcaaccatcaaccatgattaaagagaggaataagaatctaaatgcggaaatgtatgtattaccactcaaagcttttgaacagttattcatattgaaaaggtggaggtaatttaggactaataagaggtctgagacggtgcatgactattataaaagaagactatttcaagtttccacagtcaaataaacaaagctaaatgcaaggagccaacatttttggtacaactatactagtgatagattaatattatatttatgacagtaagatgtgggagacgaactacatttgactaaaacaaagagcaacgacatttgacttcttcacgcggcgctcttcaaagttcaaaccggacggtttactctttatttgacgcaaacagttaaccggaaacagctagtgttacaccaaatttggtgtgatattgcatcacactcatgtcactttttagtgttctttggaaaagttttttagtgcaaaactttactaaaatgatgttttaattagtgtcccactagaaatgacttagaataatctgaagatgatggacctaaaattcagattactgaattctctggaaaatcacaaaatttcatcttgaacaaacggggatatttattatttttaaatattttctgtagtaattttttgtgtaagttcttctaaattttattatagttattgataatctaaatgtagtatatttgaaaagtcataaattaaaggagtttttggtaacacgttatccaaataaagacaataatacggattttatataacgcgtcaagaaatatgtatacatatattaattaagcaattggatgtatctgctacaaattctcatgggaggctgatgtaatcatgatatctcgaatttgaattttactttctgcattataaaacatgtgtgtggattactaaagtgtcgtcgtggtattcatcatgttatgtatggattggatccaggttcaaaacagtgcacgtaagacacattttgatgtgtatataaaggaaaacatgaaacttgtgaggtggatatatgtgatgcagagaaccaaaaatgtatctgtcggcgtgtcatcatgcatgggtcacgcattgccttctggataaagaacactctcactcacaccaaacttgtaatacatgataaaagtacgtttaaagacaaactcaaaagtgttatctagttatcttttgggttagttcgactttgagaagttgatattagaatacttatcagcttaattcaaactaatgttctcaaaccctttagtatcgttttatgatatttaaatatatatattttggcagattactcggttttaaaagtatgacaagaaaaaatgtaatttgaaagtgaactttgaattatatctgtatttctatattttagactggataaatttaaactgaaggtgagtaggtatttaatatacgtaaaatatattagttgagccaatgggtaaaaaagtactcatattatcatcatatatataggattagaatattagtcaatcagaaatgggaagaaaatgagtattttgattggttaatttcaagtagggccttgggttagaggagtcattattctttgggtaatacgcgttgggcttaaatgtttgggtccactcttcacattattaacttcttctcttatgatcgtattcgttttcttgtttctcatgaaaaagaactctctcctctgtgtgtgcatgcatgtgtgtcaattgtcaagtaacttatgcatttttaaattgttaaatttgtggttaaatcataatacattacgtctttctcacatgttaaattttggggataactattaatcaaatgcataattttggctaataatttcgcttgatctacgatcaactttttaaaatacttaataatgtgtaaatcatatctttatgataaaatttaacttgggaccagtaactcgacatctaatttcattgagaactaactaactaacttagttctcaatggtggataaaacctctaaagttttacaagtttttgagttattccatttcattttgacatttagaagaatcaaagacttactatatgaagactaaaaggatttaaaaaccactttttcaactaagttattttcgcagaataaaaaatacattcatgaatcatgatctttgattacaagggatatataaacctaaaacctaaacgcggtgtatatagttagcggttgattaattgtttaacataaaaaggaaaagctgggaaacaaatcttgacgatttatcaatatttttatagaatcatagatataatcgtataatccaattagttcatatacatttaactcttcaagaacgatttatcaatatttttatatttctattcaaaacaaaactaattgacattaacttaaatatatttaaaagagcagagcataattatttagtaataatataattaatgtgctgaatgatattcttgcaataaatctcacttagaagcaattcttttgttttattttagtgaacaaaaagtattttccttgagttgctctgtggttctcagcttgacacattaacattttctcttacatgaactcaattaaattatagatgatatgtttgtctttataattaggagtaaatgattatgtgcatacatattatattcaggggttttatttatgtctgtcaaataatttaacagaaactgaggattgaaattatatatgtataaggttttcatttttattttgttctagttgacttaaaaagaagaagaactgattgaataacgaaacccttatatacaaaaaagcaatttgtgtcatgaataacctaacttaggatcatgaataacttaaaaattaaaatacatgcatgaataacgaaacccttatacaaaaataaaaataattgtaaattaacgatctcatattgtagggatattagagaagtgcaagttactccatcgtatgtaaattatgtatagtttttcgtcgtattcgaagtttaaaatctaccaagcattctcatacatcggatttattataatatcggaccagaactaacgattattgtccttaaatccaatggaatatgaatatggcgacattctgactttaagcaagacaagaaatcgagcagtgatcatgccaccacatttcacttttcattttaatatacataacatatgcatgctaaaaaaacaacagttcgtacaagtcaaatcattgataatgaactaaaatgtgattataccataagagtataaaacgatatgatgtaattacgacacattctttgaacccgtgtgtattattcacggaattggaatgttaagaggagttataagtcttaagaatgaatgaaacagataggcaaatccgtaaggtgcaatgtaccgtaacccgtcctctaaattttgaaacttagagacaattgaacatatcttcaagctgtgattttattttctttgaatatttttttgtttgtaaaaaaactgataaagaagattttatgtggggatgatcttaagacaaaaaacgagtttgaatctcatcttgtcggaatctccaactctgttctgtgccgtcctaatataattttaattatgtttatttatcttttgtacgattatgcatacctacttgaccttttataacttataaggcaatttgcctcccagccggaccaaaaagataacaagctcagataactttttttaaaaaaaatttagcaaacagtcaactataatacatacaaattagcttattcttttcacatgcccataactagattaatttatgtgtatatataaggtgttgagtttatatataatacatacaagtatacaactacaataccatgcatttatatataataaaagtgttgaattcgccttatttgcttataaatttgaaagtcctcgaagtaacggaattttcaagtatataacaaaagaatgttcacactttaacacatgaacaaacgaatgttaacactttaacattttaaagtatagtttatggcttattcttcccttctagtgttgtatggttttaaaccccacacaagaccacaaatgtatatagtaacattttgtgtttaaaatgagctaagactcaacgtgaattattcatttataactcatttaccaatctatccattacagctgtatgtttttggtatcgataagtgtgttagggcaaaatatcaccatggcttttgatcactctcttacgaatgagtttttcttcatatattattattcttagctcatagcttcatccaaataagttagttatcgacgccggatatatatcatgctgcctccaaaaaaattagctaagagagacctaccggacaattagtaatttaaggtaaaaagcggcatggattaaaagtttctttttattttcttgttctttttagtgttgttgaatttgcgataatgattccacaaatcgtgcattggcgtggccatattttatacttcaccgcttctcttgtgtggccaatgtaaagtctttctcattattatactaatctcttaccatcttatacataatgtattttaattaattgagatgaatggatagttataaataagaatatgttaatgtgtcgtgaaggaacaaagcctgttgttgtcgaccccacaagttgactgatcgtgttcatcatcatgcatggcttcgtttcacttatttaattaacgacttgttcacgacacaaatgattgtaccagtttaagaatctcttgatctctcttcatcatcaccaaatcttccttgagaaatattctctccatcatcaagtgtctccaacctatatatatatatatatagttgcacaagttcaagaattatcataacaacaaactaacaaacaacaacaacaacaacaagaaaggcaagagttgatcagttagagcgatggacgtttttgttgatggtgaattggagtctctcttggggatgttcaactttgatcaatgttcatcatctaaagaggagagaccgcgagacgagttgcttggcctctctagcctttacaatggtcatcttcatcaacatcaacaccataacaatgtcttatcttctgatcatcatgctttcttgctccctgatatgttcccatttggtgcaatgccgggaggaaatcttccggccatgcttgattcttgggatcaaagtcatcacctccaagaaacgtcttctcttaagaggaaactacttgacgtggagaatctatgcaaaactaactctaactgtgacgtcacaagacaagtaagtggaagatccaatatataatgtttactttcattcactactactacgcaataaactaaataaaatatcattaatttgtgggatataggagcttgcgaaatccaagaaaaaacagagggtaagctcggaaagcaatacagttgacgagagcaacactaattgggtagatggtcagagtttaagcaacagttcagatgatgagaaagcttcggtcacaagtgttaaaggcaaaactagagccaccaaagggacagccactgatcctcaaagcctttatgctcgggttagaaaacatactttatattacttcggtctcaaaaccaaatgacaatgagtaaagtcgttcttaagtgtgttatcaattgttgcagaaacgaagagagaagattaacgaaaggctcaagacactacaaaaccttgtgccaaacgggacaaaagtcgatataagcacgatgcttgaagaagcggtccattacgtgaagttcttgcagcttcagattaaggtatgtagattgttaaaaggattttttgtttttagtcagaatcttatcataactcatgttcaagttaactaaccaaaatgcatattttataaatgtagttgttgagctcggatgatctatggatgtacgcaccattggcttacaacggcctggacatggggttccatcacaaccttttgtctcggcttatgtgaaggacttacaagttacaatgtcaatgtaaagaaacccatttagaacatatatatccctatttgagccaaactaaagagatctacgctaagatcctaccattttcttcttgttgttcattctgatatttttattattcttaacttcttttgtctctttcgtcattatggttctaagaacttttggtactctttttcttttcttttttgtaattatatttttaaattatgaaaaagtcaactcagactaattaaataacaatcgtctttccttttgcaatttgaaaacaaagataaaattgtattattttatgccagggtttcggttatgtttcgtacgactccaaaattcaccaatcttcgaaaaaatatattgatttattcgaccgactttatagcaactcatgataaaagatgtatatcaacttttttttttttagtggttacttcatattgttgattatcattatcactttatcagtgcatattcagacataaggtgcatattggcacaaataatcttttaattcttgtgaatagcacataacttgtgtctaaaaagttaagtttttgaatacctaattaaacaagtgtttgtggaaacaccctacaatttcttttggccacttaattttttatgatttgagtctagagatgtgattgtgaatatgtgatgataccgcacaaatcgttctgctgtgcgacgatgtgatcgatcaatggaaaaaacgtccaataacaagcggatttgatatcattcgcaaagccacgtaccgtacgttcaaaagatgtccttcatatgaatatcgactaagaacgttttgatttttgatttattaacctttcattgcatttctttccgacatcttctctccattgtatttagaagatgaatttagtcaaacattgaaataaaatttgctatgataacaaattttgtgtcattcatcataaattttaaattaggtgttataggctaacacttatattctaggttttagaactcataaagttatcccaaacatctgactgtaacaaactaactatacatcccaatttatgcttttacacgttttacctcccaaactttgatctattaccattcaaaaaaattacagctcttcactaaacattacgatatattagaagctacacaattccaaatctctaactgaaatattgttttttcatttagtatactttgaatttttttattagttgtttttaattagatgctatatgtttttttaattaaagatgcaaagattcaaattccatgattttgaaaaactcattttttttttttttttttaaataccaaaactcaaaaattatcaaaatacaactattatatgttgacaaaaaaacaatttatccaaaatttttacttaaataccatcccttgaacacgttcctagtttcggtttggtttggcttgatgttctaaaaagcgattcggctttattagtcaaaccaaaccgtatcgtgaattcgtgatcgcctttagccaccgtgaagcttctccgcgagctagagggtcttaaacactaacaaaatacggaactgacaaacacagcaaccgagactctctcttctctctctctcgctctccgtcgctgccatggcttgcgccgagcagcctatcaaaaagcgtcgtctgtatgagtcaatccctgaatctcaccctccgccaccaccgcaactagaatcccaatccccttctacggtggtaagctcgttcccggctccggtgacaccgtcgcctccatctcaggaggaaattcaaacgagaagtaggaacagagaagagattcgaagagtgcatgactgctataagcgtcttaaatcttgtgttgctcagagagatggtggcggccgctctgcgaatcttgagcaagcgtatcgctccctcatctccgcttccagaggtttattttctctcattcttagctcgatttagttctatcaattggatgattgagaatctgccattttccggagttgattgagctcattttttttttttttttcctgaaattgagttttgtggttttagataactttgtatgagaaagaatacttcttaactgaattaagtgaatattagggttacagattcattagctctagcattatgattctaatctttggacacctcctagagtaatttttgttagtttgttggagtaatgatttagttagttggagtaatgatttagttagttgcttatacttgcaggttgtactagcgttaagcgccttgtggctgatctcgttcctcgatatgcattgtactgtcctacggctattggagatgcagtgcaagctgttattgacatgcataacttcagcttggaagctttaaagagaggacaagatgctgatggtgttgcttttcaaactgctaaagcctgcatatttggtctagttgacctatgttctgctgctttatcgaagaaaacgtcatcaccaggggctcgagatatctgctctgccgtgttcagaaatgtgttaaccttctttgtgctttcttttgaggggaaaaatatcttccagatagttgataagagcgatttgaagttgcaagatcctgacgaaattttttctcagctgatgcaaaaactttcagatggaaactcgttacctttgatcaaattatcccagtttcgtgttttagctttactgaaagtattcttcaacttccctaaaaaatcaattgccacttgtttcggattcttcaattcttcatccacggaggatgtagcaacggggaggtatctcattactcatatgacagaaaagattaatgatattgatgccgctagtattgaacctgaagtagacgagaattctggtcagacaggttctaacaatatagaggctactggtaagaatgcagaagggttgaatggtgtacaagaagcatcaaacagtctaacgagctgcttgttagaaatggtaatcctctgagtagtgtagaatcaaaataagtagcctttgcttttcttagcgtgttatttatttgtgtagggctttagttattatttttccctgtattgagcatcaaccgtgtcactcattttattcgcttgctctgttcttggaactttgtatggctaatgtgtaatgggtatattcaaatctgatagtttcaagaatccttcgtgcaggttattaggaagagttcctccattggtaggtgggccttctttcagtataagaaaatatgcagcctgtcatccttcgtggatatatccagtgctgttacttctctagagggaatctttggatttgttggaaaaaatatcaagttagaagattgtcaaatggacagtgacgaggatgattatggaaaattttcagtttcacatgtgaaacctcacagttctgcagacaatgatgtccgctctagtgctggatcggtttatgatgctggaggttcacgatctatggattttgagactgttgaccagagagacttgtcatgtggtagatcttcagtcccaaggggattattaaaccagcatacaccatctccttctgcaagagggccttcagatttaagaagtaactctacggatcgtaggaacaattttgttcttgcaggatcacctgtttatcaggcagtaccccatggcccttcatcagggcaaattgcttggtatttggatggggaccccactgcttttgacatttttccggcttcggggcagttgtggttaggctatttaggaccagatgaaacagaaggtcatctaaggtttcagcttgacaggtacggccctgtagaccgtttcttttttgatccagtgaaaggatttgctctagcagaatatagaagcataattgatgcaatcagagctcgagaatatctgcgagcgcaatttccttggcgcattaaatttatggatataggagtgggtgcaaggggatctttgaatggagtagcatatggttattgtactcatctgtatattggaggcatcagtagccagtgggagagggatgaaattgtccatgagtcgcggcaagccctttataaggggcctcgcatggtgactgacctgtactatgaacatgcccttctgatggagtttgatacacctgatgatgctgcaattgtaatggcccatctcaggttttttcggggagaaaagagtaaatttcatttggcatcaatcaatcgtcctttgcctcatgaagatggaggaaggtttgtcttcgcttcttctgacctatgttttctttgatgattttgaactattgacattatttttaataatgaaatatccacaagactttgtatcttcttctcacaaactctgaagcgttttgactttggtatagttatgcactttatgtcgttttttatgtctcattggtttaatgtggaagtttcttgtctgaacagtcatccagagaggcaccttcaagtacctccctcatcaaaacaggatagtggttcaggagaatatgtttcccccttaatgagtacggataaccactgtaattctgtacctcctggagctacctttcagcaaaactggcctgcagctggtagcactcttgtgaattctgcacaaggaggttagttttctatctactctttcctgaatagtgaatgctttttaacttgtgactgaagatgtgtatgaaactaagaccacccttcctcagtctcaggaactcctccatgtgtgcccataccagctccgggccagcctgcagtgcctgctacaccgacatctcaaatccctccatctccgtttgttcaacaacccatttaccctcctccaaacagctcttgggatacaagatccctaatctctccaagcggtgatgctgtagcaacatcatctcagatgcaaggacctccagcgcaacaggtttcaggtcccttcatgccgcctcctgtgcatccagtctctcagccacaaggacctcaagttcagcaatttgatcaattgtacccacctccgcctttaggacattcattaccttctgtactccagccaccactacaacctcaatcccagccaccggaaccaccgcctgaaatgatgccgcctccgcctcaagctctaccacctcctttgcctcactcacacccacctctggttcctcctcctcctttttctccactgttgtccccacgcttacctccaatggtcacccagttgtgtggatcagaggcttccaaacagaacatagggcaccaatggcagggtgctttgtccaaaagtggagttcattactccaccatcattgcacagagattggaatcagacatttgcaaatatatcattggatctcccgagcctgtgcagtgagtgacaacacctcactctaatttgttgtgttgtgtctttctttataatgaagtgatgtgctatgagatgaatattctttcctgtctttttacttcttgcagatggccagttaaactggatatgactaagcgcacggatatgaagaacgtaaaagctacttttgcgaatacacaaccacacaaagtaagtttccacctccattgcgaagtaaaatttatcgactgtgcaagcttttttgttacacgatttaaggaatgctgttttgcagagggaggtttgtcagttaattcctgctgctttcagcgatcgcaaaggggtatgtgtcacattttcaaaccctgaatcatcataacaccattttgtcttcctacgtaaatataataactctatcaaaactctctttctggtggcagctccaagatttcataacatacttgaagcagagagattgtgcaggagtaataaagatccctgcatcaagtcccatgtgggcaaggcatctcttcattcttccacactcgcaagagacatgttccttgctttctgtttccccatcttcctcggaatgcttgatcggtttggttttgccaaaggatacaaatgctgaggcctcatgacacaatagactggtgtaccaccccgggacaaggtagaataaatgaagacttatgtgtttaagatagtagttctaaatcacattgtaaatgaacttactagaatctcactctttcttctcccttttgagggttgtcaattgtagatttgtttcaacgatttaactgtcttcctctacataagagtcaatagtctggttaaggttttgtcagtatgcgcgtttttttacttttaaaaactggaccggaccggaccggaccggcggattagaacacaaaatttagaccattaatggtcaaacgcaatttttagcaatggcaaacgcaaacgctgttcaaggaatctcaatcgtttagcaatcacagacattgacgagtacggatatcagtggctgcgccttttgctcctcctccctcccgccctcttcgtctgaattacaggtttcctccggcgagtcatcatctcttctcttccatcgctgatcttctcacagaaacaaccatgtctaacagacgctcgaatcggcaagatgagaacacaagatatgtccccaagggccatcagcagcagaagtttgtacccaaacccatgaatccaactcctacctctaattcaacccctttccctgtttctctctcttcttcgcttaggcaatcagattcctccggtgcgagttccagagtctccgcttcgggtggtagtagggttaggattggggatcagggacagttggtatctagcaaaagtccagctcaaggcggtgggagttttgtgaattacttgccgcaggacgaggctgttgccgctggtttagggcctgatgatggaggtttggatccagtggagtctcagggagtggtggatctcctcaatagagagctcacaaggctgcttaagctcaatcctagagatttttggagagaaggtcatgcttcttttgattttatgtcagttttggttcataatgagcttcggtctctcgggtttcaacttttttttttgtgtgatggatttttagactgatattacttctcttggttaatgacagtggctagtgatgcatcgttgcatgattttttggatagcttcctgcagtttagaagcagatggtatgattttccttttcatggtgtcaagggtattgttgcgggcgtgattgtcggagaactcgagttatgccgtcgtgttttcatggtcttgtatagaatgtgagtcgctgcttgtttcataatccaaagctttttgttgaatagtcttttttcatcatggatactagtgtcattattttttattcttttgggtcttgtgagttgagggtttgtatatttggctgtggcagatcgtccaatagggatcccggtgctaaagctgctgatagcctcagtcagaaagatcatgaaggtggccttttgctctttgtctattctaatcccattcagttgttgttacttatttcgttctgaaaaggacatgaacatagaatgaaagattaacatgcctcaatgtttatattactaaatcttaggctataattcttttgtgtctcatcctcgatgtaagctgcctttcctaatctaaactagagaatgactcacaatgttcttttcttaccaagtctctgggactattataccatctaaagcttaagtaaaattccattactcactcaggggtatagttagaagtaggactgttgtaaaggtgatatgactattgtgattattttcacacagtgattttttaactcaaggttagattcctttacatgttccatttggattttggataagctttacgagtattatgtgtagacgttgtgtgcttatgttggttgactcctttacatgtaccatttaggtttttgataagctttacgattcttatgtgtaaaattatgcttatattagtcgacatttgttctcgggtagtttgattatatttcttagaccagctcaacataggtaactgattagagttggttagtcttgggcagggtaaaatagagctagcagctgaacatgtggttcttcttgaatatattggaaattggtattggttgtacgaatcaggtagtgagagtagtccgctcactgatcaagactttctagaatgaattgagtttttcttcttttttctttacgttgcacattttgtaggaaattttaaagattattttctagcttacagctattcaccagttttgtttgtagttcttctgcaggacaagaagttactggacttgccaaagttattggatatatgcgctatatatggacatgagaatgcagagctcacaaaatctttagtaagtcataggagaattataactcgtccgaaagctgagataatcttttaactctgtgcatcattttttgctaggtttgattctctttttgtgacatttgacatcctggaattcccaattgctgctggataattaagctgagataatgttctattcttttgctaatcgaattgtatattttaccagattgaaaatgctgtgaaatcacaaaacggaatttctgaaagtttgaatatgatgttgtctcatttcttgggcatcctgcacacaatgcatcaccgttgcacctcatctttggaggtatgttatatgtatttgatttcagaaactcttctttgggataaattaataaaattaaaggtgtaatatatgacacacatttatattatgtttaaaatcacatcaagtgttgaatttaacattcttggtctgtaaattcttgttttaagttttcttcttcaacgttatcttggatctatagatctactttcatatttgcagaccttagtatcaagtgcaaatagtgaagaccacggacgtagacaactccattcagaccttttggaggtgaatttccgtccccttttttctattaatttctctgttgtgcatttgcttctgtatacacatgagactagtaacattttagttatattcgtaaacatataattataaacgtaatacagtatttgtttgtgttgatctcttccaagatatctatctaacccctgatatggtttcttgttacataggaattaggacatacatattaactcgttattatagggtaagaaaatttgaagcttgctttaggattggctttaaaataatttagtatatttcatctttattatgtttttgatatgaatacgtgcgagtgagcatgcagacacttgcatgagccaaacacaagtgtgcacactcttagcacactcaactgatcaaaatatagcatgccaagtttctgctcttgttgtaattcaaaacatgaagtattttgcttgtttatagtgtatgggcatgtactgcatccgtgctaatgtttttttctatctgattaggttatggacttcattaatgatggagttgtgtctttggatgctttcatttctgcttatacaccagcagttttcatcttagcatgtcctgttgagacaaggtatgcaccatcttctatctaaatcttttaatttctcttgtgagagaaatgtactctcgagtagtatccccaaaccttgcgcctatcacacatgattagttggcataaatcatctgttactggatttgtattgaattccactatgagattcccatgattgatggaaagcagtattactagtgaaactttggttgctattaatgatctatattaggcttgttttggatctgtatttatcataacctaaatctgtctgtgcagttatgggagcgatgaactactccgcagcctagttcggttgcatgattcattgcttccatcacttcatcgtggctttcaggtcttgttcaaggatgaagaccatgattctctttcagacatatcaacgagtttaaacatgttatcaacaaggataggaagtttatgttggaaaatattagatatctgttatctcagcaatgataagttcaatcacgaaacttcaattccagctgtcacaaagatgttcccgtcaagagttgaggaccctatggtaagggcagatatattgattcaaacattcagggagatcagtggactttctgagcagtcactagaaagcaagaaccgattactccaaaagattgagaagaattacagaatcattgatagacttaggagtttacagaatgcaggtattttcttctacaatttggttctgcccagctgttacctgatttttcatttcaaagtcggttccagtctttagtatgtatggtctgttaggatagattgtgtagttcactgaaggtgaaataagcaacacattaacttcactgttagcaagtgaaattttctgcataagctagctctttgtttctgaatgccatgagtttaagcagtagtctaaagcagcttgttattggtttctatgcaggatggatatctatggaagatgagcaacttcaatatttgtccatgatcatgttgcattcggcagacactttctctatgaaggagtcaccgcttcttctaactgatggtagaaacgccgaagagcttatggatgaaaatgctgtagttatgcaatccaagatcagtcaaataaaagacatattccctgagtatgggaacggtttcttagctgcgtgtcttgaagcctataaccagaatccagaagaagttatacagaggattcttgaaggaacactccatgaggatttgcagcgattggacacttcactggagacgatgccacaacctaaatctgctccaactcttagaagcaaagacaaagggaaaggaaagctcattgaatctgacactagtagctctgctagtgccatctatacagagaaaccgatcacacggccctcccttccagcttcatcagcctcatcagcaacagttggcagatttgtcagaaagccaaaggatgatactccaagttacaaaattctcgatgctagaaaagaatccgacagagagaggaacgcagccctacttgcacaatacgaatatgatgatgaatacgatgattcttttgatgatctgggcttgagtattgcggaatcaggtactgaagaaagcggagcgtttggtaacagagctggatccgagccctctgatgctccaaagtggggtagcagaaagaatcctcaattctatgtgaaggatggtaagaactacagttacaaagtggccggcgcagttgctgtggcaaacgccaacgaagcttcactggtaaatgaagcagagggagataagatacttgggttgggacgtggaggaaacattcctctaggagcggttagaaagttgacagagtatcaggcacagagagatgagaaaggtcagtctaatgtgaatgtgaacccaagcgatggaagagagaatgggagaaactggagaggagtaaggggaagaggaagaggagtggtgaacagagagcaaccgcaggagaagagtaatgagagtagtaataacaactcagaggttaatacagaggcggagaacggaggaggacggggtcgaggaaggggacgaagaggaggaggtggagggagaaatcataatcataaagatagagctatgaagaaacatattgctagtgtttctggcttctagaggtttaaaaagtaacaaaaagcacaatacgtttttgtgggtctgttttttcggatacaggggagaaacttaattacaaatcgatacttcatttgattgtaatgcttgtttctggtaattaaaagaagaaaactagcatattattattccctttggttttggttaaacaagtttcttttgtaacaggttggtatgaatctaataaaaaaatgaactttttgtgaaaaaaaaaaaattcttttgatatatatgcaaaggtaacaacaacttataaccattccaaatctccaattgaactcacattgtctaagttctatctttttatctttattcttcttcccgtaaaagaaagagtagttattacttcgagtgacagaagttgtaaaaatttgtaagcatgtaagccgcaataatataaaaagagaagaaacatttataaatgtgtgttatatataaagaattgtattttatttgaggtagataatgaatgatctacaatcaacaactacacggtttgtgattatatgtatccacgtgatttaatatacaaatagatttgttttctctgcaaaaaatacaaaaataaatacataaaagaaaagccaaatcctaaacgtaactggaaaataatatacgtatgagctaatttcaatttggattagacaaagaaaagaagaagagagagacgtaattatacaaaagcttacgagaagtttgttccatcatcacttgagagaaagatgatcaaatcatacaagagaaacacgaaccgttcaacgggagggaacgcggcagcactatcattcgctttggttcgtcgtgcagaatatttaggtacatacatatgttttataaattttatcatctttttgaatgcatcataatttacaatatttcgattacgagaaaactagatgaagagaaccttaaacatcctttttaacataaaaaagaacactaaactaacacaagttctacacattagtataatttcttagctgataaaaaacacaccattagtatttttccctttttggtaacgttttttttaagataatctaaaccataatactgaatcacaaagctcataaaaaaggaaatcgaaattataatcacgtcggcaagtaaagagccaacggtgagggatgagccacgtgtgaaaggatattccttagatgtgaatgggatctaattcttgtccgattaaaccgagaagagtcttggtacgcctctctatatataaaagtcatcactttcctcctcacgtttcttcctttggcatcgacgaaagtctgaaaactcttttctctccacctctttctctcttaccccaaacacaaaatctcctctttaatggatatatcgcctctccgatctcattcttcctcgtttttatctgccaaactcttattgctcttcttcttttgtagttttcgtgcttcttcgatttcttcttcttcagttgtttcccatcgtcgtaatccttctagctttcggtttctttgataattccctttgaattcgtttttcttcttctttcaatttccgcaaataatcagccgccgataagataatcatggggaggagtaagatttctcttcttcaatttttattctttaattgattcaatttgcaactggatttgtttgttttagggttttaattgattactaatttactatgaaatctcttatataaccaatttctgttttcgttaacgcttttataaatttggatgctttgattaacttttgctggaattgtttttttttgtgcagaatctcagcgtaagaacgcgacaatgtttgatagtgatgatgatacaagtagtgtaagctcttcctccaccatgccatctgagagattgttgaatcctggtatggatgaagttactgttctcaaggatgctttgttagatcaatcccttgatgctctctatgagaaaaggtttgtgtttctttgttttctttttgatgtgcttttgcttgattttgatgcaatactgatatttttggatttgaaggagctcaactagagagcaagctttggccaccattgttgacgcatttaacagcgacttgcagtatgagtttgttgaaaagaagtaaatatctgacactctttcctattttagttttatcaatccacgagtcttgtgtagtttaatcaatcatacatcatacagaatttaaccatgtttcttcttaatgagtgcaggtttgccactttattgcaccagtgtttacactgcaccaagaaagggtctactaaggagacttcattagcaactcatgtcattggtgagtctcttagtaatagacaactcatgcatttttttttgtcaagtcatattaacagttaatcgtggtggtttacagggttgctagcgttaactgttggactcggggatcatgcacaagaggttttggaagaatctgtcactcctctgtctcaagcccttaaatctggtcgtgaaatcttgaaaataacttcggtatggatgatttgataatcgatcagtttgtcattactttacaggtttcttaataaggttcatcttcgattcatggttgttgatattctgccttttcattgtagatacttgagtgtttagcagtcataaccttcgttggcgggaatgatccagagcaaaccgagaaatctatgcagattatctggcaaatgatccaccccaaactagggtctaatgtatgcatcttacttttttctcattttacaagccttttcaatctgatttattaagaaagtaggctcacatgaaggttggcgttttttttgtaggttgtggcaactaaaccttcacctgctgtaataagtgctgttgtatcttcctgggcttttctgctcacaacagttgatcggtggactctaggtcctaaaatttttcaagagtaagtggggcatcatgcttttcttcgatctaattttacttattcatagactgattgaatattaatgtcattgcaggactgtaacttatctctctacattgttggaaaaggatgaccgatctgtacgtatagctgctggtgaagcgcttgcagtaatatatgagttgggaactctagagaagttcgctgccgaagtcaaagggtctgctaatggatcagtgaaagaaggaggtgtctctcaggaagcattgatgcacatgcatggcttgaaagctaaagtcactaaacaagttagagagctctctgtagaggcaggtggtaaaggttctgctaagaaagatctcaacacccaacgaaatttgttcaaagatcttgttgaatttcttgaggtatatcttcttcaccttttctcctgttgaggtttaagttagactattctgataggattttatatatgatgtgttttaatgatgattaggatggatatgctcctgaaacctcaacaaaagtcggaggggactatttacagacgtcaacgtggtatcagatgatacagttgaattatttgaagcatttcctagggggtggctttattaagcatatgcaggtctgttttcttatttaccctttcttttcaagtgtcgaactctcttaagttttctttgttataaagctgacgctgtactgttttatacaatttggttatcaggagaatgaattccttcatgatgtatttagtttcactccaaagaagattggtggaggaaagttgtctaatgacgaaaaggtatgtttccggtatcttcattcactgtctcgaatcttatcccattgcaaaaaccttgttaacaaaactggattttgcgattatttgttgcagaggttgtttaaatcaccaaactcagctcttaacaaagcaagaacgcagttcctggccaagcaaaggatgttagctaaggtattataaattttgattaatcgtcttatctgggaattgtgttgtgcagaaagaataacagtgtgttgtttccaattgtgatgcagaatatgaacgttgggcattacgcagctacagcaatggaggaagaatgatggctctacaattgatttttgaagaatgatggcacactcatctgctgcttttggaaaatgttgttgttccattagtacactttttcttgtttcatgtttttgatttgataattggttccaatattataaccaactcttagaaatgtcttttcatttataacaattttcgaccgttgagtgtaattcctatgattcaacacttgttgtttctgttaagagtgccattgaccaattgtattttgagctgagactcggaattgtcactgaaaatttgtcagtgtattggtgacagacaaaatttagcccatgtattggtgagagacaatttagcctatgcttcacttattcagtaaaaggtatctaacagaagaacaaaagataaagtaacaagttccacaacattgaaatatttacgaagcaaatgctcctccaaatcacttatacatttggccaaaatgaaaacataaaaaagcaccgtaactagtccaaggccatcttgggatatcaaacttccaaaggccggagaaaaaattggtacctttcaatgccaaagttgtggcacaaggaatcacattatacaatgtgttgcttagtgtgaaccaacagggatcatcttcaaggcagcagcaacaggcatgccaaggaacccgagtatgatgctaaccaaccattgtcccaaatttaatggtgttgtatccgcaaatgtacccagcagctcgattatgattacttggaacaccactgtacatgttagaaccgctacgaatacgtagttctttagtatccccttgaacacatcaattttttccatttccctcgagcttatctcattgaatacctgaaacaaatatcatacattatgatgagaacgtggttatggtcaatgttggttgttttcctttttaagatccagacgcggcaagttacctggcagaagacaaaaatgttgaaaataagggtattgagtgttagatcagagtcggggccatcgagaccaaacattgtctttccctttgtttgaagacaccatatgatgacaagctggtagagtgactgaccaaggatgttcctccacattacattacttatgaagtttcctttccttcccactggagatctcttcatcaggtcgtcctgtggtggttcagtcgctagcgcgagtgctccaagtgtgtccattatcatgttaacccacagtagttggacagcagtcagaggcgcgtttcctgagacccacagtagttagtgtcaatgtaacagagaagttagttgcaatccctgaggagattagtcttttgaacaagagaaaaataaatgtgggttgggaactaaccagtgaggcaggctgataagaagttgacaataagagccacaacatttactgtcagctggaactggacaaatttctgaatatttatgtacacagaacggccccatttggctactgtgacaatcgtagagaagttatcatctaggataatcacatccgcactttcttttgccacctacgaaaattgaaaaatagaatatgtaagtgttgtccttccatgagaacccaaactcaattgttagattttctcacaaaccagataatgaaatagggacaatgaagattgagtacacacctcagttccggaaatgcccattgcgagtccaatatcagcttcatgaagtgctggagcatcatttgttccatcacctgtcactgcaacgacttcctgaaacattgtgcggaggagtctcaccaaagtatgcttatccatgggcgaggatcgtgccatcacctgcaagaaggaaattatacttgaatcttttgtagaagagtatgtcctaaggagtttttcagaatccggaagctaatgcaatgaaattgagggtttgtttcctgtttgcggatgtgaactaccaacacactgcataaaacaggataaagtaacttgtgtttggcagacaatcacctgcaattttgggattagcttgagcagttcctcatcacttttctcccggaattcaggaccttcgatagctatgccatcatcagtcaatatgccacactccctggctatggccttcgcagtagtaaggttatctccagtcaccattctgacagtgatgccagcagatttacaaatcgcaacagactccttgacaccagggcgtacagggtctttgatgcccacaatacctatacaagtgtatccaccacttggaataggagcctctaatgagaattcatcaccaatttcgaaatacgctaggcaaagagttcgaagtgcttcgctagcaaattcctcaattatgttcttcaggtgactggtcgatttttcatcgagaggaacaacttcaccatctttgttgatgtacttatcacaagaatctaaaactatctctgaagcacccttacaatgtgcccggaaatgtctttcaggcagctcaatgacaactcccattcttttctttgtagagttaaagggctcaactttcacaacatttgaggcttgccttacttcttggaagtcccctccgagtgacaacccaaattctaacagagcagtttctgtaggagttcccagtatctcggttttgtttcctttgcccacaacaatctcaccaccagtgttagtaaatatagattgcagtagaagtttaacagcagactcagggataccagaggcaaatttcatagcagcatcaggaccattaacctctttggcttgttcacagatgcaggcttttacaactgtcatgtgatttgttgtaagagttccagttttgtcactacaaatagttgttgcagatcccattgtctcacaagcagcaagattgcgcactagcgctttgtcattcatcatctttttcatggcaaaagcaagacttaatgtcacagccaacggcagaccctccggaactgcaaccacaacaattgttacagcaacagcaaaatattctagcatcgccatcaattcatcagcagtccagatccagtgagaattatctaggcgcttctgattagccaatccttgaaccaaaacagcaaacgtaatgacagcaaaaaatagacctattttaccaatgatggttgccacaccattaagttttacttgcaacggtgtctcatcatcaccgccttcacttagtgtagccatcagtttaccccattgagtcctcattccaactgtagtcaccaacattttgcaagatccatcctgaaccttggtaccagagagaagaaacgggtgttccacactgacactaaccggttcactttctccagtcaagctcgattcatttatcagaacagaaaaccctgagataaaaagcccatctgctggaatctggtctccaatgccaagatgaacaacatctccagggagtagatcatatattgagattttttgcctcagtttgtctctcgtaacctgaaccacaatctttttcttctctgcatccaggtccttgaattgcagggattgcctataatcactagtggcagtgacaaacacaacaagcagaatactcgccactataccaagtccgtcatgggcaccaataggccacccttccatcagtattccaactataagtgaaacaaacgcacatgcagctagaatcataagtgttgtatcctgaagggcttcccaaacaaataaccaaaagccacggctggggctttctgtgaattggttgattccataaatttcttttcttacactcagcaggtcttcagatgtactaattccactagcaatagacgtggaaagtttttcagtgaggccctcagttccaccatgaattttcaactttttcaaatcatgaccttctacaattgatcccaactcatcaggacaaatctcaaaccctgcttttcttacttcttcaggtagtgtatactcactggacaactttaaacctgtaagcacgcaataccttctcgttaaggaaatcaaatacatattgaataacacaagggagtagtctattctcactattaatgaactgaagtgcagcttgtgaaactaagaccgccactcgaaatttttcctgcattcataaggttgacaaaggaaaatggtattagaacaaagcaccaatagcagtaagaatttattctcaaaggaaaaatgaacagaacgctttgatcgctctaattaacgcctccttcaatacaaactacaagaaacacaaggcttgaaatgggttgtttgctactaatgagtcatatttgcttgaacattcttactagcaaacaccacgaagaacctaaaaatctacatcttaaattagaaacagaacctaatgtaatcatgtctagtgataacaatccctaacctgaggataggtaactagaaaaatactaaaaacgagctcacttagatcccatccagtaagtacagtgagtcaaccaaacaaaaaactcggaatgcagaaagatcacttattagatctccaacagtatacaagcagaaatagaaagaaatgtttcagtaatcaaagtgagaagaaagaagcacctgattggaacgccgaatcgcctcggcctcggaacgcttagacagattagcagtgaatctaaatctccttttaggattcttgacgatccagcagagcttcctccaacgctgcaacgcctcatcggacgagttcttcggcttcacatcgccgaagttttcgttcaagtagctctccatttcttcagcttactactctcgaacaacgagtgaattcgtaactatacttcagatgagataagattagagaaagagagaatcaaggatctcgtaaatcgagaacgaagaagatatgatatataacaagaagtcctctcactggtaatgggtgcttttaacttattgttatttacctttatatgggtcaagatgaagacgatgctttgacgcgtcgtctcgcactaagtgagcttcgtcgaagtttcgtctgcctgttctgaaatttcctcatggccatggttttttttttttttttggaacactcatttattcggacatgactcggagctggtcaagaaagtcaaagctatttactgacttggactttatttcaacaaagtttttagtatattctaagttttgtgacttttgtccattagaaatttcacacaaataaattagaataatttactaagtatattttctaaagaaatttttacaaaagtagacgaaaaaagatttgctctcattgtttgtcaaagtgagaactggttttcacgttttgtcttttcattcaatttcggaccaaattaccctgggaaaacttaataatggcataaaccaaaccgtgcagcagttcgtatcggttaagttgacggcgtaaaccaaaccctacagcagttggtttcggtttagttgatgcggttcagttttgaaaaagacaaaaaacaaaaaaactgaaacgaagaaaccgagaaaacgaaaaagagaataacggagagattgagagagaatcagaaagcgaaacgaaattcagtatccattgcttcaaaattcgacataacttcgaattgttgggtagttgaattgtgccactgaactcccacatccggtgaagtgaaagttactgtttttcccggcgaagccaagagaaagttactgtttttcccggcgaagccaagagaaagttactgtttttcccggcgaagccaagagaaagttactgttttttccggcgaaatttgaacctccggcgagatcgcatctttagctatggctgggaataaagctaacgacgaagtcccgaggaagcagcatggtccagggaaggagaagcgtgtattaagagtttccccgcggagaaaacgctctgcgacaaaggcaacggaggaactgggttagaatctctaatttaccgtttgttgtctttgggtgtatcagaattgtaaagcttgtttgattaaagtgttagaatttgtcggaatttagcatatctttaggatgaaaaattgagaagtagaattggaaatctctgtttccgccaaaaatatgattttgagttataatctggaaaatgtctgtgtacgtacactacttctgtttgctcaacagtatatgacttttaattgcaggtagtccaagtgttgctccgactgaagatcttacagttgaagagttaccaccaagactctttgctctagaccggtacccttccgagacgaagatgaacgcgtactctaaaccggagtacatttctgacatagcaaaagtactaaaggggaaaccagagatgcagtttcttctcgattctccatttgggaaactttttaaaatacccaaaaacaaggcatctttcaatgctaagcttgtccttggactaatatgccgtcagttagtgacaaagaaggtgaatgagatgtggattgtattcggcggtcatccaatcagatttggattaagagaatttagtatcttaactgggctggaatgtgggaagtatcccaagaagaaagacgttgatgatgttatcagtgtgaaacctgagtgtgagagtgtttggaatactctgtttcatgagaggtttggggacacggttccaacaattgctgatttggtgagctggctgcaggaggaggaaagcatggaggggtggaaccaactggcactatctcttattattttggttgacggtgtggtagcggcccacagtaaccccaacaggcctacttcaaagactgtcgagatgactaagaacctggagtttttctgcaaatacccatggggaagggtgtcctttacccgtactttggggaggatagcaaatttccaaactccttacgatgctcagaaactaataaggggtatacttgtagggtcttatgcactccatggtttcccattagctctccagcttttagctttcgaaacaatcccatcaattgctaagctaggacctgatgatgtacctaacaggacatttgctgagaggtctatccatcgtcttgcctctctgcgagcaatccggacatctcgcattttggagtgtgaggctgctgatgaggtgtgttaaattgtgtatgtacgtacataataagtaaatgtacattatctatggttaacatacttatttgtgtaggttgaggtcaactatattgtgaaaccagctgataatgtttgtcctccatctctttcatgggatgatgaagttgatgatccaagggttgattacattgaggcactgttgatagatgggcaccagtggcaggaggatgaatgggttggaggctatgctagagtaccaaagcagtcgcgcccaccacaactagaagagacaggtaagtataagtataaatgtttttacaaatttttttggtattgcacctagaagaaaaccaattaatagcagcaactggtctattgtagatgttaagaggaaacgaaatgcaccgggcccgagccctaaagaacctgctatgaaaaaacagaaatctgaaatggactgtgataaagaagagactactgaggattgttttggagagcttgtgcctgagaggtttattgttgaaatgaggaggtctttgaaggagctggaagaccaaatgtatcaaatgcatgaagatatgaaagactttgtccgtgaccagatacgtgctacccttgatccaaaaggcaaaaggccagaacaaaccataccttcccatgattcgcgggaaccacctacttctatggataaggcaccggttactgcgaagaagccatcgagaaggatgtctacaaaaggaagcactggaacgagaaagtcttcaaggctgactcgtgtttctcatgatgtggacactcctgcactttctgttggctgtaattccaaagaggaagatttggatgtccctggaatacataccactgctttcggcggaagaagaaaaccttcaaagccgaagaaaaatgtttcttttgctgttgacactattgaggaacctgattccaataaggaagatatgcaaggattcattgatgaacaggtaagtcatgtacgtacattgctaaatattttataatccatatgtataactgtactgtctggttcgatacaggatggcgctaataatgaaagtgattttactgcaaatgatggattgaattcttctgccgctgaagaagagatattagacactggatttttaatagttccttatgctggatccacacaatcccatctggtatgtcgtctactaatactcttaacaatctgtttaaatggtgtacgtacatattcgcttaagaagttagttaaactatgtttcaggatagaggaaatgttgttgttggtaagactgtctgcttaggttcaatgtctgggactgtctttgtaacacaggaagagaggcctgtggaagaagctactgttgacaccgagatggaagaagttccatctaatgtgtctgcaagagtttcagaggtagatcttctcgtaatcgttatatacagatttccatgactatatgcataactattacattaatttcttcacttatctaacgcttaactctatggtagcctatgtttcaggataatggaccaaaggatgttgctgaacctggcttagttggtacccatacaggggccgatgaaatagctgatgctgacatagagatggtagacaatccatcaggtttaccttcaacatctgcacaggtatgtgttagtcacttgttcttttttcatatgtgtacgcccataagactttgcaaattatttttgtttcaggaagaagcaagagatgccagtgcatcgactgaagctaatggcagcgagtcagaagaaatttatgagccttctgatggagacacagctcacgtacctgccacaagtgtacgtacatttttgtcactatgttctgtgtacatatatattgtttcatacattactaaaaagtttctttccgatgctaaattctacaggttgaggcggcaggagaatccaaattagtgacagtgatggaagttgaaatacctgagaagacccacagtgatcccccgtcaccatttcaagtagttaacaatgtaagctaactcttgcaacaaataaaatgtactatttactgttcaaatgtataaaatttatattatgcaggtcatacgggagttggataccaaagccgttggtgatttagctgcagccactaatttggaggtaacaatttgtgtgtttcaattcctattttcggaatagcatacataggattatatgtgtacattatatatacttgtgtacgttaacctgcacaggtagtcatggaagagccgtgtattgtcgaggggtctgtagaaactgaggatcctaacccagggtcagatgaagcagacaagaccgatattcctaaaaataatgtatgtacctattttaaacatagaaaaacgtatgaaactgttgttgacaatcatatttgttaacaggatgaatcagacaatcctgctgctgtcgaagcaaaagaagaaaaaaaatcgtccccaaagaaagtgaagaaacaacttgtctatgaacaggatgatgcccatcctcatggttttaaggcaaaaacagtattggtgcccgatgtaccagctcaacagatagaggttgttatcagggctggaaatgtctcatacaaccccctggacgtagttgacccttcaaaagtagaggaattcagcaatatcattaaaggaccctctgtgtaagtacattatagtaaaatggattatttaatatctcaatcatcatttttaaggttgttatcaaatatttttctggattttacaggattcacactcttttcgggtttcgaaaagtgcccaacgacttttttgcgaaccttctaacacctggtgaatgggtcgaaagtacggtacgttccatttatatacgtacattccttgttataaattgtacatagatgattaaatttttcgtggaagtgtacgtacactgatatattttttgaacatttcagcatttagaaatgatggcaatgttgatgtggcacaagaacggggaacagatgatagcaaacagatgtattgtattggacatgatgctgacgcatcttcttaccaagcgggtgggcgacttcaagaagtgtattaataagaacgggttcaaatggggtaaattactgtccgacattgctaatggagttcacataaaccgtgaacccaatatgaagtggatgaaggatgtcgatgttgtgtatgctccgatgaactggaagagtgaacattgggttgctttgggaatcaaccttaatgaacggctaataactgtgtatgacgctttaatatcgcacacgcgggagtcggctgtgaaggcgagaatgactcctatttgcgaaatgatgtcgtacttagtcagagcgatgtgccaggatgtattgatttctccgtactcagttgaaccttttgagtatgtgcgttgtcctaccgttgctcaaaacccaactacaggagattgcgggccatacacgatgaagttcctggagttgcttgcgtttggacaccctttttcggatctgacaaccattcgagaagcagattatgtcttctaccgtcagaaatactccgttgacatctacgagcacggcaagcgggaggccggtactgtgcacttggtttaatcgtccaagaacaatattctggttctttgcaaccaattattatgaacaaacctgacttatatatatgattgcaactacatttaatttggagattgtcagaagttaatttattgtcctctatcatattgtcgtacacatcgttcacttataattacataatgtaaatgtgtacgtacatatctatatgtctcgtacactgcatattaactttataacataactcaagtgataaattgatttgacagccaacgcttaccaacacaagtatgacattcatttcaaccgtaattgccccaaccaaattcacagtagtggttattaaagtgaagaaattactgacgacctctgactatctaatttcaaacatggttaacccgactcttcccgacgatttactctcgaagatagctaagaacctggctgaccaatgctggtccgaccttcgtccattggtacgagccggcactcgtggaagagacattgtctaccgtccggatgtcctcaaagatgccaatattctcaccttgtgtgactcgcccgatgacttccaagctggagggggccacaatccctccggatccgctgatgaaggccgacatcgaacatttttcttaaggtgttttacagctaataatcccacggcagtgtattacgaaggtattcgtgttctaacgcatgaacgaaacatcaatggagccatcaggctcttacagcgtcatgctccagtacgagcaaatgcaacacttgcatgcgccattgtattcatatgtgctgggtatgattatatgggcggcttgtttctacagctcttcacccgcaaccattatccattggactcggttgccactcgagttttgggtgatgagttcatcgaggaaataaagaagtttgaccctccatacagcaatacatatggtcctacgttctcttatcctaccagccatggaattagtatgcctccttgcgccttatattgttacatggtatcaggagctttccaaaacgtttgcaaccgctgttacctctggtcgtgtgccaggcgtgttagtcaaatgctatagttattccattctactttatatgtttgtttatgttatccgctatgtcatgtttcaaattatgataagccttctactatgttgtttatgtttatgttgaaattatattattgctcaagttgagaatttttcagccaaattcacatatgatatttagacactgcagtaaatgtaaatttggatattaaaatctaagcgtccacaactccgtacacgtgcatctaccaaataatacttagaggttttttctttgtctcggaaaactagatatggacgttcactagcatgagatatcaactctaacgtacactaaaaaataacacatgcaaacatatgaggtctttggtttgtctcataaatggtgatatttacgaatgaacgtacactaatagtacactacagcgtacactgtctgttgagtaaatgtagaaatgtaaatatggacgtacactaaaacgtacactacaacgtacactgtttgttgggcaaatgtaaaaatgtaaatgtggacgtacacttaaacgtacactacaacgtacactgtttgttgggcaaatgtagaaatgtaaatgtggacgtacacttaaacgtacactacaacgtacactgtttgttgggcaaatgtagaaatgtaaatgtggacgtacacttaaacgtacactacaacgtacactgtttgttgggcaaatgtagaaatgtaaatgtggacgttcactaaaacatacactacaacgtacactgcaacccttgcatgcgcaattctttacatatgtgctggtaatgctcacatgggtggtgtctacctccggctcttcggaagcaaccattatgctttggaatcggaggacgcacgtgacatttgtgaggaggtgctagaagatataaagaaatatggtaatactttaaaatacacatacgctaacagtttttcgttcccggaatgtgttgacgtaagcactcctgaatgcgcggaggtgtgttacattagatcgagactcttcaataatctttgcaaccaatgttacatctggttgtgtgctaaacagattagccagatcctgtagagctcacattcgccacgatcctgtcatatttataagttttccatgcaacaatatgtgagctttttacgttgattatcagtaatggaagtttgtttttaattaaattaccactttgtaattgattcaaacatactagctcaaagtattctaatatgagacatcattaaaataataaaataataaaatatctacgtacacgatatatgataatgtacaagtggcatagtttaattccaactataaagattacatagtgagcgacgatatttgtaaatgaagacgaaaggaaatttgatttgacgtcgtataacccatatatagaagatttcgctccaaattaattactcgctgtcaaatacactctagaagtgacctccatcacactctcattaatatctctattagacgtacacggttaccgagcaatgtactcaattgatttggcagataaaataactaagttaatgtttatttgaaaagattgttagtaaatgcgttgacccctaatatagcactatacatgaagccatattgttccacttatatgccatacaaacagacgtcaactcaaccttctgtcagagaacgtaatgagtattttgtagacgtacacggcgcgattatgagaggtacacaggaatttgtttaaattagaagttactaatatgatgcactaaatatacatccacgtcacccatccacttacattgatggttattctcctctttaaaactcatgacaaacacacttagttgaatacacgaatccgtgtaaacctcctcgtttgaaaaacaatgcctttcctacctccgctaacccctccaaccgagttgtacctaggaatccaattgccaagccccataagcatacttgtcaactacctccccgtcagccagactcccatagagacgctaaggaacttagtctacagttgtgacatcaacacccttgcaatcgatgaattcatgacgtggccgtcgttactccaaccggggtctcccttccggccatacttcgaggtgcttgtagaacgtggatccatcccggcggtttaccttgaaggtgttcgccaagcgagcaacttcgtgacagtagctcagggcctttcagtcatgacaacggtcgctttatctgatccctttgcttgcttcgcaaccggtttgttccttacgtgtaccggtaatcacttggatttcctccctatcagcgaaaagttctgggaaatgacacccacccttgaagctggccacgcagttgcagagatggtgatgtatcacatcagccagctccacactgaaaatgctcgccgctgggaaaggtcttggaggtttgtccacctgccgagttgcgtagggcaatgcacgttccatcatggctgcagggtttgttttttctactggtacgccagggagatggctatattctactagaagcaaagctgctaaggtctaagctactctactcggctctactctcgagtcttttggtatgacggatgcacacatattttgcaacacatgtgtatgcttcgtttaaaaaattatgttttttgaatcgttccagtttatttatcttatcttatgaatttccctttatataaactgcctgtccttttttatgtttctggcttttgaatgaattaccactttaagtattactagatgtcttcgtgtacgtacactatatagtacattaaacttcgtttatcgtacattgggaaattgcgtacacaacataagtataaatctaacagtttttgatgttgaaggcaccaaaactaatatatgtacacgatagcgtacaccagaaactatacgtacattgcgagaggatttgaacaataaaacaaggcacgtacataaaacaacaaattagattaaaatttaaacggaaacaagaaacaacaacgactgaaatgtagtttggttcttatggaaacaacaacaacaactgggaaagaaaacttaattgaaatgtagtcttatattatattaaaacggagaataatggttcattccctctagctaaaaaaccaccatcgagatatccgcaacttcttctctgtccggattggcaaccacctttgaaatagcaccatggctctcaagcttcgggttagacagttcggttagccgccaaaagctgagtgcgacaacaaaatttcccttacccaaactctgaaagtaaccatccaagtactccgcctgttgattgcgggcttcgcactccaagacttcattgctacgttagaaataaggactgttagcgtttagagtgacattgtaaataaaacaaatgaaaagaacacttactatctattttttaacttgaaactcagtttgagaccgtaatagtctgtagtcaatgcgccaacatcaaccaacgctccaatgacatctagatgatggagaaacaaagataataaacaaacattttcaaaaatgtaataaatgaagcgtcagagttattcctcctcaccgactaaaacattcttgtaagcggatttatccaaaatgtagtcgaagggagtgaaatcgaaatctggaactggtggtgatctcggtggggcatgaacgacgacggtccgatccataaacagtatgccgtattcatgctttgttgctctgactaagtcagttgacttacggaccaagaaagaggtgatcgtcttccactcattttcaacgaatcggtcttcgtaaaacggagcaaggcgacgatcaacggtggcctcaatacggttattctttacatacagaacatgatagtagagagtttaatatataagttaagcgaatgaacgagaaaaacacataatgatttaacggaaataacctcgtaatctgccaggataaggccgagttcaaagacgttgggcgatataaccttcttgaagaccctcacgacaaagacataaattcgccacccagtgatcagaggacacaattctgagactgtatgaaacccctccatctcacggatagcaagaacaagcgattcgaaagactaaaattttttttgtgaatgatataactgccggcacaagaaatgggtttagaatgaggattgtggataaaattaaggaagggaggagacttaaatagaggaaatctggaacggctacagttattaatgcggttacaactacacttgattcaaatttttggtaatagcctggtaaccgtcatatagggtaatcataacgttgatttgacaataaacagcaacagttacgtcctttccattaaataccaacacaaccacaatatacccaaccatgtctccaactccgttcatttaagagggggaataagttagattttcaaaaaacttatttcaaattactcaaaatattgagcaaccacctctgtgtacccttattacatgaactttaacacgtacacagacaaaaacgttcatagttatacgaacgtagagtttaaacgtacgtacacaacgtacatagttacaggtggattatatataaacttacgtacaccgagaaaacacagaagcgtacactatattggccggctcagaaacttgtcaccggaactagattggatttttgcacgtcttcttgttatgacctgcttgtcgacagcgtgagcactgatttggtaaaagtcttttctgtctctttttctgaagtgacaaagacaggaagttacaaatctccgcatggtaatactcaaaatacaagtagatgaatgaacgatgttagtacatacccggtttttacctctagatgggatccttttggacagtggtcttcctggtggccgtctactgtatggaggaatgagtatcaaatccactatatgttgtgggatgacagcatctttcggatccgcgataggtagaattggttcttggaaagaatcagaaaacgtttgaaggccataccaccatccgacacaagacttcggatcaattccatgctcgattgcagctgctagagcgtgttcacatgggattcttaacttggtgtacctaagacacgtacacgtacactggtccaaaacgacatgaaaatgctccccggatttacttgtcacttgatagctccacggtccagacatcttcacagcgtatttacctgacgcaggcaactcttgtagaaatctctcatcaacctcaggtgtcacagaagatttgcacctagcaactttcttcctcctcgatgcgaaccatcgcattaggacatcccgaatgaactcgatcatgtaaacaatcggataagtttttgcttttgttaacacatgattcatggactcagagttgttgctagacatgatattgtagcgttctcctctacagtgagctcttgtccaatgctcaaatcctatgtcctctaggtattttgcgcatttagcactcttttcccttaacagttcaaaatatttctcgaaatccctgaccctataagctttggcagcgctgaaaaataaagcagacacaccaaacttaccataataggtggagaggtttcgctcaaggtgaacagcacatgctccatgatgcgctctcgggtaaacaacacttaggcctttgtatatagatgaatgtctgtccgagacaatcattaaatcgtcactgtctggaacaatctcagctaacttttcaaaaaaccatgcccaagaagcatcggtctcaccatcaacaacaccaaaagctattgggaatatttagaagttcccatcttgggcacatgcaataaggagacatcctttgtaaggtccgactagctgcgttccatctaccacaactaccttcctcatatatatcagacctttgatagaagcgccaagagagacaaagacatacttgaagcgctgcttaccatcatcttctggggtatagtgtaggtgtgttattgtacccggattagctaattggagaagatacagataggtcggcaaaaacctgtaatttgctatctcatccccccgtacattttccactgcaacctcttttgctctccaagcggtagaatatgaaatacgcacattcagatcatttaggagcagctgtggtaagtcgacagctcgcggcccaccctgcgtagaactgtatatgctcctcacaacttctccgaggagcttataattagcatgtttattgtagttcttccgagagtcgatgttacacgtatgtgtcgtagcatacgaagtgattttgaaatttctgaatccttcacgacgcgagcagtcaattgccatggacaagtctcatcaacgcacaccatcttcaatgttttaggacatgacttaggttgcttgaagcaaaagcattgctttatcgcttgaagagacattgtttgttgcaggacttttctattcttaaaaacacttccaacaaacaaagtttcgcctgtggtgctgatttcaacctgtgtctcatcagctcaaaaattgagtaagtcatcgaacacaggagcagcatcgttaccgagattcgccaactcgccaccatgtaacttaggaaattcattatacacttggtaagcctcagctgcggtaactaccccattatcattttgtgtcccagttgaggaagctccaataccttcgatcacttcatccctggtgacttcgtctatacaaataagattggaatccctttgcccttcgcagcgtgtaccgtaacccaatggagagattgtttcttcgccaggtacactaagaccagtgtacgtacacgtttccaagagacgactgaattcccctgtatctccgctaggtacactaacacccgtgtacgtacacgtttccaataaacgactgaatttccctggatgttgagcagtctgttgagtgagactgacgtcttcctcaagatttccttgtacatattcttctactattacatcgttccacttgttgtaatcgtattcttcgccaataccttcactaccgtctgtggtaggatacagggtacttcccccaatagatccatccacaccaagataatcatcacacccatcatcatcttcgttgccctcctccaattcatccgcttctgttgtatcgtcttcaacatcggcttgctcctctgcatcctcattattttcatcaacatttgtagcactatcaaacacacggtcactttcagaaacttcaccatgagacctagagacagtattcccgaacgccttcactgtattattgaaagagacgaacaagttgagagaaagatacccaccacgaaccaaaaaaaacgtctcgagacccatctgactgtcaatgtatacaggagggcgtttagtatctatcagcactgacatttcacccggcatccagtagctaattatgggattgatctcggtggacttcaaactgaaagcctctcggagtgtacggacaaagtccgtgtacgtcatggtttcctgaacgcgtacacaacgaccaaagatgccttcctcaggttcaaatttccattctccttctttgcatttccactcaccgaccatggtaaatacgggaatatccataacccacctgcatcataaattcaggagacacacattaaatgcaactgaaaaatactatacatataaaaaacaaatggaatgtcgatactacacatttataaacctaaataccaattatcatttgactattttaaacaaacaaatatagattttgcaaatattctgataaaaaaatggagttcgaacacaatcaagatcctaatatgacataaaaaaaacttcttaaaagaacttcattacttacacgagcaatgctccaaacttggtacaaaaacaagatcaacacttcttcagcagcaatgtacgttcgcaataattctttgttcctgggttcatcttcttcatctcaacaaatttttttttaattattattaataatttttttaatattatttgatgtaatgatgattttgcattaattgtgacaatagtcacatctaaactttttgggggcattaaatgttgatgtcacttcggaataatctcacttgtaacggaaccgaatcgcgtcaacgtgaacaaaaaatcttcaactgaaccggaacagtgtacgtaactaaacctgctaaactaaaccgtacatttcaacagttgctaagagagaaacgcaagggcagaaacgtcattttgcaggcgaaaagacaaatggtgaaaaccacatttgactttgacaatccatggaaataaaacatggtcaacggatgtggcctgcaatttaccctattttctattcacagtaaaaaatgattataaagttattaaaatctatttaaacaaatatctagttgctctatataaaatatacataattatgtgcgaaaaacaatcaccgcactaagttagttttttttttttctttggcttttaagagaaaaatggaaattctcgtgtttaacaagaattaggagaaacaaaaaggaaattttgtgttgtgccttaaaaaaaaaaggaaactgaagtctgtgttactctacataatctaatctcctctaacaacaatcctaataaccaaacgaaaataaattcaggtggcttctcgcttttctctttcagaaaaacaaacgtttttttctttcgtagtttcgttcgagatgaagcaaattagtagcggtgaagtttggagatggaacaaggaagtagagatgaattcgataagagattgtttgaaacattgtagttccatcgctatcgacacagagtttcccggatgcttaaaggagactccgatggacgcgagtgaggaaattcgttacagagacatgaagttcaatgtggacaacacccatctcatccagttaggtttcacgctattcgacagaagaggattcgctaaaacctgggaaataaacttgtcagatttcgacgaacataagtgcttcaaaaacgataagtccattgcgtttctgaaaagcaatggtctcaatctggacaagatcagagaggaaggtattggaatcgatgaattctttagagacttttctcagattctcacggagaaggacggaaagataacttgggtgaattttcaaggctcttacgacaatgcttatctcgttaaaggcttaacgggagggaaaccgttaccggagactaaggaagagtttcacgagaccgtccagcagcttttgggaaagtttgtttttgacgtaaagaaaatcgctgaatcatgcagcggactaagtagccaattcggactacagagaatagctgatgtgttgcagatgaaacgtgttggaaaagctcatcacgctggctcagacagtgaattgacggctcgtgtcttcactaagttgactttcgatttgcttaatagtagaaagcagagtgtaagacgagttgatcatcagcaatttcaactagagcagcaacagcatcagcagtttatgatgactagatgttacatcccgataccgatgccgataccgagaccgagaccggtgatgtttgctgctcatcaccagaacccgtattttggtggtggttactttaggatgccggtccaaggaatgaactatgttttgtgatccctgaatgtttgtttaacatgacttgctctgctattatgtataatttctagttttatcagatgtttctttaaatactaaagattaactttcatcttttcttgtcgatcaaaacaattctcttaactctcatatgacacaatttctctttactggatacttttaatgaatctaaaaagttagaatacagtacaaataaatttaaatatcttagaatctactcaaagcctctaatcttatgttatgtagctaaagctgcgttcctgtcaacaaaattgaacaactctgtttgtgccgcttccattttcacacggaagtctacgcacatgagctataaaccacgcggtatttattaagttgccaacttggtcatttacaaaaagtcgaataggctgcaactacattctgcaaattttgtaaagggtgaaactacccagtaaaagaactgtgttcaaatagatttttattattttacttttacactttgacgtagttatctttagttacaaatttatggtcttcgccgaataaagagattcgttttggtcttacagtcgatcgttgtttattcggttcgcattgactcggaacgagtttaatcttcattttagtagtatgaactaaattctaattaactgacaaatatttcagttttactttataaacaatcaaaacccgactatagtaatacgagtttgtgaaaactatactcagaacaacgcacatggaaattcacagattgggaaagaagactgcccgaaacttgttttctcagtcgctccaattgtctttatcttcggctacttcatcttgcacctgcaaatagtcaaattttgatcaaaatgacataaacaagaagactcgtgtaacaattgatgtatgagaatttgaagtagtaatagaatatggttctgagttctgaccatttcatcttccactgttccgcctggtgaccacacaagtatttgtctatctgagccacttgtgtatagttcctatgagcaagtatgacaagtaactcggatttagaggtgtgttcaagcaaactttgcagacctacaaagtccaatgactcgtggaaaggttataaggattaagtcatacctgatcattggaattaaagcagcaagtgttcacgctttcgtagtgtccacgaagcatcagtgttgttctacccgaccacatgccaaaagccttatatacagttgcagcacaattcattaaataatccaggtaatggaatgagaagatatgctgatacaatagtaagttggtgactaccttcacagtcttcatgcatggaacaaataccagagctggatcatcgcttgtatctaattggattcctttgttagtctggatgcgtccagtttcaaagttcaccagggtgttgcgtccagattcaatatcccacaatcttattcttgaatccgaccctgaaacataatatgcaaatataatagtaattagactcttaactgctgtatggccacagatgtttaaggtagttatcatttattgcaatcacaaattaatatagttcacttgatgctagaacccctaagacatcacttccacttcgtagtgggtcattaccagccgaagatcatactcttgttatgaagttacagccctattaccctaacagtcagtgcctcatatgccacattaaaaacccaagtgtagtacacaagcaagctataatcaatgaacttcaaattcaggcataaaacatttgccgcaatccacacttgcaggttcattcaaaaagttgttcagacagaggaaaacataccaactaataaataggctgatgggagaaaaaaaattccaagcaaacacttagcacttagtaacttccaaaactcatgtacatgtggctcctgatctcataagttgaaaatactacttcgagggtcccaagggcatctactttgtatgctaatcatgataatgtcactagagaggtatgtaatataacatttaaccagcagatgctgcctataacagtttgtgacaaagttcaaataataacctaaagaacaaagaaattagccatgacaatatgaacttaccagcactaagaagatacatcccatcgttagttgcctttaagccagtaacagcaccataatgagccgtagcacgatctagagtagataacattccagggtgaattctcttctgtcgagacttttccactgaagctt

SEQ ID NO: 996 - DNA, 104163 bp, Arabidopsis thaliana
gaattctttgatgaacaactgatgtatgttggtcaaaaatttgagacaagaatactgataatatcatgtatgttcctcagtcctgaacatttggtcatttggatcatgtgttgtgtgttactgtgtttgacaatctgtattgttgttatggtaaataacggttgtgttgtatcacacactataacaggtttacgtttacctaaacatattaagttataattaatgggccacaggcccatattatataatgtagttgggttttgttgacttgaacggctccagtaaattaccggtctgatgattgattgacgaataaagcgaataaaccatcggttatacaatttaaccgggtttatgacaacttcagagaccttatatcagatttcaaatcttcttcttcttctccgcgacgacgacgagcttcttcgattgatgactgtaataatctttcaagtttaattgcatcgcataaagataaagcccaatcctttattcttctaaaaccctaatttagcgtttcgagaagccgcaaaattgagttttgttatttcaaaaaatcgaaacctaaaacctcaattctctgggaatttcaaattctcttttcagtgtaatcgtcgtctcttctcaattcgacctaccgagtaagtttatcttcttccatttaagttaaattttgactctttccagcatccatggtctcactgtgcttctctttccttcacctcttcattgggagctttgaatagcgttttaatctatgtttaatatagtaatgtcattgacactgtgaatgatgctgatggttgttcttgtatgtgcacatgaattgtatttctgcgtatcacttgcattactgacgttaatctagtttatcaatcaaattctaattcagtgattttattgacttgcaattctttgccaatgtattgttgaccattttctttcttgatccattcatgtgcacgtttaagaacatccttgtaaggtcatgctttgtgatttacctttcttctgttatgccttgtaagtaagtatagttttttttggtacttttgttcacaggctgtagtacgtttgctgctatcagaaagagataatcaagaagcagaaataaaatggagagtgatagtgagaacagcgagggagagagcagggaacataagaccactacttcagtggtaccaagaggtggccccatttatctgccaaacatggttggaaatatttctaccacccctgaattcaagtcttcatttctcaatgtactacaggatttggaaactcatttatctctggactctacttcttcttcttctcagcagtttgatgtctcgtatgtattcttgcatcaattggctctctttttcatcagttaaaatctggttttttcaatacattaagttatttaattgggatgatttttgtttgatgcagaattgattctctcaagatttatacggatgaggaactcacagagatggctatgaaggaagcctttccggtacgttgcctaatcgtttgttgatttacttctcttcttctgctgtctttcaagtgtgagaacttgtgtcttgatgagtttggtttcttatttcattacaggaagattacctttcccaagaggagctcgaaccatctttaaacgtttctcatcagtaagtatcattaccagcctttcgttatttcttgatataatgtttccccttgtgtgaatccttagtaaaaacgaattggcatgtagcttctttctattagtgtgcttcgatggttgttaagttttttgtttacagtctcaattggttctggttcagccgtgcagccgtgctagctcccaatatatttcgaaagtcttgtagacaatatatatgttaatagcttagtcatgattagaaatcttccagagacaaagtatggttgacgtagacaattgtagaacgataacaaacagttaccttctcggtatgctgcagtgaaaatccattagctgggagggcaaaaaggaagaggacagtaaagaataccgaggtaaagaagaggacactaaagaatactgaggtaatgaagatgacagaaaagaagactgaggtgagtttatgtaacatggtcttggcatggctgggaattactatcttttcttttccagaggctatttgtgtttaggatctcttgataccaaatttacatggtcttgccatgatggctttattgcattttgttatgattgatatggtcatttttttgtttttaggaagcttatcttgtgaaagtcgagcagcttgctaaactcaaacaaaagcaggaggaggataaagcagctgtgacactgcactgcttcaggtctgtaattactattgcatagtctggtttgctgtgtaccttgtctgttttatgctgatgtttcttcgatttgaacttgttttcagcaagaccagtgagactggtaaagatgtagttgcacctccagaaggttttgagcagatgcaatctcttaggttcatagataataattacacggcaagtgatttccccttgcaatgtctttttagtgttgattatgctagtccaagttctaaagtgctcatgcatcctgctaagtattatcttcttcctatttaaacagaagttgaagccatctgacatccagggacaagtggatccgctatttcctgaagtcattttgtgtgttgagatttataacagtcgcaaggttaaggtactgtattgttctgtaaatctttgatgcgggatatagaatattgactgaattctcgtacatactaacaatacttgtgtaaatttttgttcagacccaagaatttttggttctaggacgtcaaatgttgactgagttgaaggacaatattcactgtgctacagaccaggtgatgcaaaaggctggaaagtatgatccctctggatacttcctcatagaagtaagaattcatctcgtttctgtatcttttgatgtttaagtaagtttaacttctgcgtcgctggtttaatcagatgctttttgctcgtctaggatgtctttcacaatgatttaaggaatccctcggctaaagattacagctatcctattttagattggctttggaactcgaaagatgaagctcttaaaaaatgggaatgtgttttaaccggcgaattacagaaaaagcagaaactggttctaggtgaagcgaaatctgtggatttacctcgttacagaactgcagacatgcagagtacacacttctgtgatataagattcagagtcggagctagttatgtctattgtcatcaggtaaaatcttctctctttctcttttggttctttaatttctcatcttgtgaaaacatttggcacagactcgagatattcactgattaaaaaccgtggaacagggagattgcaagcacacgattgtgattcgagacatgaggatgagtcatccagaggacgttcagaacagagcagcttacccgatcatgttctggccgaaacgtaggattcagaaatgcggtgtttgtaagataaagagagcttcaaaggttgcagtggatgacaagtgggcaagcgagaacagtagctatttctgtgatgtttgttttgagcttctacactcagaggaaggcccacttaactgtgacttcccagtgtttgattatgtgcatgagtaaagatgatcttctttgttgcataatatatagataggaagaatacgaagaaatagttggcattgcaagaagaagacatgatgagtcttgtcttggtaaatttgttgcataattggatatatataaaagattttcttgaaatgatgacatgacaactatttctgaatttagccattgtcaaaagctctcttcgttttgaagcggtagaaaattagaaatgtttatgtttagccaaattcaaaagtagaggagattccttgaatttctgttttctctcgctgtcttctcaatattcaaaactcaaattggtgtcttctccaatttagaaaacgttaaaaacaagagaaaataaaactaaactttttagaaccaaaaaaaataaaaataaaacgcatttgggatttctcattgtcatcccaagttcttggaacagccaaatactttttcattattagtttataatcgtctcataaaggcaaaaaggtttatttcggaaataagatgggagcatatagagcagaagacgattatgattacctcttcaaggtggtcttaaccggagattccggcgtcgggaaatctaatttgttatctcgtttcaccagaaatgatttcagccacgactcacgtgcaaccatcggtgtcgaattcgccacacgaagcatccaatgcgatgataagatcgtcaaggctcaaatatgggataccgccggccaagaaaggtacttacactctaaaattactctcaaaagttatttaacgtttgcatgatgaccaaataaaattttaaaaaattaggtaccgagccatcacgagcgcttattaccgaggagctgttggtgcattgcttgtttatgacgtgacgcgccacgtgacattcgagaatgttgagagatggctaaaggagcttagggaccacacggacgcaaacattgtgatcatgctcgttggcaacaaagctgatcttcgtcaccttcgagccatctcaaccgaagaagctaaagcttttgcagagagggagaatacctttttcatggagacttctgcacttgaagctgtgaatgttgataatgctttcactgaagttctcactcagatttacagagttgttagcaagaaggctcttgaagctggagatgatccaaccactgctttgcctaaaggacagatgattaatgttggaggccgagatgatatctcagccgttaaaaaacctggttgctgctctgcatagacacacttctcacttttttcttgtacttttattactaaacactaacatttttcaatattttcctgcaaatttgtatacattcttggaattatcagacaaacaaagttcacactcaaaagtttttttagtttcggttccactctttacaatcgcttgcttcgtgctctctctgcttctaccgatcgatgtacttctgaatgttcatgaagatgttccattgttgacgcgctcctttttccccatctgcaaatagaggttaaaacagcctaatcagtttatatcatatgagcgtgaaatcttaaaaattgtacttcaaaatgtttctttcaactgtgagttttgtctagtaatgaaaaagctaaagccaacatggaagcagaagaagaagaattgcagattttgagtgcaacacaaacttaggaattatccaaacatacttggtacttgagaaatggaccttccatattctgatatttcatgctaatgtactgaaaccaattgcgaaaacagaggactatggaactcatttataatatcactttgtatggattctatatatgtgagtagcaaaatgaacctaaccatgaaccgtcttcgcttttttttctgcataaagttggataatattcagctcaaagaaaactagattctgatcttaatcatctataagtaaacaaaacagagtccatacagatttcgatatcttaggatcaagcaaagagtagttcaataagaaccaaggatctacataaagttataacaatcctaaaatgtcaatggcatactagagcaaattcaacaattttcttaatatcagttacactagaacaaagacgaacttcgttccaattccctaatcctaaactctcataatcaagaacaaatatcaaaccataacaattgagttactcagtttgaaaaaaacgaatctcaccagagaaaaaacgcagatacggaatcatttttcttcatcgcgaggcttagaactcgattgaagagaaggaagaggattagagcccttgatgatccaaccgagtccgaagaaaaaacctccagctagaatcgcagttccccaagcgtgtgagtaccatttactgtattgccgaatcgcgaatttccattgctcccttaacgtcgcctgatccggattcaccgactcaggcgggttataataccttttacccgaacccgatccgatctccggcgtcggttttttcgccgacgaagaagtattgttgttgttatcagggatttggctcttctccgccattgtcgtcgtctagattcttttcttcagatgttgaaaatcattttcagaaaatgtgtatttaactctaaagccactgacacgtgcaagataatgccacgtggcagtttctcgtactaaaacgattccgtttcattgtttcgtctacctctaaccccaccttagggttttagtactctctgtgatttttatctgttcgtcaatggcttccatttctactgcttcttcttcttcttcacttctcttcccttctcgaaatttcaaatcgattccattacttccacaacagagaagctctgtgtctttcgttcgctgtttttctaagaattcttcaacagaggaggacattctccgtttcgtggccgaatctgatgggaaggcacttccatgtgtgcggacgtacgagaataattcagctcggctcagtctcgttggtactgttgcttttgatcaggctttaaccgctgctgctgctgacggtggtgaagccgccgatgaccatcttcgtgagaatgttcctgttatggtggtcgagactgttttccccggaggatctgatcctaaggctactgtgtcaaccagattggtcagtttatgtaatccgtgttctaattttgattctacatttcagcaattgagttttgacatttgaaggtaacatttttttgaacagttcttgcctactaagaaagttaaagagcgagctaaaagattgcggcggtctctctctgaggatctttctagtggagacttgtcaaagaacatacttgcgatgacttttaggcaagttgttttgcggcagctgtggaacttccagctagtgttatttgcacctggagctgaaagagaaatgggagatttcgaaaaccctcgagaggttaacttcgctttgatgtgaatgtttctagtgatactggccttgcaagtgggaattgatactgataggttcagttttcttattcatttggtatcagcaggtttctacatccttcactcttagctcatcagatgaacgggttatatctgttattgcagaagttatatgcatctccgctcttcaaagcaccgagaagcatttcctcgatgattatctgggaaaagctaagtttccgtttatgaagtggttatctaaacgcaggaggattgcttcaagagactgctcggttgtcctgcataagttatttgatgatgagcagaataccaaacttttgcttgagtattaccagtcaaggaaggaaaatttcaaacttgcagacacaaagcaaagaagccggtggtgggacttatctgccaattccaagttggaaaaaattggtggccctggatttagtagttgggcaagtgaatatttacccgcatatcgactggaaatggatagtacaatacttgcagacttaaagcttgagggctggagaaagtccagtgagaataagtgggaagttcttctaactcactcccaaatggtatgacgttttctctttatttatgtaacctacccgtctatgcttttgctgtgtgtaagactagaaattgcaatgttgctctcgctctatatatttgtctggctagcagtctaggttgttgctgctatatgataacatggagctatgttatattgttctgtttagtatagataaagacgtcgaatgttgttcaaagtttatggatagaccgtctttagacaatgttgaatccgtcataagagttgtcattcccatttacctatacacttaacgagatgctgatatgttgtgtgggaatgaacctagcaagatgaaagaatattatcaatcatgggaataaaatttcctgtactgctgcattttgtgtgctctgtggtgactaaggtgtctgtttttgtgcatgttatttcttgaggcctctacattcctgagacttgtataaaactcttaggttggattagctgaagcattggatatttactttgaagacacatattcacttcccaggaaacagctaccatgtgatgttcctggaaattatgcaaacttacccaatgaaaaggtaatgactactggactgctaaaatttagccaatctttctgatattatactttggtgtctgttattgtgtatgtaatcagaaccaattgccagtccttgctatattactgtctgtatataatccgtattctccatgataatcacttgctctgtctaattgtgtgcttcattacagctgcctgatgaaatatgttaaatatatttgtagtctgcagaatatattaatgtttactattagagtttttaccattattttggagacatgttatgagttaataagattggcttctttggtagctttttacctgtcaaacttatgttcacttctttggtttgctcattctctattgacagaaaggattgtctttgttgaaattcatatctgtcaccatggccagtggaatttttcttcttgctgtgagtgctgcagcccaattctgtcttcctcagaaaagcgagaggaagtatcccggaaaacgccaagagattttatggtcagagagtgaattgttatctcatcaatcttcagattcctctgaggtatggattaccaaaacacgttgtattcatatagatgtgtacgacaacaattgcacgtagacattaatagcttttcaggacagctctagttcatttgatgatcacataagattaagtactggtgcagcctttttttgtaaatcccttgccatgaataagttaacccatccaaaaagtaaagacaatccaagacctatatatatttcatgtctaatgttatttggttaataatttttgcatgagtatggactctctatactgagaatgagagaatgagatcaaccttttattattttttgtggtgctttttcctgtttttctcggaaactaaattctgaaacctcaaatgagcagttggattcattctgcggattactcgtcaacaagctcaaggatgcctacagctgggtaggggagatcacactagaaagcagcataggtgcctggataggggaagtacctgactacttgaaagaaaccagcagagctaagtctgttgaagatcacattgttacaagctcgtctcttctggaaatactcaatgaagacgcaaaggcatctgcgcaagatatcgctacttaccaggtaattccagtgaattatgatgaattgaattcttttaagtggactactacttcatcttcgtctggttctttaatggaagcaggtagttttatcatccgaaggtaaaatcatagggttccaaccgacaagccgggtggctgtgaatcactgggctgctaatcctttagctagagaactttatggaggaaaaaaactcaagcctggtaacacaccatggttcttctttcaattccttaaattcaatgctattcgtatccttttaagtttatctgattatgtgttgtgtcattctttgctttgcagggctgattgagcctggtcttaagagtcaccctcccaaaaaagtagttgtgttggaattattaatgtctgtgaattcagatcgtccttttgcattggtcagaccattattgccacaataagcatagcgaagttcctgtctctctttagatgaattttagtacaatatatgtagaatatgatttgattgattgcttgtaacacttggcgtctatgatatgcaaatatcttaagaagagtgagaacgtgattacatgattcttgaaacgatgcttaagattttgaagctctgcagagaatttttattaacaaaaccccaaatctgaaacatagactaagtaagagcaatgatctcattgaacaaggtcctgattctataagaacaacactgatactcaaaaccgtatttccccatcggttacataatttgtcatctgcattatatcgcagaagagagtcgaaaatgcatcaaaatatataaaccggaatgtcagtaaatatgtcttcacctccatagactgaatcttaaaaagcagtctccttcgtcacatttactattcctaactccaggacagtcttcagcatccacttcttgttatatatacataatctccatagatagacagagaactattatataagagaaaaaaaagatacgagtcatgaaaatccattactttgccctacgatatgtagaagcttcttctgctgctgcctaattaaatggtaagcaaacagctttttaaacctgagtttttccacattcgtctcaggggatataatagtcgcttagatttccgaccagatagttaaactcttcacctactccatagtcatttgcctgctctactgtgttctgaacattcccggtggcgacttttgtgctcacttttggtcttcctttgatgcagcgtttgttgttgttggtggtgttagtggtattgttttctggagggaactcagctgtgagtcttcccatctgcttctgcagatcagccactgagtcgtttgagactttgccttttgaagtcttcttcccgtcaacaagcttgagctcgagcctgtacaaggcacaagcatcacacttgttgatctcatattcgtaaagatgccattcgaaatggtgcagaggctgtggatccatgtagtaagatctcttcagccctccaaactcgaccatgatctgtttacgtgactcgtgccaaccacgaccattgtagtctggtaaagatctttgctttctgttcccgctctcaaaggccctccttggcttgtcaaagaatagccactcccttagtgtctcactctccagaaccgtgagatcaaagagctctacagtcatcaagatttgagtatgatcagctcaagaatggtgatcaattaacatacttgtgaatgaattccaagagagtaaagcctacctggagcattccatggagatttagcagttgcagctccttcacattcgggaataccaacatctttccctccagcctttgcactaagagcagcaaaaagcagaccgtcttttaggccgatacctccaggacgcaccaccggattcatacctggtggcccttcattgaaagccagtgcagcgtggaagctgctgcagtaatcctggaaccaatcaaatccctgagctggcctagggcaatcccaaagagcacattttggacccaagaatgcagagggtggaggacaaatagtcgggataaaattagagatatgtataggaccctctactacaccataactgggacaattgttgaaaccaccattgaagtttggttcaaactcttgttgcagatcatactgctgatgatactccaaaggagccgttccatcgaaattgttaccagctgctaaggacaaatctttgcaattatcaaccaatggtaatccatgttctgacttcccctgaaccaaattgtatccctgaaaactttcaccacgatctcagtatttaaacaaaataatggactccaaacacaactaaagcaccattaaaaactggttctaaagagcaactcaccctttggaagacagcagctttgccagcttcgagattctgatcagcaggctcgggcttgggggcagctaatttgctggtagcatcatcttcctcatcacagagctgcagcagccgacaaatatctgatgagaaagaccccagagtaccaccctgcttaagcaaaacaaaatgacacagctaacaatgactgaaacaacaaagaaaactaaatcacccatgcaagtcagaagaaacaacaagattgcaaatttgaaacaaacgaaagcatacttgttgcaaggatgaagctggagaaggctcattgagctcagatttccactcacgaagcatctgattcacttgctcctcaagaagagtaacatcagtaggcctactctctttcctcgcaaactgaagatccaaaagcatgccttgcaaatcatcaacacggttcttagccttatccttgaagagcttgtgagaagcagatctgcaattagtctttgatcgcttccccgtcataagaaatctcacctccccaccacaaaaacacaagattctctgtacaaaaccaaaaacacattcaaaatacacacttcacatcagttctgctcctataacaaacatgatcactcatgaatcattggtacatgcttagattacataaacaaaaccaaaacatttacagtaaatcaaaacccaaaatcgatgaagcaacaaaagccctagatgatctcgaacgaagtagctaaacgaagattaaaaggatcataagttttagggatcgtcatttttttacctaattgtcgaactaaacaagcagcaaaaaacaggttacgaacacgaaattgaatcatgcacagagttaaaaagaacaacagatcgaagtaacaagaacaaatcgattctgaagcaaaaagcgacgcgagattttggagtttgaaggaacccagaaaatcaaacttacactgtagctgcagcaaaagcagcaaataacaaaggcaaagagaaaaatctccggaaaataaaaagaagagtaatgaagaaatggagagagtaaaaattatgaataaataaaaagagagagattatgaagaaaaaaaaacacaaaggaaataaagaaacgttgctggattctcttcttctcttcaccctccacttttctttttccttttttatgagctaaattcaatgtactaatttatgagaaaatataaaaatttaaaaattatcaaattgtggggaaatgtttaaggaatttaatgattattttggaaaaaaatgccatttggactgtttattatggattcttttctttttattgttcattttttctctttatagcatttatttatattaagaaatattaaatgagcatttaaaatttactatttgttgtgtaaataatcttttttttttgttttgttttctaaactaaccagagttcaattatgttttttttttttttttgttgcacatatgctttagaaaattaggcattttcttcaatgctattggctccatacactacttgctccttatttgaggaaatttaaatactatttgagttagaaatttaagtttttctttagactatgtaatacattagggaagtcgccaagaatttttccaaaatcagagtttgggtcacacgatttgtaagatataatataaccatgcgaatatgcgatgatagaattcaagataggctaaagctaagcaaattttatacatacgagaaaattaaaacaaataccaaacaaaaaagtgtaaaaaaaggctttgaaattaaaactaccatccattttagggatggaacatttgcaaatattagaaaatgttaagactaatgtagtaacgctaaaatttgtgacattgtatgatcatcgggtttagtccaagttaatgtgtatggaggggagtggtttgcaactttgcgtagctgtacttgtagtcgtaggaaaaaaaaactaaaaaacgattcatgataacatttctttcgagaatgtatattttgttgataaattgacatagactttatgatagcatcgtagtagaaccacgttaaagattttgattcaacggctaattagtgctcaagtctacgactacatgtaacgtaatttgataataaaaaaggaatattggaaatgtaacgtattatattttcaagataagtcaattagattgataaccgtaattttggttgcgcttgacaattggtcatttcttaaaataatttggacccatttgttttcttatatcctttcaatgagttttaacaatgagattgtttgtacctaatgtaaatttgcattacttttggaggaaaaaacaaacaagcataacaaaggaatcttgggtaaagaatttggacaagtgtcgtgaatactaagttattattattttcttttaagatacaagaaggtgtaaaagaaggagatattggcaaggaaggaatataacttagcttttctccactatgttttccatattcctatcttgtgatgctcatcaattttcatcataccatctactttcaatttcttcaatggtcatattctatcgttctttatctattattgcttattattctcatttcaaatacataatgttcgtcgtatgaactctaaaaaaatattcaaattcaacttttaactaggttataagaaataatatctccactaattttaaacaaccaattcttgactgagtacgattatatattaatcacagttaaacagccaattattgacaatattttctttgagtatgcaccttacatcttatatatccctggttggaatatagatcggtccaccactacactttatctttgatccggaccaaattagtgacagtggagaagtttttttccttctttttcttttctttaaggtctccaaggtgaattcaatgtcaccataatagatttctatatcatatgtgacaaaacatccaactcaaattcaaaataagctagggataagagtggctcaactagatgatgcttaacgtcgagcccatactttaatggtagaagaaagcatgtatcccatgttggaaaaaacgaacaaaatgatgtttatcaaattgttacactctcgaggttaaattatctacgaaaattgtatgcttcgaagaacatcaccataacgatttaaccgtctggtaaattcgaaaatttgtcccgaataaatatacttaactacttattactaatgtgtgtaaattttttattcttaaatctctcaaatgggataaatttagactatgatcattccatgattttagatcaatataatttattgttgtgcattggtgtaaatttagaattccaaaactattttatttagattttgttttaactataacgtctggtaaatgtatcacttttttaatattaaatagtaagataaaatcatttaactctttgtatgatttaaattcgagttattataaacgaagtgtactaagctaattcataaattactttagctgaaggagttagcccattttgattaccacaatctcctaagattatatcacacaacataaacttctactagctcatcataagtagcatgcgtttttataaatcgatgtgttgtctttttcctttttgatcgtcgttatgagaaaacatgatatgcttttatggaatttctaagcatttgcccaaatgattgttccccctataatatattccctttctctacctccaacagctattctcacttttttctttactaacttttttctctcattctagtattcagactcttggtggaataaacctaacgacatacccataggttcctttcgtctccaatttaaaatgaaatcgttttgtgataaagacattattcttttgtaagagttgatcgccttttaccacaaaaccaaactagttgtcgctatagttttgaccttattagatcatggataaatatgatgtacattttgtaatctggagaaagaagtaatttggtacatctcaatgtctctttcataatgaattcgtcattatccaacattacctaaaatcgagccattggtctcaaaagaccaaatctaagcaacaaatgttgaaaagacaaaacctcaacatcaaaactttttttatttgtcacctaatttgataatttaaaagcagattgtttttgatgatggatggtacatgtatatagaggagagaatcagaaactcctcaactcttgtgaaaaagaatcattaccgtattgttaactttggtttgaatcttctagattgaataagatgatgatgatgatgattcaactggatttgtctggtttcccactagcggtagtaccaggctgtggttttaactggaaaataccgctcagtcctcgtgccttagcaagttgttcaagctcctctagcttgctcttgagatctgccacttgcttttctagttcttcatcttttattctcaactcctgtaaaaccatgagattcacaaatctcaacctaatcaataatcaaacctcaacatgatatttctgagtagtctatctcgttagaacaagcacacaagtttgctcggttcttaactaatgaaatgctttcttatttagttgttactgcagatttcaagttaatgtgagcatacattgaatatgttgataattgttttccatctatggcgcaagaagtaaccatatttataaagctcctttaaataagacggatatctcacgacttcaaggaatgagaaccaattctacaggctgcaacttttaggaagtcttgagttgggaatctgaaaacactaccaccatttccttaaaaccatttatctaagcgagtttatattaagttcttcctgagcatgatatctgctaatttcatgaatttatatgcaacccactctctattaactaacagtgtcagtatgtaacaatgctaaatcctgaacagcacatgggagtctacacttaatgaggcaacaaattatcttccaagagtattctgtgtacctctagttcttgcttacgtgcttcctcttttcttgcttctgaccgcgaacttctctgcacctcaaaaacaacaacagctccaccgacctgcacatataatctattagttctacagaacaatttagaattgtatacaagaatgacactcagaccagctattttttttaatttatctgactttgacaccatgcaagatatccactaaattgatatgggaaatacggaagaaactagaaatcttaatttattagcataggttgtgctatcagacaaacaagagcaagaaataatcaatcatatggtacatttcccttaaattttagtattttgtatacaaaaactcaacagttatatctccaatcctaggtctaactcatatgagcttagtattttactccaaagcctagtattttggatagtaactcaacaaaatacaccaacaaatagctgaaacaacactagagtctgattggatagcatcagaagctatgattgagtagaaccaaatcattccatgaaaagagctgtttagttttctttctctgcatgttttgcttctcctaaacatcttaaacaggtctttctcaaggccacattaatccatttatcaccaattggtgagaatgcaactaaccattgataagctagaacgagtaaatgaaggtagttccaaattcatctaaaacaatagaattcactgcctaaagaatgttgagtaaagagtgttaccccaaagagaaagatctctccaatgaggtcaacagcagcttgaacagccttttcctcatctaagggacgaatctctacatcagtggcatgaccatatatccttctttgcatttgcgtagtgattcgatgattcctctggtcacataaatccaacaacacatcaaatttcaagatcacaaaactagcaaaaatctcaactattaacctaaccacgcctttttctgtaacaaaacctatattccggaagttccaaaaactcagcagaatcgaaaacgcaagacatattataggcgcaacgaatctcaaaagcgagtttagaatcagagaggatcccaatttacctgagcgaagttgatgatagattgacgaaacttgggatgaaccttagcttggtgcttgagctgactagccaatggtttacttatggttttgacggcgagtgtgcccagtttcatcaacggcaacaccattattcttccaaaaaacttagaagaatctcacttgaatcggactgcgagggatatggagctaaattaggtgagaacagaaacctccattgggaatttgggatcaatcgaggtttatcgaatttttcgtggatccgattggtgaagaggaagaagaaagagagaagttgagtcgttttgtttgggtcgtctttttacaactttattttatttgtggaatagacccctctattttgtttgttcttctttgtcaagttcaatttctttaatctaatttaaaagacccaattttggcggtttctgtgcatatgtgataataatgttctttttgtaagtatttttcttagatatatagaatagattattacatgtaacaaacaaagagcaacaaatattatgagtttaatcaaaaagaaatggaacaagtgaaagagagagcaaaaggatacgagaaaaagataacacctaaacaaaagtcaaagtgaccgagagcatcgagcaccattgaaaatgaagaaacatcccaacaaactagcattgcacaatttgaaaaaaaaagttttatccgccactatgcacttggtatctaccctcctagtgatttagaagagcttcaaaaatgtgcagaaactaagaacatgcatcactgttatggattaacgatcgaaaaggctttactccataccaaaacatatggaattcccagagaattggttagggtgtttgattgcagagatcacaagtctggatgcgctgaggatcctttcatgaagaaaagaattctaaaacatgtccgaagaatcaacacaatagaaaaagttttgcaagagttacatctgatagaagccgacatacttcattactaatgaatgggtgaacaaggaaaatttatttactataatctcgccgaatcacggattcctaaccctattttcgtaggatatcactctgtagtcatagtgagtcttgacataattgatgatgaacttataacaaatgcttatttatatataagatttaaataaagggaccttctagattaatttagcgtgcttctcgaagttttggtacatccacaagcaaatgaacacatttctcgttatgtattcatattgttgaatattttcttccaatcttgtgaaatgagattaagtgaatcagacttattgggggttttatgcatggtgcattgatgtcttaaaaacaacaacaaataagatatatattttcaaaaaatgtacaaaaaaaacaagaatcaagaatttctaattaaaattgatttgagtaaacttttacttctaagaaattcacaaatgagagcaagatttggaggcgcatacgttgacgacaaaaaagacttagcaagaaactatgacaacaaattagggaatatgatatttttgatcttcgatatatacatgaataattagaagaaaaaaatatctgcgaaatagtagataaaaaggttgaccaaattttctgtataatttatttatttttaaaaaacaatttggttgaatagattgaatgagttttctaacttgttcatgttaaatgacaaaaaaaaaaaaaaaaaaagatgaatgatcatttccactctttcaacttcttattttgagacaaccatttgtactccaatgctagaatttattttgacaagttatgttgaactactttttctagtaatttttcaaattaaagttcatttgaatgagaaatgaatgtccaaagttgatttgtttgaaaaaacatacattgaacacatggaaaaaagtctcatattgaaaacatggagaaatgtttgtgtctaggctcaaagacttgagaccaaaatgttgtaaagaaagaaagcatatccatactcaactaggttaggttctgatttgagtttgagtaatgggctggatgcttaatggagtagtttatctttttagctcgtatttgttttgaaacttttaattgatttagtcaaagcaacaaacaaatatccagtgccggctctagggggtgccagaggagctaaagcacagagtcatcaattttattccaattttacttaagattttaggtccaaaaatctatatatacatttttgcagccactttgtgaaataaatcctagagttgagatttatttacagcggctgccattgacatttaataattgtttttgataattagaaagaaaatattctaattaaatatttgacatttaacaatctttccaaaatctctctaccttaactacactattaattactaaaataaaatttctaaaatatttaatatcatttaattactacaaaattatcatttttgatattttttctgcatgattataatcatcaaaccgtatagatatttgatagcatttaattactacaaaattacaaaatatttagacaataatttataaacatatcataaataagatcaacattaataaaataaatgagtcttttttagaggacgggttggcgagacgggtttggcaggacgttacttaataaaaattgtaaactatacaataaaaacattttataaatagatacaatttacaaacttttatatatattaatttaaaaaataaattgtttccgcggtataccgcgggttaaaatctagtctctgtaattaaaaacagtattaactaaagccaatttttataaatcagcacaaggtcttcaaaaagtttgagccggctctgatcttttcggtaatgaccattaatataacacttaattcacgtctccatgaatgctcattttagtgtagatatgttttgcttttgcaaataaaaggttgatgagagagtttgttcctacacacacaatttcattcattcacatacaaaacaaaataaatccattcatgtctctttttttattgcatcaaacagtcacactaaagaattaaagaaagatcttcccacctccgctcaaaccgtcaattgtttatcaactaattcaattgattgttgtaccttactttttggattttatgcaactattcaattctactgcatagtagaaatcatcatggaacgcagatgatatgagcaaacataattagcaagtcaatttaatatattattcttaatgaaaaaatcatttgtcccctcataatgaaatgaaagaattaaaatcgtaccaaatattcaatatgacctatttctttccatgtaaattcatctcaaaatagttgtttactaaatggctttggagaaaataaattaataaatgaactaatcatactaggatctagcaacaagtttataatgtatcaccgatttgacgaactttatgctgttcaaattaacttcactttgtgagtcaaaactcaaaaggttgaaagagtttttatgagtttatcttgttttgagatcacacatgcacagttcaaaattagatgtgggattggatatgagaagaaaaaacagacaaccttatgtaaatattccttttgtattctaacacaaacatgataatgtaagacattaaactcccatctataagatcccgcggctctgttcttgatgtttctgatctctactgatattttactattgttaattcctctaacaaattcgcctaaacagttcaaatagcacaagatagcttaagcttattatctgatcaacatcttcaaatggatcttgtcattacgctgacacagacatggctaaacacctagcataagcgagatcgtttttgagaactctcgactttttcttcactctggcgagtcttagaacgctgctcggtatctttaccactccaaaacttaccaaggagagtcaagtatcctgaatcatcgatgactcttctaatgatagctttgcgttcaacatgctcaccaatctcaacaagacgtggggacttgggcaagcccgtaaaagttatatagacatgtgcccttctggcattgagtctcttatccaggggcttctcattttcttcctcagtttcaatcaccactttcagaatctgaacctgaggcagaccagtctgcgctacctgcaccaacagcagttttggtgttaatagttattaccaaaagtcatggtatgtcattatgcaaaagaaaaaagacaaaaaataaacttacaccaaacattcctctatcagttgctaaaatcaaaagttccaaataaagagaaatccaatcagtggcttgccactctgatttctctagctgcaaaagcaagaaaaacttatcactacttaaatgatgacgagcaaaacaaaacggatgatgtgtcttagtaataataatcttacctcgtaaaatcggtttctatcatgacgcaaagcatcatctgagggccaatcaggcaatggaccttggaagacaccatctgacactgcgctacaacaaaagtgaggtacgaagggctccttggtggtctccgccgctatgaaacattattaatcagcaagtgagatttgattttatactcttgacttgtattaatataaaaatgaacaatgcagcacaagtcaccttcattttgatcttttttaagcctagcaatagcgactgtcaaatccaaagtgtcatattttcgttcatcaactcgaacctgaaaggttttctgcaaaggaatagctcctggctcgtttgcaagcaaagtaatgtagtacgaagacgtaaggttcattgtcttgttgaatttctgtagggcatcgagctcgaaacttgtcccctaacagatgaaaagagaaaattaattggatgtggtacaggacatgtttatgaagcaccaagagagagagagagagagagagagagagagagagagagagagagagagagagagagagagagagagagagagagagaggagactatatatatagttttaaaatataattacctgcaaaatattgaaacgatgaagccccaacaaagcatatcgcttgaccaagagagggtcaggataacgacgaccagattgacagtcgtagtgaaacagtccagtaagcactactggacttcgaatatcctcggaatcaaaaccctaattaagatacatcagcaatgtaaaaaatcagttagcaatctctaaaagcgagagaaaccctaatgcaataaaatattcagttagcaatcccataaacaacactagaacctatcgagtttctacaagctattaagaaataagaactaggatcagggttagggtttaataattatgtcagttcaacatgtatcacaatcatggaaattctctaaacaagaagaagaagataaaagaattacatcggattccgccactccacgccagtactccctcacatgacgggcatattcctcccccgtaaaacacagagcatcctccgtcgacatattctcctgcgcctccttgtgtgtatctgacctgtgcgtttttttcttttttgaaatcgattgaaatcgatccagcccttatatcccagccgacggattcttttatgggcttacgttgggccttatcagcccaaatctcttcttattaatgatacaatgactcattattcattttacaatctaaagcgttgtcattttgcacacaaaaaaaaaaaaaaagcgttgtcataagagtttaacgatagtatcagaaagattcaacaataaatcagttattcaactaattatatccggcaatgattcttccggagatcatgcttatagtgagtgagtcctttggattcgttgatgatcgatcagttgaagcatttgccttcaattatgaactattaagggtggtcttttgagcagtagccgggtttgttgccacaaattgttagatttttgccggttctttatttttggagtcattttgttgtctttagatgtttcttatggagtctgctttcggaatttttttttcgttacagaactgaagaagcaaaggagacattgcggaaacttaaagaaggcataataaaggtgtattctatagggaagtttttgacggcttacttttgatgagactgatttgtattgtttaaggaacttagccatgggatcaagctatgaaagtatttaatttcaggttctctagagatcacacagccaaagttcaaaattatatgtgggattggataggagaagaaaaaacagacaaccttatgtaaatattccatttgtttcaccacaaacatgataatgtaagacattaaactcccatctataagatcccgcggctctgttctttaggtcaagaagacaagaacgaataggatgatgaacaagacgagcaagaaacatatcatcatcatttgaccttttgctccagctttcttcattaccattcccacttttttctgtcacaataccattttcattctttcagtttttactttctgcaatcaaaccagcaacaagacctttaaggggtttacctgaacaaattcaagacggttctttgtgctgtccatctccgtatccaattcatctattattctctcctgaacacacacaataacaaaaacttgatgtttctgatctctactgatacgtcctactgttaaatcatcttcccatattactaacctgtgcaacgagttcgtcgtgtatagtgagccccactcctccaattctctgtacacttttactaagctcatccaattcttcgtcttgttgcctgaagtgaaaaaaatgatgttaagttatggcactactctgtttttgaacaacactatgctacaatcttcagtctaaaatcgttataaactcagaagcaaagaaaagactgcaaaacaatgtagaacacacagagagagctttactttatcaacagcatttgcctatctgattctgactgtacaaaaccatcatcgtctctccctccatactgatcatatctacttgcttcacccgagtttggcattctcattagttctctacgcacttcacttgcatgacctgctccagaactaacctttccagctaaaacaccagacttcacattccgcacctataaaaaaaatcgtaatcgtcttgcacaagtcaactaacaacaaatttatgccactatgtaaagcagtattcataacaaacttagagaacatacctgtgtcctagcattactagtccatctcctccgtttttcaagctcagcttcatcaatgccataccatgaaggatcttttgctgcaacagtaatcgctttttccagctcatctaccttcctatcagtaaaaacagcttcaatagccatgaaaggactcgaatatattcaattggaatttctaatcatgtaaataagggccaatacattcctacaagatccatttacaaacacaaatcctattccacaccagctaaattatatataaagacgagattaatagaaccgtgactaaatacgagtacctgccactcaatgcttccacaagtagcaacaagctccttcgccacatgtgcttgatcacccatgtcgggagagatacgctcccatttgtggaatgtagattgcaacttatcaatctaacaaagcatcatccatcaatcactgtacttcaaaatctaaacaaaaaaacatctctggcaatttctgaacaacttacagaatcctgaatctcttctttaacaatgtagaatggatcttgagctgaagacatcccgaaatcaacaaaattttgctaccctatacaccaaataacacagctgattaagctatagaaacaagttcttatgcaaagttagttacagaaacagaattttgaaatttcatctcattggcagggattgttctggagatgcgcaaattctacgattgcaaaattagagttcctaagtcacaatgatcaaactcgacaaaactattagatccagagaaattccgattaaatcctggctaatctagggttagaattttattcaatagaaccggaacggctttatcaatctatgtgctttaagatcgacacaaacattggagaaaaagcttgcgtttagagacgataacgacaaggatcaatgcgaaaggagaattgatgtaagaggaaaattgaagaagcttccttacctgtgaaggaattaatcgaaaggtgacgcgacggagaacaaacgacggtgaagtaaaagagattccggcgtgagattcgtctctcttacatagcaaaacgcatcacctgcggttggctttgagattcgctgaaagtttatttttgggctactggagaatcttataaagcccaataagagaccacagagcccaataagttattacaaatctacgacagtattaataaagaccattttctacgttacaaaattttgattattaactgttatagaaaatggttatattgaaacgcatatttggcatttgttatagaagaaagaaaccactcttgctgagtttttgttggttaaagcgtgacctaagtctgtctattgagaagattcatagtccatgaaaaatccgatgctactataaatgattgtttactaatcctagaaaccaaaaacaaataattgttttctcaattcaaaaattgtatggtaaaattttagggtttacacatttaagattttaagtgttatagatttccggtgcacagaagaatggtatatattgtgagtttgtgattagttttgttatgcaaacttctcacgttaggcaactgtaaatataatatctccaacaaagcggtcatgcaatttgttttgttgaaaatttgtatattttactagcggtcatgaatttttaaatcccccacactctattttttaaaatatttttaacgttttgggaccatgatggatgttgaactttcatttcaggatttggtggaacgataaaattggaaaggctttggagtttggaacctgaagaacttataaagttaaaggatgacacgtgactttaataaagaaatgcaattcccataatcatataatagtccaaatttaggaagaaatgggtgacatgagttttaaagaagaaagacgtcatgattccattaaaacaaaccaaattagttggtggcttggtgctgacgtctaccgacttttccaccgtccatccttcgacgatggttctttctaaatgaccttctcagttttttcctgtcatgcgtattattattattagttaataaggctccactactactcggaaagtccgagtacaaataatatgacaataatgtcaaacttattcttagtattggtttaaaagaaggattcaacaagagtacttaatcacgtctcataattaccactttcatccaaacatggtcattactatatgacatgatcgtgttacattaatttggaaagtagtatatgtctttttcctaaaagtttatgtttagatttttgatcactaagaatataatgtcatatatattattaacctttacacctaaatgttatattaattacttgaatgataaaacggaaaatatcgaaagtttaggctaggtctctctagcatctctagtgtatttatttagcaatcccaaaacaaaattgtgttttctacaattttagtattagattaccaaaattgttgtatatagtctggtgattccgttttgatggtcgagatcgaaagaagcaagcatccactatgtggtcgtcacatgcgaatatttctaagtatacaaccatctatcgaaagtttcgaaacaacccaaatataatagtaataaattctgagaattctcctattttttattgatatgaaaaaagcagtaaaatattatgtaaagtagagaggaaccaaaattaaaacgtgcagatttattaaaagaataaagtgggatccaaaaagtcagcgtgaaacatgtgatacgatataacgacacggtcctatgactaagtccactccaatccagtgacgtaaacagcaccatcacccatagcttcctgtgacgcacatccttacgtaaccatcgttgacgctagactttcctctctgatctctctttcttcatgtatatataacaaaaccttcctttcctaattggtatctatctttaaaaacatacttgaaaatgcaaggaacgatttcttgtgcaagaaattataacatgacgacaaccgtcggggaatctctgcggccgctatcgcttaaaacgcagggaaacggcgagagagttcggatggtggtggaggagaacgcggtgattgtgattggacggagaggatgttgcatgtgtcatgtggtgaggaggctgcttcttggacttggagtgaatccggcggtccttgagattgatgaggagagggaagatgaagttttgagtgagttggagaatattggagttcaaggcggcggaggtacggtgaagttaccggcggtttatgtaggagggaggttgtttggagggttagatagggttatggctactcatatctccggtgagttagttccaattcttaaggaagttggggctctgtggttgtgattgtaaattaataatttaaaattatttttttttcttttaattaagaatcttgattggtaattgttgtttacggtttataattgaatcgtttcatatatatgtatataaagaaataaataaaagaaaagtctcaagttgaaatttgctagagattgtacccaataattttatagcattcattgtgctctgttttgatagtactcgtttttttttgtcatcagattttatatagattcatttttttttttatggtattcatgttttgatggtactcattgtatcattcgttttaggcatctactcttctaagtgagatagaaattaatggatctgtttgtttaaaagatttatcaaccttttgtgaaacggaaagaatttattactgtgttagactgttaggtgatagtgatttaaatgtgaccttaatgctcttgtttggggtacgtggtagtttatcagatttgaatattcacaaatgccaaaatatgagagatcctttagattgaggtgaaaaatgtgggagggatggaagatatcactccaattggtatgtttccactatgatgcacaaagtggagacggcgcggcaaaaagtggagaccaatgaaacgttaacctttagagctggaagcattttactgctggcccgagccataaacggcaaagagcatagaaccctcaattacagacaccacccaagtcacatgcaagcggttcttcgaacttaaccatgagctttatcagaacggaactacaaaaacccgagtatacgatagtggtagttcactctaacaagcgcatttcccgcggtcagctagcacaaaacaagatatcaacgatacacaataacgctaatcgaccctatggtcttactagctcctccaaaacaccggaagaacgaaacacggttcgaaacaacaattggaaatgactacagaatccttactaagggcctttcatatcttctatacagcacacgattaatctcactgttcacgtgagaattggttttgccacgcccaaattcatcactgctccacatttattgggtcttttgttcttcttggtataagcaaatgctaaagatcaatcgtgaaaataaaatgaaattaaggttaatttccaaattcaagagaaaaaatcaacaaaattttagaactcaacttgaaataaaaatttgactaaggttgtttacactaaacaaacattataataatgtaggacggaaattattattaaggctgtttacacaataaaaatttgaacgtgtaggaatcttaattagctagctaattttttttctaagattttagagaacaaaatttttatacagaaaataagtcactatcgattatctgcatactcagcaaatcggatttaaatccatatacatgcgttactaacaaaaaaagtactaaaccaagagttccggtttccaaagtcctattttatccatttttaatttcattattacttgaaatatttgttacaataattgaaagacgagctattacagtattgttttgacatattttatctagaagaatagaaatataaacaaatatcagtcatgtctcgaggttaaagttacgcccccaatttaataataaaaaaggttaaaacctaaaatctcccaaaagctttgaggtagattactatgatagttacccaacacctacacacaaagaatatgtgctctctcattcttttcctcatctttactccaacaaagcacctccatttatatatattatatatgttatgttctattgattcttcatgaagctttctttacccttacttgcatcacaagtaaaactaagaaacgaacatgacccatcgccttcacgaactaccaactctcgaatcacctgcgtcgtctcttcacttttaccaccatgctcatacccgaaaccggcctgaatattttcataactaaaccggtttaggtttacgagatttttcggtttaggttccatcgaaccgcattgcctaggctgtgtttggtagaagactttagagaggactggttcaccgtctttttcgtcctcgctgctacctaaatgatactgatgcatcacccaattcgtcttctcaggcttcttctggcgaccatagttggtgtagagcactaggatcttcttgaaaccggtttctcctgattgagacaaaacaggtcgagtcttgcctgttttgtgccaccttgtttcatggccttcctcatctgtgctcacttttcttcgttttcgtgttccggtcgtataagcctttgatggccggtggaagaagtgccgtacttgcccgtccttgcttactcctacttgggacaagatgtacttaagttaagcatatgttgatctgatcatcaatcacatcggatttgatgatttcacttttataatcttacaccaaattgtagagacaattttatttcacaaaactttactatatgcatgtgaatatgtgatcatttgtttttgggataaaaccaaccattacacttctgaacaaatcttctgaacacatattatatatcaaatctagcaagattttttattttataactaaccaaaatatctatgcctctacaaaaaaaaatttaaaccgaaaactctaatataaaatggtaaagccaagagtgtttgtgtagactccgtatgcaaaaacatgcgttacttacttttgaccccaagaaaagaagaagatgtaaattttaaatgaaatgaaatcgcgataaccaaaatagtcatttttggataattctccttgttttcatggtgctaattgagaaagaaatatcgtcaatagtattcatttatttttctgtaatttatacttagctctgtattgataatacaaaaaaaaaaaaaaaaaaagagagggttacataccaggaagtttctcaggatgcgtataacaaattccattctctccttcaagcgtaggtataaattcatcaatcaacggatgaagttttcgcttatcggatgataccttcgcctccaaatgcataaggatctctttatccgacggatcgaatttgactcctgccggtaagcttggtaaatctttgatgctaccaaccttatcagatctcattttatgtcaaaatctaaagtaatcatattgataactaaagaacatttaggtgaattaatggttaacatatgtaacctggtcgtcttggtgatgatggagcttgtgtccgcaagaaggacaagtcgtgatgggagtttcagcgctaatcttggaatctggacggctcgttacacatgattgagattggtctttgagttgaaccgatggatgatcagtgttcgatactctttcaagattaagatcgtagttatcatctgaaccatcacaccaactcatccttcttattttactgatctctctatacaagtgacctaccaaaatctaattacaatcagaactatcaaaagataaaacgagagagagggagctaaagatgaggaggtgatatagaaagaggggcaagtgaatgttaagttttggaactaaaatttaattatagtatattaaattaaaatggtgtaataaaataatatttttgggaggttgcgtggacgtcaagtttatgaatggtgtatgtacatacgtttgcaacaaataacttttaaatgcatttttcaacattttgattatgactattttaatttgaaccattttaacctttttctagtattcacagttgaaatattgaatgtgttatagctagagttgtgtgaaaatgtttaactaatggtatccaaccacacttaggaaaaccccttcaagagatcattaaactaaatcaggatatggagtttataaaagaaaaaacgaaaaaaaatagagaaaactaatctcttcaaaatcaagaaaggtgacgagagatggagtgtcgttattcaaactcattttcttttccaaactatttaaagttttgccagttttatttattttctattcaatatatcatatgccataacatgatcttgattgatcctttaacagattatattttatatatataaaaaaaatccaagaaaaagatcgtgtgatgaattatgcaatggaaaacgttaagttatgcccgactatcaatatttcatgtatgtatagtaggattcatttacgaaatatacaatagataaagagatctcatagataaatgttagatcatatatatatgttggaccaacttggtgaagcaataagaccatatcttcacgcacagaacaaactctcgtgttaagcaagtaacctatacccaaaaattctcatattttggctcgttgacaacagattcttcaccaaaagttattaacttatatatattttttctcaatctgtgtcttaaagtagacctaatattgaattttcttagctaaccacaatattaaaagacgaactatatataattagaatggtacaaccaactctccaaatgttttttttgtaaatgctatggtaattcggtttatttgggtaagcactcgggtccgtacacatgatcctcgatggagatgcgaagcttcatgaacaagaaactaataatctcaacccaaaaagtaaatgaaaaagacagatgtaaaggaacgaaacagcttacttagaaagctttttagaaatgattaatttcatatatttcatctgttttaattttcaaagaaatatgtttttttatctagtatataactatatttctgttaaattatattttaattataaatatgtcattaaaattttatatcaaataattatttgactttcttgttttaaatgttttttttttctttttagtcgaacaccattttactaagttatcggacggaatttttcttctaaagaaagacaatcctaagcagatgtgtttacatgggagaaaagagaccctcatgctcttacctttttagctagacaatcagcacaaatattgttacaagagggaagaaacctaatgtaaaataaataaataaaaaatgaaaaaaaattcaaaatttcaaaatccaataatattataaattaataatcatagatcttaagtatatattttaagactaatttttatatgaaatttttattcaagctacaattacaactctttttaaaatacaactggtatgatctttgttatactcatataattaactatttgcgtatttgatccgtcatagttgattttgtaaaatctttttgagaaagcattgctaagatttgagtaaagagaaattggattaagcttcatgtttacgtttacattgacgttaatggcgtagatatatagacacaatatcttgctgaaaaataaattaaagaagtaaaaaaaaaactaaaactaacataattatatatgcaaacaacaaaacatataaaaacttaaattaagaaacattttaaaaagaatataatattgtattttatgtaaatatttctataaattaatatttattaacttatcgtataagttaataaatattaatttataggataaattaatatcattataaattaataaaatttcatgatcccaacattactaatttatagagtttctactgtataaagctattttgagccttctatacataccatagtatccatgggaaaaggtgtccaatttctttaccattcatcattcctttcactttcgagaaagaaaatccaaattggagaataaggactaatcagaaaaggaggaaggcagtgatggaattggtgaaagagcccaagtttgaagcactggtgggcattcaaaaaagaggtgattaactgtctcctcctgagcaccacatctaggacaatgcttttccttaccgatgtgtcggtagaatagtgtatggtttgttgccaagtaccctgataaacattaccacaaaatgcttaagctttcttgtggtttttaacttccatacttgtgccaaaaagggagtgattcctggtccctgaaaagggtagtcacaagtagggcgagaaagttcttgcgcaacccaataccctgacttaacaaaatagttactagattttattctaatcaaactatatccatcactcaaataagtgcgacctggtcggacacctaaaatcaaaggtatgtccgttttattagttggcacgaattcaaattttcttgacttttttttgagaccttgaaggtttccttgtctgcattggtcctctgtttaaaatatgttggagattgtagatgttttcttaatccatgaatatagtacgattagagcgtaaactaatatcctcttaaaagaatgtaattcgaatctcccatgaagtgaatgaacaacgtgaagatgggaaagataagctttcaagactagagctttggtttagacgactactatgagactactatctccacaagaccaaaccaagacataccaatctaatcggctaaagttgatgaacaatctttggaggactttattcctttcctaaacaaaatctgaaaatcagaagacatgctaaaaatttacaaaacaactaaacctatatgggccaaaagcatatgtgcttatttaataacaaagtctccttgttatgttacaaaatctttcataacttctctttgataaaataaaataacattgaagagtattatactactacacaatacttttttctttctgttttgataagatttcgttaacctcaaaggtgatatttattaaaacaaaatatttcggtttctttaacccattactggatgttgtagaaaacaataacaattcataatgtataaaaacaacagaagaaaaaaaacataattcttaacactcataattaactagtgatgatcacaaatgatctactaattaaaatcttgattatgaatcatttgttattattctcatcatgtcctctcttgatccttgaagcagcttgctcacacagtttatcatagagctcttgatacttctccatcatcttcttcgccttttcgtgatccttcacgtcatttggatccactttccaccacacatccttattcacgaccctcgtctccgccaatgcagctgccttcttgactttgacttcgtccacctttaactcctccaccaatctattgtattttttgcaaagctcttgaatcttcgcttgcttgtgagcattcatgaccaatgatgatgaagaagacgacgaggcatcgccgttgagaaaccgctccgccacggcttggaaggatggactgccaaaagtgtatggttttccagagcaagaatacccgataaacgcaacttcaacaccacagagaatagaaagctcactgattttagtgtagataccatttagacgcttagagaatgtgaccgatctgccttcatctttttcaattttcttgatgttaatcttttgttttcctttggttttcttgggattcattttggagaaaaaaacaattatgagtttattggttataaaaaaaaaaagagaaatttaaactaagtatgtgattgttgtttttggctttagccaaggaatatgttttttttgttgggtgcaagataaggtttatatagatggaaaaatggtagtaatttaaatttcattaaaaaagtcaattcttaaattaatgtttggaaggttggtaatatttgtaatccgcatagttatggtcgattaataaaaactcttaattccggatgtagagactttgactagaagagattttatggtaataatgaatgtatgatattagattaatgtttggaaggttgttaatatttgttatccgcatagttatggtcgattgataataactcttaattccggatgtagagactttgactagaagagattttatgttaataatgaatgtatgatattctgaacttatattttttttttttgcgtaaaaggtttatttataccaattttctgtttttttctgtagagaagcgaaacgtattaaaaataaagctactacaaaggaaaactaatacatccaaaataagtaagaagaagagaaggagaggtagaagaagaggcatggaaggagagaagtcgatcccttaaagagcggtccagggaagcttgagtaacagacggtggtgagttgatgttgttgaagatccgggcattacgctctcgctagatgagatagcaggccgcttgcaagatgagcttgacaatagtcgtgatcttggggttagaagaagtccttgcctgcaaaatccaagaagaaatcgagagaagaccagatggaggagaaggccaaatccttgaagcaaacccttcccaaagagtggcagaataagcacagtcaaagaataagtgagcatgagtctctaggccagaagaacagagcacccactcaacagggacattaactccccagcttcttaacttgtaccttttgtataagaagcatcttcaactcccacttctcaaaacatttctaaattagatcctagtacatatatacaaaaaagattcattctactttcttaattagagatgatacaaggaacatatatgaaataattacacatcgatattcagtaaaaactatggcaaaattaaaggagactatatatttacacgtttgtgtatgtaattaattgacaaagaagttgtccaatctaaattggtagtgagtgtgcaaaatatgcataaaggtcatatgctcagttctttctaaataagattttatccataatttttgttttagaatttaaatgaagtggcatcttaaattgtaaacgctgcatcctagtaagcatatgttaacggaaatgtaacactctttgccaatttaacaaagtctccttgtagcagcatttttcacagtttaatatgttacaaaatctttcatgacttctctttggtaaaataaaataaaaattaaagagcatcatactactacacaatactttttttctttctgttttaataagattttgttaaactcaaaggtgatatctattaaaacaaaatatttcagtttttttaacccattactggatgttgtagaaaacaataacaattcataatgtataaaaaagacaaataaaaaacataattcttaacactcataattaactagtgatgatcacaagtgatctactaattaaaatcttgattacagatcatttgttattattctcatcatgtcctctcttgatccttaaagcaacttcctcacgcagtttctctttgagctcttgatacttctccatcatcttcttcgccttttcgtgatccttcacgtcatttggatctgctttccaccacgcatccttattcacggccctcgtctccgccaatgcagctgccttcttgactttgacttcgtccacctttaactcctccaccaatctattgtatcttttgcaaagctcttgaatcttcgcttgcttgtgagcattcttgaccgatcgttgcaacgatgatgaagaagacgacgaggcctcgccgttgagaaaccgctccaccacggcttggaaggacggactgccgaatgtgtatggttttccagagcaagaatacccgataaacgcaacttcaacaccacagagaatggaaagctcaatgatcatagtgtagatagcatttagacgcttagacaatgtgaccgatctgtcttcgtctttttcaattttcttgatgttaatcttttgttttcctttggttttcttgggattcattttggagaaaaacaaaattatgagtttattggttataaaaaaaaaagagagaaatttaagctaagtatgtgattgatgtatttggctttagccaaggaatattttttttttggttgggtgcaagatagggtttatatagatggaaaaatggtggtaaattaaattgcataaaaattagtcaattcttagattaatgtttggaaggttgttaatatttgttatccgcatagttatggtcgattaataacaactcttaattccggatgtagagactttgactagaagagattttatggtaataatgaatgtatgatattctgaacttgtacctttttttttttggtagaaggttaactttataccaattttctgtttttttttacgaaagcgaaacttactagaaaaaaaaattgctagaaagaaaaactaatacaaccaaaataagtaagaagaagagaaggagaggtagaagaagagggagagaaaccgatcccttaaagagcggtccagggaagcttgagtaacagatgtcggtgaggttatgttgttgaagatccggacattacgctcccgctagatgagatagcaggccgcttgcaagatgagcttggcaatagtcatgatcttggggttagaagaagtccttacctgcaaaatccaagaagaaatcgagagaagaccagatggaggagaaggccaaatccttgaagcaaacccttcccaaagagtggcagaataagcacagtcaaagaataagtgagcatgagtctctaggccagaagaacatagcacccactcagcagggacaataaatccctagcttcttaacttgtaccttttgtataagaagcatcttcaactcccacttctcaaaacatttctaaattagatcctagtacatatatacaaaaaagattcattctactttcttaattagagatgatacaaggaacatatatgaaataattacacatcgatattcagtaaaaactatggcaaaattaaaggagactatatatttacacgtttgtgtatgtaattaattgacaaagaagttgtccaatctaaattggtagtgagtgtgcaaaatatccataaaggtcatatgctcagttctttctaaataagattttatccataatttttgttttagaatttaaatgaagtggcatcttaaattgtaaacgctgcatcctagtaagcatatgttaacggaaatgtaacactctttgccaatttaattgttttgtcatatttgaattgttcgtgtatgaaatgtaatttttatttaagttagtgtacttttaagcacacttcataggagaactggctgttttcccgtagatataattaacaaggatcctattatcaaaatttacataatagagtatatgtattatgctattactgtaactcctagaaaagtcaaaatggtttcaccaaagttatgccctagcatgttaaattgcatatatatatttatagttctgatagtttttcaataactaaatggtagtagtctagtagttttcacttacataggagttgttatgcaggtttaggacagaaatcaattttcttcaaatgcaaaatgcactaaattactctattctagtcaaaatgatgccacattttaggtttattaaataattttggcattctaatgtcatttttttttttttggctttagtcacgaaggaattagttttatggtaaaaacttggagcacttcttgattacaaaagaagtatatctaattttctttttttcctagttttttagaagaaaataaaatgaaagcagtttggtttaagtaagtagtaagtttttattgttatttgggggctttaaagaaacttaagaaaacagcgagcaatattcagaatttaccaaacatatattagatgtaacaatagtctgctcccacaggcccactcttaagtccaaacttttgttcctacttccttatcaaatgtgtcatattcgttacaaaggtttttcagaaaggtttttagtaagttttcaaacattttacaagttctttagaagcttggcaagttatttgtttacaacatatattatctttacaaaaaaatataaaaaaacatataccaaaatcgtcttttgtctttcctagtttttttaatgggcctttgacaaatttgagaatagagagagtagagtcgatatgtaagacttattcaaaaatgtggaaaacaatgtgggtccgataggcccatttaaaagccatatgacccctaaggtgtgagtgtgtaccgtgtggtgtgggtcacaataacactcaattactctcatatgtattaatgatgtacatgatcatttcgcaatcctgaccttatctattgaactttggtcccttagtccctactatgctttccattataattctttgtttcttataaataattatgctacccacgaactatcttactcatatcataccaaccactagcaagactactataccaaaattactagaacaaagttgcatcacatataaaagaaacttcacacaactatcaaaatagaataaaaaaagagtgtacttgttctagcaaatacaaacatgttatgtggaatctctatgaaacctcatcatgcaacaagttgaaaaaaataaacaaaaaggaaatgcaaaaacaaagaaaacaaaattgagaaatgatttagagagtgaaagagacagagagacaaggcaaaagatgaaggtgaggtgtctatgtcccttgaattgaatgataacaatgtgggctggcttcaatgcttattggacccacttttaatttcctcacccaacagctcatatttagattctcaccctatttatgtaaccttaatgtaaaattctctagttagatgataaagcttagctaatgttgagatgtcaatgtttttgttttggatttgttttatactcaacaataatagaagttatctctttagtttttaatgtcgttacttaattgcaattaggaagttaaacgtttacctaatcactaccggtcgatttacatgacttaactaattctttttctctttttggaattatatctttcttacaaatagttctcgaactccaagaatatcatgttttaaagaatgactgtcaaaaaaacatacgttgtttattatagatactagacttcacacaagtaactaaaagttagagatcttttcgcaggaaggttgatattagtcatttcatgtgccaagtctgatgttcatgctcgtgtacggagagagtaagtaaaggaaataacacaacctgaaattataaataataatagaaaagttggtttgaaaaagttgagaatttaagagacatgtgaatctacagtgacatcaaactgtacacgagcctccaagagttcactaaaaacgagagagagagagagagcctaatgctttaaaagattcagatagacatgttcctacacgaaccttgaatctgtttacccaaatatggaaactatttaaatgcatgttaacgccagaaagatcgcaactttttcatttgcatttaccaaagataaaaactcttacaaaaccagagtttactaatagctttatacagtggagaaactgaaacgctgaattagaaacttctttatatatattataaaaatttcgacaatctctgattctcacttttagatcaaaaccctaaaaaggggtgagagaatcttgattcaatgccctaaattgacagcttcaagcaccaaaaattgagagagcttttttgggcaaaacacttttctttctccatttgtgtctcaagctatacttccttggtctgaggtgtcttcgttgtaataaggtgttaacttgccatccttgtcatctcttatcttgtgtaggctatcttcgtctccaccaccaatttcttgcaacatcttaaccacacgcctcatggaaggtcggttaatgggcaacggactcgtgcagaggagtccaacgttgaggattttgcttatctcttctttgaaacaagagtcgagtttcgggtctatcacatgctctatgcctttttggtccaatgtagagcaaacccacttcaccaaatccttctccccaagttctggatcaaccgggcgtttcctagttactatctcaaggatcactaccccgaaactgtagatgtcgcttttctcgttcacacgaagcgtatatgcgtattctgcaagaagtttgaaatgaaagttatggagggaaacagacaaacaaacaaaaagtttcaaattccattaatggacaagtgagaagttgtggagccatggtttcagacatgtctcaatagatagtgaatgctcatttaagtctcaactaataaaacttaaatgtggttcatctgaatctccgtgcaacatgtaccaaatgagcattattaccttaagcaaaactgttgattaaacaaagcacatttaacttgaatcataagactaacctggtgcgatataaccgcatgaaccagcgatcactgacatcgatttaggagcttttccggtcaagtcgacagctttagccacaccaaaatcagcaactcttgcaccataatctccatcgatcaaaatattgtttgacttaatatctctatgcacaatcggaggaacagaatcatggtgaagatacgaaagcccctcagccgcatctaagataatcttaaacctcgtttgccatcccaacattcctcctttactgctatgaagcaaatctcccaaactaccattaggcatgtactcataaaccaagagcttgcagtctcttgtagaacagcaacaccatagcttcacaatgttcttatgcctaatcttacccaatgtctcaacttcagcttcaaaagcctcatcttgaactccaggtttgtaacctttctctggatcacaatctccagtttccttaacagaacctgtccataaacgcttaaccgcaacagtttccccattggtgagtacaaccttgtaaactttacctgaagctccagctccaatcacattatcttcatccaagctttcaagaatctcatgctcactgaacccgagtttgtggaacgacattagagtccacttagatctctccatggctcttgctttcttgaaagtcctgtacttgaagtagaaccaagcaacacccgcaagaagcaccatcgcagcaagtacgaaaatcgatctaagaagccatacatagcctctcttcttagcttcattctcagagccacacaatcccttgatatccccacacaatcccgggttcccaatgaagctattcttatacatatctttcgctaaagaaggcggtaagtcacccgataaccggttataagacagattcagctggtttagcttcaaactctgcaatgaaaccgggatcttgccagagaacatgttaccagaaagatcaagatagttcaatactgacaaactcccgatttcatctggaattttaccggtgaattcgttatcggctaagtttaactcgttgagcttcttccaagatttgattccagaagttaactctcctgaaaactgattaccatgaagatcaagagtacctaattctccaagactcatcaagctatcaggcaacgagccactgaacttgttcccacttgccgacaactgattaagattatccaaagaaccaatttcctccggcaaagatccggtgaattcattgttggagagaatcaacagcgagagatttgaagcacctccaatggacttcgaaatttcaccggagaacgagttgttgacgagctcaagcaagttaacatgaggcaatccccagaaacctgtaggaactgaaccggaaaaccggttataagctaaccggatacgtgtcaagctcctgcaatcggcgagactctccggtataacgccggagaaggaattgtgtataatcaacaactcctctagctctcctttcgcacacagatccgccggtaagtcgccggaaaattcgttttccgaaacatccaaccatctcaacggcgagtttagaccgaggtcttttggtaatccaccggttaaccggtttccgaatattctaatctcgtacaagttcggagataacgctatactcgccggaagctcaccttctagattgttctcgtagagattcaaactctccaacggcacacggcaaagctcgtccggtattttcccggttaactgattcatcgacgcgtcgagaagtctcaacgatttcaaattcccgagctccggtggaatctctccggtcaacgagttgttgtacagctcaatctgaacgacgttagtcaaaccaccgagcgaaggaggaatatgacctacaaggtcgttgagcgcaaggtctaaatcaacgagtttactgagttgacccagcgagtcagggatctgtccgactaaatgacactcagtgagccacataacctcgagattcgtcaagttcccgaactccggcgggatccgactcggactaaaggggttatacgaaagattcagcatcttcaacgtgctgatgttgccgagaaacggaggaatcgtaccgtctaagagattgtaaacaagagaaagaacctctaggttttcgaatttgccgaaactcgccggaatgtcaccggaaaagttgttaccggtcaaatctaagtgaaccaaagtcggaatatcggcaagagtttgtggaagctcaccggtgagtagattctgagagagatcgagagtttgaagactcttacaagcagcgatgttgagaggaagagtagagttgatggagttattgtacaaagagagatgagccagattagagagacgacaaatgactgaaggaaaaggtccggcgagattagcgctggagaggtctacggaagtgacggaggagaaatcaccggcgcaggaaacgccggaccaccgacaaggagaagcatcgttggagttccaggaagagagatatgagtctgggtcgtctaacgagagcttgacttgttgaagaatgaaaccgtcttggttaagagagaagacggtggggaaaagtaagaagagaaagagaagatacatgtttcttcgtcttccccggtatctatgacggtggttgaagaaagagagagagataagagagtatgaagaagagagtgtttgtgagagagtgctttgaaggaagagaagaagagagtctataaaaagcgttgaccggagacaggtgaattatcgtgactctgactgtgaatgctataaaaatcatttgtttttctactatcatttattttgtttttgttttctataacgattctctctaattatttgtttgcaattattagtatctatgtcgagtttccaacattgtataattatcctgtgtttatctgattataaaagagaatgttactaataatgatgatctagctaaatagccatatggaaggaaacattctttttttgtactttgttgtttaagagaatgcaactgtttttaaattagttatgtaggagacgataagattgtaaattttcaattaaataattttagctttataatatatatggaatttgcatacaaatttgatttcattatatatgtttttaatgtaaatgaaaagttagttagtagagtaaatgtgcattttaaaaaaattgcaaggtgaaaagaaggtacggtaaacattaattttgaaatgtagatatctgatttttttttttttttttttttggagatggaatgagatatattccgacagttttatttattatcggcgtttgtaaagtagtaaagtacaaatattgttagaacatatcaaaaaaaaaaaaaacagaatgtgttggaagtttacttggaacgtagtctaaagtcgatgtgaattaaattaattatcattcaattttaaaaagtttatgcacgtcttaaagagtattaggaatattgtatcaactattaagagaataaactagcatgcatgtagaaacatgaaaatattttattttgttgaaatgtgaaattcatttttgaagataataatatgtagttatttacaaaaaatgcaaagaaaatatggaagataggataagatatcaaaatattgagatatttatgaaattaaacattctctaatgaaatttgttatactaattagtattgcaaagggaaagagggggacaaacttgtatggttaaacgttaggaaacatattgcctaatggtgtagtcaatatgagaatgcacttctcaagcgagagtcatgagtattgcttatcttagagatgtcatagtcttaaaaaagtattcgagtcgaataagagttctttatggtttttaaattttaggttgatatgcaacaaaattggaagacgtaaaataatgtattgtgaaaaacaaactgtgtgtacactttgttcttattctcacaacttggttttcataagttgttacggctaaacgaaatcgtaaattattttgtaggatgtgaaaaagagttgcactaactgtacttgtgttcaagaattttgtttttgaggacgtgaatacattgttgaatccagttaaaaaaaattgttatctatttttgtttttattttcttacgatttggatttcatgcccgttacattatgagaattgttacgtttactatcataatctcaatcttagtttatcagttggaatttgattttattttagttaatcttaatttaacaaaataataaactcataaaagaacaacacaaattttgcctacatatatgttagttagaaaacgtatgttctaacatatgtatcggttgagaaaagcatcactttaatcaacataccatttgaatgatatttaaagagatagatgagtgaaattttggagatagattgattccaagcagtcttctcttcttcgtgtttctaatagtttctgtgaaacacacaatacaagttgtcaaaaaaaaattagggtacactaaacggagttcgacacttgtatcctataagatagacatttaagaaattacgtacactacaatagctacaaatctctgtcttatgagattgttataagcaaagtctctttcatcctacaaattgttgctagctagttgattgaaagaaaccgtcaaattagttttgtttatatttttaatttcattacttagttaatcaagtttccattacgtgtgattgatgtcctcttatagtttcataacattgtcactttggaattatttaatagaactattaatttgttacgagtattgtgtacaagcaagcaacctttgatctatattttgagagttcaagttcttatataaatggtttgaaggcattacgctcctcaatgcttattagcaacaatgacagtaatggtcagctttgatcttctaaattgtttcatctttaccctcatattcctcatctcaactctctttctctttgttttattctataagaaaccaaacgatggatttgatgtacctccaagccctccttctcttcccatcattggtcatcttcatcttctcctctttgcttcaatccacaagtgttttcaaaaaatctcatccaaatacggaccttttctccatcttcgcattttccatgtccccattgttcttgtatcctctgcctcaacggcttacgatatcttcaagacaaacgacattaatgtctcttatcgtggtgatgttgcaatcgatgaatgcattgtgtttggttcttttggatatttccgagctccatgtgaagattactggaaattcatgagaaagctcatcatggccagggcactcggaccccaagcgctagagcggacacgtggtgttcgtgcagctgagctagagaggtttcatagaaaattactcgataaggctatgaaaaaacaaagccttaagatcggtgaagaagcaaggatactcgttaacaacaccctcggaaaaatgagcctaggaagtagtttttcaatagagaacaatgatgggacaaaagtttcagaatattctatcaagttagctgatttgtctcaaatgttttgtgtggcacaaatatttcataagccgcttgagaagctagggatctctcttttaaagaagcagattatggatgtttcacacaaatttgaggagttgctagaaaatattgttgtgaagtacgaggaaaaaatggacaaccatcaaagtactgaattcatggatgcattattggcagcttatcaagacgaaaacgcagagtataagatcactagaaaccatatcaaggcactactagcggtaaattgttatcctatcattggttataatatttcattgagaatccaaaccattagtaccattatactaaataataatttgcaatttttaggagcttttctttggagccggtgaatcatcttcttcaacaacaaggtgggcaatgggagaaattttcaacaatcctaggatctttgagaaactaagaacagaaatcgattcagtggtggggacaacaaggttgattcaagaaagtgatctaccaaaacttccttacttgcaagcagtcgtgaaagaatctctaagattacacccggtgggagcggtcttgccaagagaatttacgcaagattgtaacattggagggttctatatacatgagggaacatcacttgtcgttaatgcttatgctgtgatgagagatcctgatatttgggaagatcctaatgagtttaagccggaaaggtttctagatgcctcaagattagggcaagaggaggagaaaaaggagaaaacactaaagttcctcccatttggcgctggaaggagaggatgtcctggattatatcttggttataccttagtagaaaccacaattggagtgatggtgcaatgctttgactgggaaatcgaaggagataaagtcaacatgcaagaaggttccggattaagatttttcttggatttggctcatccccttaagtgcactcctattcctcgaatcataaatcatgaaccttctaatacgcagattccaaattcgtgagttcaagacttcacttaatttacaaatatataactgtgaaggttcaaggatcgttattacacccctatggtatatacattatttttgcattcgttgatgttgttgaatgcactttccctaaactgttgtatttcattatgttcatattattgttaagttatttatgtaaatcgcatagatatttgggtgaattggtgtactatcatatatagtaaatttacttaaatagaatacatcatcaaagactacgagtcgacactcgacaccgaacggattgttgttatacttgttttctcatttgatttttgtgaacggttgttacatttaacttactataaattttattagtcaaagactagcttgaacatatccgataatatctagttagtttttttctgaaaataaatgtctaatttataaatttaatttgattgtaatgtctagtttatattctttttatgtttggaaaagaaatgtttaggtataaatcaaacttaaaattaaaaatatagcaaagaaaaacaacatttatgtttgctaaagaactcatataattatgtgatatctataatgaatactctattggtagatcttaacatgaacttgaagatggttgttgatcatataccaaatctgaaatgtaaaaaatgtatgttttaaaatttatcaaaatccgatgtttggaatatgttgtgaaaggaatttttattgaagatacatgtgtttattattgctaataagaattagtattaaaagtagggaatttcagaaaatactaaaataaattattaacgttcacatgttttgtaggtttcatccattagtaaaataaccaaatcattgctaagaatttaatatacctattatttagatcctgcagtgaaatttatgatagacaataaatggttcaattctcccaacaccgagatccacaactaataaatgtggtatatgatatttgttatttgtatgtacgcatacagtaatgaatacgattcatagcttcatgccttcatgattttaatttatgaacaagcaaacatgaaataaattcatccacattaatatataaagaagaaagttgatgagatcaaattgttgatgagccgacagtgaataattatcatataaaatagcatgccaatctcaatacacactcaaatttgtcttatcttttgtcgcatttccaattttgttttgtcctatacgtaactcaaaatgcaatgttatctaatgcaggccctacatgcagaaaataacaatatcattttatcccacgtccaacgaaatttgatgttaaaccaccaccccatataaccccggcacactcatatatgtatgtctttatcacacttttttttttctgtcaattactacatagataacaacattctattatcttgcgtaataaaaaaaaaaaaaacgttctattatcttttatggactatctaaccacctattcatctgacaaaaaaaagtctttacaatgtctaatatcttttatggactatctaaccacctatttgtttcttgtatataattttaatcaagtcaaaccatcgccgttccaaaattgttgaaaatataaattagtgtttgtaatgacgtattttagtaaattaacgacattgttaagtagttttaaacatgttatcagcgtgccaaagtttccattgtagaattctactatatatggattacaacagaaagaaacaatgcaaaactaatatggtctccgagtaatgtaaatcataattaaaaaaaagaaaatcttaattaatattacaggaaacacaagccgaccatagtggattgtgatacttttagcgtgcaattgaagtaatggactaaaagagtagcatcattatcatagaatcaacacttttattagcattaagctccttaatatctgtagcattaatgatcacattcattttagtactcgttattctttcttcttttttaggtactatttattgtatttatcattaattgaaggcagagttatgacacggaaactacatttgaacctacgaacaaagttaggtttgacctaaaatctttaaccactgggtcgaagactccatcagataaagtttttcagatttcaatcagtaactaaagaaaaaagaatcaacatttttcaacaaattgatcattaaaaaacaaaataatatcacatacgtcacgttttcttttttgggtttttgctaaaaggagagaggttgaaaaaatcgagaagagagaaggaaatagaaaagaaaagcaaagtatgtattcccgagacaagccaaagttggaaacatcgcgtcggtcgtcctatcattcttccatccatagggactgctaaaaccaaataaacatgcatgcaaatctcgatgtatctgtttctttttttaccaaagcaagtatcacgagattagacatcaaactaaaacagctgtttggtctttttgcgtttcagttctttcaaataatttatatccgtagagcaaatagtcattacaaattaattgtgtactttctacctttagagccagttaactcagtcgtagcaagattggtgtgagtctaatttggattttgtaggatcacgagcgaagcattgtaaccgttagggaaacggttattaggagtagttggacaacccatcattttatggactccttctgcttccacatgttacaacttgtaatccgaaactgttttctatgtgctgacttgtttttcttaaaaaaatagctataaaatatttagaaaagatttataaaagcaaagatctcttgatcatatctatcttatttgaatcatttataattattaatacggttgaattcttgatagaaaatgttaatgacatgttttgaaaatgtaatgttttgatacagaagagattagtacaaccattatcttttttcgggtcataaaagatgtactaatattaataagccaaacgaaaactttgttcttctatagatatattattctcaaaggcgtttccttttcacttgctttttctttcttttgcttttggtgaaatcttcaaagaagcttttgtggttgtacccaaacttttttccaagtatcccacttgccataagatctgtggggtcttataaatatcagaaagtggaacttttgcaaactttgagggaatatttaatcatatatcttagagactctagtattgtcacctcttcaattcctcccaaaattccaaattgtaaatctgtattttgttaggaattccaagtataatagccaattacaagagatgtattacataagatttttaaagttcgatacatttcgacttgtcccttatgctcaagtatttattctattgtagatatcttaagtgtagatcaatgaaaatccctaacccgacaactcatgttaatcttgttttcatcctcgatcgcaagtatacatgtataaactcacatgaagcaaagtaaagaattcgttaatcttttttttagttaaccaaaaactttgcaccaaaactgatatatgtatgtgagccaaaactgtcatagcatggtaaataagccccttcacaacaaggctcgacctagctagatgttagattcaaccttctttagaaaaaaacctaatggtatatatatatagattattttgaaattcctaatgttaggaattcccgcaaaatattgagatatagagctgatgaatcttatgctttctcgtgatctttattaagtgtttatctgctctgatgggtccaataattcatttaatttatgaaaacaacagtagttgtgggttctacgtggttaaatatgtttttctttataggttaaaatatgaaaaaagcatctagaagatagaagcaaaggagaagaagagtcagcggtccaatttttggtgatcatcttcctaccttgcaatcataattattcccttaagcttaatcatttcactttaattaagctttaagaatattagagtttatttcacatcccaccttctcccactttcctcttctccttttggttggcaaggtaaataaaaaaggaagtcttttaaacaactattttcgatttatttagtttccatttgaagttctatattggttgtattgtccaatcgaaatttccactttctctgcttttgatgcatgttctatgcttgcgttgcgtatattatgtgtaatatagcatgcacattgttatggatataacaacatcaagtttaataatatgctgattgaataaattcatacaaacatgtcgtcttgcaaagatcttttaatgtcattagttcatcatggaagaaatttatatggatgtttcatcttacaaagatatttatatgatttatgaataaagtgtatattagatttaccacgttgattggtggcacggtaaagagtgtttaggctcgtaatgttcggggaacaagcattgcgataagccgagactgcagagaaggagataatagttcaataaggattatatttgtgacatttaagtggtttgattgttaaatcaatcattttaagaaaaaagatttaaatcacatttactatttatcaccatttttggctattttatttctactcaaattcttaccagcttttattcattagaaaatctttattacattcactaacatatttcttatgtacaagacattgactgagtgggttttgtagcagtgtcgcaaaagtttcacagcatatcactagtattacgggatatacaaatgtaatgggtttgaattgaagattcaaaagaactaaaaaacgcctttttcttttcgtattcaacctgtaattgaaagaagaagaaaaaatgaagaatggatcactacgccactaaaaggggtctctctctctctctctctaccttaaaccatctagtgaaagtaccttttaccttaaaataaacacaaaacgcttaaactgtaattgtccaaagaattttcaagacaaaagttgcaagacatagaagccgaagattgcgaataaacatagcaatgatttgagaaaaacacaaacacaactcgttcaagtcctctctccaaaatgcctcttttcttttagttttgagacaaaatctttttttctggcatataccttttgacatttaatggtgagattttgcatgagtccaaggactaagcgattctcctttggaagaaatgtatgaaatcacaaccacaccctcgcatgcgtattgttgagaatcatttcttgttcatcgacaactttaaacaagtactagtaggagagagcccttaagcattggagattaacacatgaatcattaacttatacttaacaaaataatgaaattgttaattatgataacaaaggcatttgctaaatatatgccttggcttggctttaacaactgcaccaaaactaatcagaaatgttcttcttctataggtgaaaacctattctgctactatctctcttttctcctacataaaaatatatatatatatcttcaacaagaatgtaatcttccctcttcacaagctactagatctcaacttcatgaatcgctgctgctgtaaccttctgattctctgtcgtaattgtttgctgcattattagcaggtacatcatcatcttcagagctctcactcatttctgcgtcatcttctccttcgacccgcccaacccccacaacttcttcttcctcgtcttcctctattgccacatttaggttactattccaatctaacccccacttgtttctctgactataatccacaaactgaccaccaccatcttcatcctctgattcaactcctacactgttgtcactttcatcatccacttgcatcggcgtcatcattctgtttggtgtttcattggcccagtcctcctccatctctctaggagtttcacctgctgcccagtcttcattaatgtctctgaatgtttgctcttcttcttcctcatcttcttcaacttcttcgcttttaggcctaacaatattagccattctattgactaggtgggaattatcctcatcgatcctctctggtctttttctaaccgtcctctttccttttccagggacttggtggttcaactcaacggccattaagttactattgactgcaacatttctcctaccaacgacaaatttgttaagaccgctttgcgctttcttcctcttcacctttctgtttgatccagatcccaagcttactcgtgcacgtttcttatttctgttacccgggtttggagcaacctcgtcttgatcttcttgctctctgggtcctttgcctttgaaaggtgaatctctagggaaaaggctctgcaatacgtgggtaacataagattccataaccataaaaaaaaaataacttccaaagtattaacttagaaacaattttcgaaccaatattggtctagaaaacttacaatctgctcgttctcatcttcagggatgacctcaggtttctctggcttcacataaataatggatgcatcaagttctgaaagtctcaaagcaaccgctgatactgtctttggtatccatggaagaacgtccactgatccctgatcatcagcctcagcgttagcagctcccaaaagctcctttgccgacataaaattggatgacaaagattctttcttgattgcactctctaaggaagtcaacacctatcaaaaccaaaaaaaggaagacatcgggtttaaaacaaaacatcattccaatttgcattaatttagagaaagaaaaacaagatgatggaacctgcaaaagttctccaggtgatgatgaagtattcaacctaaacccccatttttttctttggtcctctgtccaaaatgattcaagagcttcatctggaacagatgcctgtcaataaaaagggagttgtcaagtgttggtaccaaaagaaccggcgcttaagtcgacaaaaatcatttatgctttacctcgagaaaaacaagtagtggtttgagcaacctgactccaaaaggaagaggagacacagccaaacctgaatctaatatctctgaactatcaaccacgtccaatctctggtgacaagaagagcagaaggtatactcagacaaataggaagcaacacacgcgtcacatgttgctaacagttcagatctcttcttcccatattttctagcacaagaaggtagtgaactgtacgtctcggtccacatccatctctggaaatcatggaaccgttttgataaattcttgttctcggtgtcatttctacctaaatcaactctaattgaagttgaagtttccattgaatcagagtttgaccctgatatagcactggacgatgggctcacagaatctgtaggagaatgattcacaacactcttttccgtcaagaaagggtttctagctagctttatatctttacaagcattctctttgaatgatccctcgatcttctgcagcattatgcgtaaatgagactctctgatcccacgcatatccaatgatgcaaccagaatatcaaaagcctacacagaacaatttcacagaaggcatggttaaatctctatctaagctggatattagcaaaccaaaaggcaatcaaaaaccttaagctagaatcttttaacaaattgctgaggttgttatattacctcttctgaatcaatgaggagccacttgccatcatgtagctcaacaaataagagcctcgaacaaggatcactcttagacactgatacagcaaaatgccagtaacgattgtggcgccgatcttgtccaagcggcaaagatcggtatggatacacctcttctgctttgtggcctatatatgactttaattgggagcgtgatctctttgaagcataattttcttgacttatattggcatcctgattaataagtgctctctcagcagatgatttatgaagatcgttcgaaagatcttccaggggctttgtttcatctagaagttgagaagggtctctatcaaaactatccctctcacgagtagagctttgaatgattggtaggcctatcgttgattcagttttgctgcttgctaagttttgaagatcaagcttaagtacatctctcatacagctgttatctaactgtgcttcagcccacatttgctttttaagagcatttgctgcttccatacgatcctgtgaataaatttcaatcagataacaaataatagactcaaaaggtcaatttctactctgttcaacaggaaagctgataaaagaaaacccagactttacctcaagacctgttctgatggagtttccttcattggcaatgccgactaaagcaacaagggcattaaggcgctcttcaacacttagatgacagtaatccccttccgtaagaccttgaatccatgattggccctggttgctttcatcaattacggcatccacgccgccaaccactgtatttttatgccgctcactatgttgtggaacaatgctcttcatagtgcttggaggaggagatgaaaactccttctcaagctcactctttacatctgctttaacatcacagaacattgtatctaccccctttcctgacaaaacattcgcttctccaagaacggcactttttgatgcacttgccagtgtagctaaatcatcaacctcgggatcctcatcaatatcaatttcgaagtcttcatccctttcaagatcattcacatcttctggacctgtaaatccattttcaaaagcccgtatcttcttcctggcatctgcgagtattgcctctccatccttaggatccttcacataaggagctcgtacacaataagtcgaaggagctattctttcaaagagtttcacatctcttgtcaatgcaacagaaatagaagcctctggtgtcttgcttgtggtcaagtcccgaagtccagatttctttcaatggaaaacataaagactatgtaaatgaaaaaaattcaaatacgatgaaaacagcatagcaaatatagattatagatttacctgaatcttgtcagcaagttctaatactgtcagtcccttgcttccttcaagagatagaacatgaaaggctgcaaatttgacggttccaggtgtcaaccggtgcctcgacttgcgaggagcgagcaaccctttctcccgcatcgatgcaaaagcactttcagctgctgtaccatttcggatagtagaaatgacatcttcacaacctttagcctgcatacacaaccaaaccaaaacaatgtgtaagaaaaaacgaaaaccatctttatgtcaaaggcctagcttagcttccaggatttcatttttatttctctccatatatagtactaccatcacatcctgagtaaacacttgttaggagttagggggcgcccaaacgtgaatacgtacctcatccttatcaccagtattggtcaatcgggaatgttttttcttcagcttaggtccaaatccagcagagagcgctaattgtcgcagtatttcaggccatgttagtgggttcaaatgctttttccaactacgaatgtcaaaaccccatgcataagcctgaaggagaaagaagcatatgaaagatgaagcccactgaacaaaaccagcaagagaaaagtatattaacatacagagacgaagaaagctaccccttcaactatttgcggatgtccaccctcaggattggctgtagtatattggttatttccaattccactaaagggtgttctagcaacatcttcgacatctcgtattattgatctcagaagagtaacatgtatctcccccagcaaccttgagtcctacaataggatctttatcaaatacagagcacgaacaatgaaatgaaagaaacaactatagaacacgagaaaacaggctataggtactaaagagcgacttacatagtcatgaaaagcctgaataaactcatccagtgtaaaaggccataggtcaagaacatcagaaaatgatatcaggaatctccaaacctgaaaagcaatcacaacataagatatgtgaaatctgcaaaagggtgcataatacacggaaaaacaaatccaactgatttcaaattggtctccaagttattctgatcataatactaattttaaatgagaggtagcagccggagagagggtaaagatcaatacaacataccattagaaggtttccaacagtttcatcagaatctttccatggagaaatggcaaacggcatttttagttgcaaagactttggtggaaatgtgctcagagaatctgaaaaagcagaatagctatgatgaattgcaggaaccataaataaattacaacactgtaataaagctaagccaatcgagtaaggtataagcaaattactttgactgtcttgattttgataagtatatgaagaagatagatttgtaagagaaagcaaatacaaaagctactacccaatctagaaatcaatgtaattacaataaaataatcttcgcagtgttctaacatgctacatcaacattgaatattccagactaggccatagaatataccaaactaagaatataaaaattaatactaagcttaaaatttcagagaggaaaaacactaaaataaattaccaaaaattattgattgtaaagcctaaaaactaagtagaccgttaggccgtgattaccaaatccactactaactaaatctgagagaccatacctctatacacctcaagattctgcaatgtgtcgtgatcaagctgtaatactgagggtaatcctttgctaatagcagccaattccattagttctagctgctcatcttcaataagatccatagactccttggcaattctacgtgcagttgccttctcaatggcaagcttgcgtctaatagcgtctttctctcgacgaatctcgtctttttgcttctttttctcagcctttaacatgtcaacaaaaagataattttcactctctgaactcttgccacaaaagttgctcaatctcagcaggattaacaaaaaaataccaaagaataacaactgggcagagttttccaaacttaccctttcattttctctctgtaagaatttttctcttctttctacttcacgacgctgctcacgctgtaacctttcctcttcttttattctttcacgcatcaacctctcttcttccttacgcctctcacgctcgttcctttccatctcttttctcatgcgttcttcattctgaggacacaagcatcaactcatcaatatatctgttacagtgatactaacaaaagacaataagacacctttccaaataatcagtaaggaggataataaatgtagagcaaatacctttttcctctgaatttctagcttctcaagatcttttggtccatgattctctcgggtttcactccctcttccaagtctaccatcgttaatctgtgagagtaaacatagaaaaatgacattacaacaaagacacatcttgtcaacaaaaacggatgaaataaaagttggtacaatgaagctacctttccctttctatgcacatcactactcttacgcactccatcaggtaacaaatatggatcttctgtaccaaggactgatgagtccttctccagcaggaatctatcaccatgatgcgctgattcaatggggcttggcatgtcttgttgagatgtcgaacagttacgagacgcatgtccaggggtaacataggaccttggtacaggtccattcgcgtgcataaatgatgaaattctagaacgtgcaacttcatagtccataccacgtgcatgattttcagagtatcgttcatacatattaggtgtaaaagaagacggatcatccagagattgttgctcatggaaagaacgggcagcagcatgagactataatcaacaaaagcaaatatgttaagcaaagtagtaaaaagaaaatattataaaactgtgaatacatgaatggacaagaaagagaatagaaacagcagagcggaattcatctttctaacaatgatcagagactaaaaactgccataagactaatgtcagccttcatgtaatgagaactctaaaaattactcctaccatataattcatagaccatcagtttatggtaacctcttcaactagtcaatttgagatatctaggtgcattataaagaaactaaatagagcatatctgtttagtcagaaaactaactcttcgaggtcggggatcatgtcgctcatacagatcgctctcatagggatgaagtaggtgtttctgcatcgctgaaatgccaatgaaaacaaagttagagagttacttatcacaagaagtgtaatactaacactgacattggttacacaagtcataaaacagggcaaacatagaaagtaatgtatacctataggtgttccaaacgcaccaggaggcaaaggatcaaactccatgccaagaataggtccatcatctctcaatggctcacctaactgagcctcaatacagacaatagctctatgcaccattgtcgacaaccgcgactcataactcggctttcccattgtctcatattcatccaattcagctcgagaactactactaccactagcaaaattcctcctagagttggaataaggactgcaaccagactcagaacccgaatcagatctggaatcttgctcaggtaccgatccagcagcagccggtaactcgttaaccgaagccgattgaaccgcagcaaccgatgatttcaccggtttattagactgaccatccttcttgtcctttaaccgtctatgacaaaaccacatctgtaattgtcgatctgacaaatccaatttctcagataactcagccctcgtcgcctccgacggatacttctcctctgaatcaaaaattcaacatcaatacttaaaaaaacaaagagaacgaagattgaatcaaattaattgagatgaataagaacctgaataaactttctccaaggtttcaagctgaaacggagttttcatctgacgtttaggcttgacacgaccatccttagaggaggaattattatcaatcttcttcttcttattattaagattagcatcaccaacgacgctcctgatcttctgatcttcaccgtcagaacccatctccatggaaagagaagaagaagaagaaacccagaaacggccgcaagaagaatcaaagaacacaaaaacaaaaactagggctttctattgaacaaacaaaccctgatccaaaaacgtaaaaaaataaaaataaaaagaagtagaatatataagagtaagaataagaagaagaggaagaacaaacaataataatagtaaaatcgataaaaaccaaaaaggaagaaaaacaacaacagggcttctagtagtagtagtagtagtaccactcatctcaatttcaacctccttcatattcctttctttttttttgcctttcttcttaattaaaatcttgtttttttttgttgtaaatgaaaagaaaaaaaaaatcgaaacttgaggattctacagcgaatcgcgtgcttatgtgtgtttctgccgttgatgtgtttatcaaagctttttttctttttattatataaatcaagttaatttaaaactaaattaatacaacaactcttgaagggctttaacgtgcttttggtctcgtgttcgtgttgttgtctttcagatccgcaggctggttgcatgattatcatatcccccagattttttttttgaggaaccacttgtgttgagagtaaacatcttgccctttattgttttcaagtgtacagtccttgtcgtttttaaaaccggttcaatacttcaattcagattttttaatcccggtttactcgccgtccctatgaatcacagaggaatcgaaagaacctttacgaggaagctttgactcgaaatctctctgaagaagaagaggagagacgaaactgttggcttagtttccgacgccgggaacgtcggaactccggtgaacagagaatggggctgcatttggctgctctgtttttcatcatttcaccactcttcgttttctcctctcaagtccagcagcagatcggttctaatcagaacttgatcaatgatctggactcagctaagctcagaatatctcaattgggtaaagtttgtttctttttgttcgtggtggttttgggttgaaccaccaaggcttctcttttttctttttctttttgctaattgtattgttttgtttgctgggaatcgattggctctgatcgtgtagaagctgttcttgaggcgacaatacagaagttggatggtaagaccctttacttgaaagagcgtgagaagttgatccaagttgctgaaactcagatccttgatttgcagtctgcttcatacattgacaaggttggtttggttctctaaggagaatgtattgaacatttagttatgttaagtagaattagctaaaaggctttaaaaatttcctctgctgatgagggaatgaatgtggtaggacactcattagatcgtatgtgctagtctgaggctctcctatgataccccctttctgaataatgtttacttgagaaaactcaatgccctattgagcttaatcattatagttgtagctgccacttctgtatagttgccacacctttgttgtaggatgtctaagtattggtgatacgaaaacttgcctggttgtatgataagtactcggctcgtaatgttttatccctcttctagttgtatttgaatcagtttataaacccttagaagattgtactgagtttgattatgttgctgctcttgaagtagggtctttgtttcttctgtttggagctagtttcttatctgaaatgtatattgtgccatcactttatcatggtagttgcattgctaacacttgttatttgatctcagagcggcttacctttggttcaaaagaggataagcgagttagaagaagaggtctgttcagtcatgtggctattctattctttagactagttctcaaaatgtttttttctattggtttatttcccaaattgtgttctgccaatgctggagctacttattcttcaactccactaatctaaagaacagggttggcaatggtaggtgaaacttctatgggctgccttgagaacaaccaacttcgagctacacgttttagaggataaagcaagagaagctaagaataaacttaaagctaaggctttggaagttgaacaggtgattattggcttttcttacttcacccattcctttaatcttctatccaaagcagaaattattaactattcttggtagttcagaatcatctctaagttcacttcagtttaatttctacaaaaattttgatagattcctttaaactttgaatatatatgtttggatctcagagaaccaacataaatcggcataaaacttgttgttgttaggtatttaagcatctattaatctatgtaactaaatttgttatgtgtagtaccaaattaccccacttttgtttggttttgtccttgtcttgtttttgtttgtccctttgatgtggtagcaaatgaaatctgtctgtttctgatatgtttgtatgaaaatgagttttagattgttgctgtcaccaaatgcttcaagctcttttggcactgacctacttcctttatcatttttagatgacagaagttgttacggagcagtggattcaggttcaacatcttgagcaggtttttaatttttgcctttaagtttctttcgcttaatgcagttgaatcttgtgagttgtgaccaagtggggtataaattcacgtcactgatgattgttcctattgcatcttgaagatgagagaattcaataaccgaaggcatcacacacctagcagatgcccgttcgtgaaggtaaatttcaaatccagctgtggactcccagtgatatgaaatctgaggaatagacaattaaaccgtcgtttaataatctcatagcctctcatttctcctttgtgtatctgtatttagctcatgagcgatatccaaagaaaacatctgcccaaagttgatgaagcatttgacattcactggaagggaaagaaggttctctctgtgcaaccgtatctcacaaaagccctgtcacagttaaaaagcctctgggcagctgttaccaaatatcaccaccaggttttgtttcagataatcacatttcacaatctccagtatttagatcgaatgaatctgtaaccgcgctttgctttgattctttatagttgcaaggcttcatcgagcatgagatggaaagaaccgagatcacagcggctctcgcaaacagagaagtggtgtttttcatggtatgtcagttcatatttttcagagcttgtagatggtttaaatcaatgtttgatttgtctgatccttaatcacatctgattaaaaatgaaatctccaggcatctgcactaattaccttcccagtgtttggagcatggatgttactctcttcctagtttggtttctggatgacatgttcaaccgatgcatcagcaatgttcagattggttttgcttctcattgctcaagaaattgtctagttttaagctttgagatccgtaggataatcctagtaggatcaattacatccgtgaacaaaccaaaatccggttactctgtggtttaaagtttaaaccagttattatggggcaaggtgcacagttgtatccaagttcaattgttggaaattgaatttgttattgaaaaaagagacaaaaccaaagacatgcagacaaaagtcaagtccttgttcgttgttttaccgttagatgtttgtcgtaagtaggagtagcctttgtatggtttaacgtgagatgattttactacatgtagtgtagtgaaagtttatatatacaagaccacattattggaaaatgaaagttattttactaacaaacaaattccttacacattctcacattctctctgcaagaaattcagaaattccatattgtagtacaatagattgagatcagtcattcatttttagtgtgaagctaatcaaagatcaacctctcttcaggataatgtaggacaataggttgagatcactcattcattattattatcttggtttagtttatacattttcagcataattttcttaactagttgtttggaagtttgatctttttcattatctaataaaatgagatgaccaaaaaacaaaaaaaacaaaaaatcttaatataactagttgttattgtagcatggaaaactacattttagtatgtatcccttaaattacaataagtcgagattgttgatgcaatggtcctacaaagtacaaagctcgactactcccaccacacgacctctcttttgtcggtcccattccgctagtcacgccacaaaatctccccaacactttcgagtttttgtctttgattgattgaattaacctcttttttttttggtcaaaccattattagtaaatcttccactttgtttttttcttttaccctttttattgaatttggtacttttattttcatcatatccttcttttatttgtttttaaaaaatgatacaatacatgctttcttagttatttcaatttcaaagaaggaaacatgcactttattcttctcatttatgttgggaaatccttttagcttttaaaatggttgataagctctttgtatgtctctacgtctgaaaacgtgaaaatacctactctctcatactcatccccgcaaattactcaatgttgcttgacattataacttaataacatttgtctctttttctccttttctgttgacaatttttttgtttgctttttctataaatcctagtatattttgttcatatatgttatctactacatgggaatctaattcaaaaaacaaaattcgatatttttaatactttttttttaagtgcatatcttagattgtagatgtattatgaggaaagaataagatacatgaggacatatagagtcaagaaatttaatcactgacaatagagactagagagattagtggcttagggtcacatgatatgtgtattggtgtctccatagtgatcagtgggattggggcaattcccactaaccctccctcaatcctcgcattattactcgcctctcaattcctccctctttgttttctttttaatatcctattttctttctccttttttggacatagtgaaaccacaccaaagagcaacgacgacaaagttttagtttacaacgatggttcatgttttgatggctcattcgccctggcttcttgtgttaagttatattgagacagtgaaacaaaaattcacatagtaacttcagatatcaatgttgatcggaccaaataccccaaaatctattattcttgtttgctcgtattataaagcaagaatgattacgagtagtacatgatgataaagattactgaatttactggtgcatttcaaatcagctttatataagtgtggttttgtctgaccatccgaaataatcaaatactataagtttgcttgaagatcgggaaagttggagacatatactataaagtgatttttacataagaaagcatctcgaggctattcaatgatcaacatgacactgttatgtcgatttgttaggggtaaaattaggaagaataatgtttataaacaacacacatttttctagcttctccatgttttctcggaatactaacaaaatgttttcttttatttattttaactatgattaattaaggtacttaattaaaataagtaattttggacgagatgtatcttccaactaatgctaccaatatgaaaacttttatgataggacttgaattttggttccaactcctaagctgctaagcaacaatgagtgtgacagtatgatacggatgaatgggaaaactacaaaagccttatctgttcctagtccatatttgttgtgtttccaacaagactactaaaatacgatccatgttctcatctcaaataaactagtcgataattgtaatttggtaaagttaacaaaccaaaaggatggttaataacctttttctgataaactaatcttataggcgagaaagctgagctacctctttgaaaaatcatctcatcctaatggacccaccatcaaccattatcacctatccagtccccatttccacctaacgacttcaaattaaaacacattaaaaaaagtccacaatttctaaagaaaaaaaggtaaaagaagaaagaaaaagaagccacagagcttagaatctttcaatatatataagctcacactagctctcaataaacccacaatatctaattgtctcttctcttctctctatcacactactactactcacatcatggctttctccactagaggctccctcttattcttcttcactacacttgttcttctctccacccaaatccatgcaagagacagttacttctttggaaaattccacagagaatcccccaaagatcaaaaccctaacagtttcatccctcttgagactagcgagaaaaccacagtagaagaatccgtcctcaacaagaaagagcaagaacaagatcctacctttgtccccgagtccggaaacgggtatggcttgtatggtcacgagaccacatacaacaacaacaacgacaacaaagaagagttcaacaacaacaacaagaacgatgaaaaagtcaacagcaagactttctccactccaagcctgagcgagaccgaagagtctttcaacaactacgaggaaaattacccgaagaagacagagaactacggcactaaaggttataacaatgaggagttcaacaacaacaacaacaagtacgatgcaaacttcaaggaagagttcaacaacaacaagtacgatgaaaattacgccaaggaagagttcaacaacaacaacaacaacaacaactacaactacaagtacgatgaaaacgttaaggaagagtctttccccgagaacaatgaagacaacaagaaaaacgtctacaactctaacgcttacgggacagagttagaacgtgaaacaccgtacaaaggttacagccacaacttggagagacaaggcatgagtgacacaaggttcatggagaaaggtagctactactacgacctttacaacgacagaaaccacggccattactaccggaagtcacacagtaaaagccccgccggttactattcttctcccgcgaccgagactaactacgaacagcaatcgtactcgtacggaaacaacaacgaggagaacagttttaaggatccgtacaactccaagtgggagaagaacttgatgaacgaacagcctgaagagtttgttgaggagcaaggcactaatcagttcaagccttgatgaagattgttatttgatttcctctcaagactactacactcttaaaagtactttcttttatttcaaactaagttatattacttatcgttgtttagtcaaactaaatcgttgttatcattgaaaaacttaaaagtgaaaacaaaaacaaaaaagagaaaggagtttttttttttttttagttaatcggtgggtttgcttttctatgggtttttgaactttgatgtttgcgtttgcatatattattcggtgaaagaaagatagtttatatatatggtgctactttatgttattattctcttatgttaatttaatcactttttggttatattgtaaaagataatttagataaagactgtatggatctcccattattaaaatgggaccaaacgtgactgcttacaatgatttataatgggggacatgaagatgcctcttcctccttgcgtaagtgcaaaagagaaagtaataattacttgcacaacaactatttaatcttatggatctagaaacatatattactccacttgattaaatcgaaatgttgtcgaagccacaaaaatcttctcaaacatgtgccttaatgttagctataatctcagccttgagatggatacattaagcctttgttacattcaatcgcgtttcttgctttcttggcatcaataggagggaaaatctgttctctgtacattcgtttattgaaaaatagtaaacaataagaagtttagtgtaattggtggtaatatgggtggaaaagactaacagaaacgccgggacaagtaaaagacaacgacacttccaaagcacttagcaataagaatccattctcgagtcttttacgaggaaaagaagagtccccattccgttaatcacggccaacataaaggacaaactaaaaacctcttttctcctttcctggatttattcaccttttctaaaatatattttaaaatcattacatgaatattaatatattaccaccatgccgagaaactattttaatttatttaccttttctataaataaatattttttttgttaactattttttatcataatgtttactagctatttttctcaatattccggtaaaaccaattaatgtagaagaaaactagaaattacggatttgacacgtgtcacttatccgcagcaagcaacagtttcacagagcttcctgtaggtgcagctgcatcagatccctcccttacgcaaaaccctacgcaaaagccctaaactctctcttctccaaaaattgaacaaaaaaataaaacaaatccaaagatcctacacgtccaatgtccgccgcaaggtccgtgttccgctccgccgcaagccgagcatcgtccaccgcatttagattctccgccggacccaagcctatgccgtcatcggcacggaccgcgtttcggatgcctaaacagagtcctctaacaaatcgcattttcaggtatatcttcttaacactgatttggtctcttagttcgttttattctccgttctgaaattgttttggttttgcgaattttgtttggaatgaaagatctccggtagaactaagctgttgcgtggagacgatgctcccttaccacactgccactgcttccgctttgctcaattcaatgctctcagtttcacgccgtggttggatcgttgatggtacttcactctcttctcattgcttattattctctatattgtttagtttcttgatgatagaataaagtttacatgcttagttgtctggtaaatgaaatgcacaaacaaaaatgcttaaagacaaatgtgtttcattttttcgataggtctcttgattgaattgaattgaattgttaccgagtttgatttgatttgagtgtttagtgtagtctttcgtgtgcatgttttagtggagagcttgctaagaagaaacctctttgttgttgaagatgtcaatcatagtaggattattgattagacaaaatgtctgcattcttaagtttgttgcataatagtggtaaactggtaatgatcatatgcttgtggatctccccacattacggttgttgttgttatgggctaggtttagagttgctctgttttacatagaaagttaaaacaagatcttaactttatttagtgtagtgaatgtggattttttatgtgttcatttattcaattaattctaaacttctctggcatctctcagttttcattatgtgtgcattgttgattgggaggtagctctattaggctttttctttcctgaactcaaatttttttggatcctgagttttgagtttctcgtgcaattgtgttattgaactttccttatgcatggtttgtcccagtattaagttcttaggtatatgcccttaagattttggtttttacgaacagaagtcattttttacagatctttttggcatctagaatactccacctctaaataattggacagtctaggaaaacatactactctaatagaaaaatcctttagcagagtctgtcctgtgtcatctttttgtacatatctttacccagttaaatccaatgtcttgaatccattgagaaaaaatcaattttttttgctttgtagggctagacgagactagatgaagatccatcaacaaaagtgatgtgagtcaatcaatttatcttctggtcttggagttgggtctttttactggatttgccatcatggttatagagtttttctatatggatacataagcgatcgtttcttagaaagatgggtcatttgtagttgattctctgcgatagtgtggtctttgttaatgcggtcaaatatgcttgaaatattgacatactgctatattttctgaatatcttggactagaacacttgtcatcagcataagaaccacactgatacaaaaaattggtattcactcagattgcaatgatgatgtatgatgaattactggggagaggtcagcgatgcatgcagtctaagacaaggtggtgctgaaatgagacttttcttttgggtttcttgaacttgatcttagggcagtttgccattagaagtgataataattgagttacgtctctaggcaattttcttttgtttttgttttagctcgataaatgagtcgaaagtttctaatgtagtgtctgtatcgtttgttttctggtgttgtagatggatgactcttgttctcaccattgcagtaagcaggaagattttcttaagagttctaagaccccttttgttgattcttaaaccatatctgcaaatgttttaactattttactttataaatataaaagtgaatcagttttcatgggttcttacatcgaatcgccttctattgtagctcgtatgcatttggaattggaactattttctgattcttttaaaattgaagggagattatgttccaaaattgaatacagcaagcagctagattttgactttcatactattatgtatttaaatcggaaaccagaattatggtttgaagaacaagaagaagaagaagaaataacaccacaaaggagccagaagtcaaagcctgaacatcacacgtggccagcgtagtagtccacacgactgttgcaactgctgaatttagtaaccaatttgattccttgacttcagtgactcgggaacgaacgagtcttaaatttggaaataaagaatcattttccaaaattggaagcaagatctccgtatatgtcagtttcgatgatccactttttgtgggagtacatgtgtgcacagattttatattggattataacaatacacgaataaaaatctttgaattacctattatcatccttgttcccgcttggtctcatccctaaagaggctctagattctacacataagaccaaatacattttcgtaggagacaaaatgtagattatgtatgctcatctctaactacagtatactaggaatgctcgggccaatgataatattgatatgttaatttgtgcttattattgtacatctaaaagaaatcttgtgtgtttggcttagcttaaaagttaaaatatgtaatattttggttatcttttgtatagtcacacattttgaacatgcccgaaaaccagcatgagagtttagaaaattcgaattagctacgttttttttttttttgtttcaatcatccaccaagatatccggcgatgaatcttcctataaaataccaataattgatacatgcaaaatcttaatttctaaaagtgtatcattataacaaactaacaatacattgaggcggaaataattttagaaaatcatatcaaacttttaaggaaatgaatgattacacacattcactcatgcacagatacacacacgtaaaaacgttaattgcaaattaaataattgagcaactttgaaattaaagcaactttgatttcatgatttgttttcacaccatacctttctcttgctttcttgcaccaaagctgttcaacagtaacctcacccttcttcttcaaaaacttcaatcatgttccattctctttctctctctctaaatctctcccatgggttatctctcttgcaacggcgaatccgccgtcgcaatctgcgatacttataactggaatcctcgtcgacgatctaaagtaccggagaaacgtcatcctcctaagcttcgggttttcaactacgacgaactcgccgtcgctactaacggcttctccgccaataacttcctcggaaaaggaagtcacggcagagtttacaaagcagttctcgacgacggaaagcttctcgccgccgtcaagagaacaacaatcaccactaccgttggtaataacaataacaacgtgagtcaggtagacaatgagatcgagattctttcacgggttcgtcaccgttggatggtcaacttaatcggttactgcgttgaccaccggaggaaaacaaagctgttagtcgtcgagtacatgcctaacggtacgcttcacgatcagttacattctcgtagttcgttagattcacggttaagtagttggaatcggagaattaaacacgcgcttcagatcgcgattgctgtccacgctcttcacaccgcagagactcaagtgatccaccgtgacattaaatcgtgtaacgttttaatagacggtgacggtaacgctaggttagctgatttcggattagcattgatcggaaacgttgacgatgagcgtttgaaatatactccgccggcgggtacgttgggatatttagatccgtcgtacttagcaccggcggacttgacggctaagagcgatgttttcagctttgggatattgttgttggagattattagtggtagagaagccattgatttgaattatagtccgtcgtgtatcgttgattgggcggtgccgcttatcaaacgcggcgattacgacgcgatttgtgatttgaagattaagaaccgtccttattacgccgtgattcggaagttggccgttatggcggctaggtgtgttagatcgacggcgaagaaacgtccagatatgttagaggttgttgagtgtttgaaaacggtgaggcagttatctccggcgtggaataaactgcggcggaggagtgaagagagatcggaaaatgttttggcggttgaggaagagaaggaagagattcatgtgaggattgtgagaggaggaagcaggaagaatcggaaggtatcgaacgtgacgacgagtgtggatgatgtttacgagagattagttccggaggaaacgctgccgtttcgtcgtcggaattttgtgctgagatcgagatcagtaggagcgaaagttggaccggatccatacgacgggtttggtgatgagacggtggttacaatgagattacttattgagaaagaaagaccggtgacgacggcagcgatgaggctgagtaagtcgaggtcggtggggattgtacgtagtcataaaacggcgtcgcggaagagatactgacatgttaactaaaagtcagcattttgacaggctatttgtttgaccgttgcctgttttgttttccacttttttctttctatttttgtttttttctgtctcatgtgtttgtctttttttattgagttgatattttggtttttgttttgttttggttgttgtattgaataaaattttgtgtttgctacgaatttttcaaagtaattactgaaaaagtttttaaaaagtcagaaaggggaatggaatagactacttgaagtcttgaacattgtaaagttgcatagaaaaatgagagctgaatctttcctttaaaaggttttgtcaaagatgatgaagttggtctttaactaaaattttcatgaatctttttggtccagtttgtctcctctctcgcattaaaaaggacagaatgtgtggagtttcgaagccattgttatcgaagaagatttaaagcaacaaggaacgatggtacttttgtgattcattgaacttttttaaggagaacaaaaatgaaactggttcaatttcatccaaatatgttctacacgaatacatatatactatatgtaaaattcaacaatatcatatacaacgaaacatttacatcaacagataaataaatttgttcacaacccaaaaacaactgattaaagctaatcacaaactgaaatctgtcaaaatccaacacgcacactacacttgtgttctctacttagacacccctccctgtcatttggaactgaataaatgaatctctcagaccagtgagtcttccgatatgacagtgagcagagagtatttagctttgattgagatcttgcctgcctcaacacaaagtttagcaccagtcacaacccaatatccaggttgttcctctggacctctcatcacttccttcgtgtctacaagactcagcaactttggtttcacaggcggtgatggccctctaggatacactgcagagtttatatcaatcttagactgtggcttagttgttgccgggtttggacttaatcccgtgcttagtcttgtactgatcatcgagaaaacaccggatttgcgcgagtttgttgaaagattgtcccagcacgatttacgtgtaacagctgaagcatctagtgagaaaccgagcctcaagaagagaactttcctcatccccattcctttcacttctaaccaggctttggttacaatagaggcggtgtcatcagaccgtgctccgttgtactgaactgggtaggtgcaaacgtgtgagaatattccccatttcacaggtacataataccctttttcaactggttcctcgatgggttcataggtgtcatcgtgtgagagatggagacttggaggacatgcagagaggtgctgcaaatgtattgctagatgatttcctttctttccctcaaggaagaagcgtagtccggttactggtcgctcacctgaatcaacctacacaacagttttcaaaaaattggaaagtgtaaacttagcaaagggttatcatttacatggatcaatgtgaaaaacaaatgtacctttgatgtgttgacgtatagttttggacccatcaaagagaactgaagggatggagaactttgtttcgagcggcgtagtccaagagggagatctccatacactggagcccattggcgtggaagttgaaactcaagaaactgatgcaactcttctataggtggcttatctacaacattttaaacaaccttgttacctgaatgaaccgttgagtacctaagatacaaaagccaaaaaagaacaaaatactcacatcggaggtataagttcactgcatgactaagaaatcctgttcctgggagaccgctcaagagtgaagttataggaacaaaacacatcgatataacgttgggtgcttgtgatactgttgagagccatcgttcatgactttgccccagatcaacacctcctcttctgatacaaaccctcataatctcctggagatgcaaatacacaattattttaagcttaaaaagaaaacccatttgactcactgcatcaatagtaagaaatagcgaacctcgttcttggtatgcatgacaacagcagagctaaccgaggtaccaaacggttgaagtccccattgtagaagattctcctcctgcagaaccattaaaaacatgtcaagctacattgtgatttgaacacaacgacactgatagctagaccccgactactagactctttacctttggcttccctgaataaacagaagcaggagatttactttcaacaggatcaacacaaaatctttcatcaccccaatgcttcaacattttctgaatttcctcaggctcatgattcgatttacgcatctgtttcacatgaatgacatctttacctcccatagtcactccaacaacaacatgagtaccatatttctcaataaacctataaaaaaaacaaaaattcaatctcactcattaacataaactccaaatcacacttaaaaactttctaagtgaatcatcaaaaccatacccagcaagtgcagcagagtcccaagaagaaggaacctcacgtttcacttcatcacgtagtgtcaactgcttcctaacaatctctacactatacaaactaataaaccaaccatcataagctaaagtcttaacagagctcgcatcttttggccaacatttactaaacgcaaacatattattaaacatccctgacggaatcttcccggagagacacatatcttgattaaacttctccgacatctacacaaaaacaaaaaaaacacactcaaaaattagggtttctaaaaacgaaaaacacgaatctcagtggattatttagattttaactaaaaaacctgattaaaagagagtatatcggagcgtaatcgagtacgttcgcctttatcgcacttaatcgagctcgagacgttgttaacgacgataccaccggggaagattaagtcacggttccgagtcgggtcgatttcgactaacctggaaccgtcgggtgtggttttacaagcggagaaacgaacatcggagcagagatcgtaacctaatccgattacagagacggctttctcggcggcggagtgagcatcgaggcgggtgaaattgttaaaggccatggatcggagagagacgatgatgaggaggaaaattcaaaagattgtggctgtgtgtggtggtgaagaagaagagaagcgcgaaggtattgaagtggtcaacggtgtatggctcaaagtgaaatactttaagaatagttttggaaagaaaatcgttaaaacattatttagtcaacacgccattactttgactttacggctaaaattatgtttgaatttcggatatggaattatatagtgtgaatgtgaatgattttaatgtgacaaaaggaattataatattttattacctaatttgtcttaatgttgttttagtagcaagtagattactgattttttttttaagtttgttagaggacacttaggcagttaattaggctgatgatatttgactaggactatgtaaaatcagcagatttgttttgtagttttttgtccaatttctaacactaacgaagtttatggttattgtctagtgtgatgtctactgttctaattaattataattttcttagttatgattttatcaattatatcatctagtacaatttctttgaaaaaatcagcttgtgtcactcatattagtgttttatttaacctcatactaatgtgttcaattatctaaatcattatcaaactctatttatttatttttgaatgaactctaaatttagttttatgtcttttatcttttaagaactgagagatctggattaatttcgagttgtcatttaatgtatactcaatgctcaccacaattttttttatataaaaaaactcgaattaaactcattcttattaatccttcaatcactagacagtctagactgagttgttaaaatgaagtcttatttagatttaacctattttcttaggaaatttagatgtgcccaccaccaaaatgatatataatttgaatcaagatctgcaaatatgattttccctaatataaacttctggcggatgtcatgaagacttgataccaaaacatgtaacatgaaactttctttggtagacttttctcataatgtaaggctgtgagacgttacatcatcgactttaatatttatttccatgtaagattttgtcatataacccttcatatgttcgttttgtttgtgtaattgggtgtcaaccacactacagttggtatatatagcaacgagacttcttacacgttgttcgtcgcatgttactgtgtgattgacaaagttgcggcgtcggaccaaatatagtaggattttacatatatttctataaagtttggatctcaaattcgactgaaaaatgtggttgaaaacaatataaaaacacatgaatttctactagttaagtttgttgtgattaagagttatcaatctttggcttcttcaatatttactgtaaacaaatgtaacttgtcatcggatgaatagtggatctgagaaatttggcttcacatcaaaacaatgtatacatacatacccttattcaacaacttatagttagaagatgtatataatcaaacgtttactaaagtaattatttgagtattgataagtatttaaacgatgttaattggatgaatttaaagaaattatatcagttttatagatacatctagagatatcaatgcaatttgaatttttgtatttaatattaacaaggaaaaaatactctacgatgctatgaaacattttgttaagaaaatcacctaaaatatatttcaataaaattcctaacgtgtggttgaacccgaaaagcatgtgtaagacttgaagaaaagtcaccataccaagttgatcttttgaattctatgtctcgtgttcaaattacccaagaatttttggttatgaagcgtttccttttgactcgtgttcaaatttatgtttcggaaaatgctaaggaagataacaaatcctttgttagttttagtcatagctactttatgctccatgttttttcataaaaatatttcatgaactcaatcttttctcataactgaatacatgccaatgttgtaaagattatatatatactacacatacatggtttatctagagagtggaacaagatgtgtatatatataactatttgtatctactacaaaacataaacaatgacattattcatatgcagtaagtacctacacaagctttaatcagcactaccttatttatacaacacccatatgtcaaaagttttacctgtaagtagcaaagttgaagaacatccaatccaacatatcttccggtttcatttcggcttcttatgtctctgtattggacctagactgccatgaggaactggcccgggataaggaaaacctcctccgtaaaccgggcttgggttccaaaacccataatcgccatacaactttggtaaaaagctcttggatttcaccctaaacgaaggatctaaatctagagatggagatttgttcgtagagatagaaggtcttgccattacggtcgagaaaatgacgataacgaaggtagttatgagaaccatagacatgttagaaacatgaagacgcataatctccaaaactcttacgatctgcatgatgctcctacttattttgagctatttaaaaacagattacataaaggattacagctcatatcttgttaaattaatgtttttgtataattatgaaactagcttgttttatatcaaacgtataatgtaattaagataatgcctttgaggattcaatagttgtttgtttatcacacgtcttatgaatgataaagatcatgagggttgcatgtacttggttgtttatacactaggaaacgaaatcagttggctattgattctcaaaaatagatcaaggcccagtagtatggtaaggcccaaatattatgctgacttggggcatggtttgttttcacacaatattgaaactatagtttacaatgataccatcatttgatttcataacaaatcaaatttaacatagtgaaatcaaatttaacagagattccaaattattattatcatttcataacaaatcaaatttaacataagttctatccccaaaaagaacaatcggaccataaaagcattaacaactacaaattattttgaatttataagagcaaaaaatattcttcagacgcattaaagctttaactgtccattttctataagaaacaaaatgagatgtttttgaagtaaatttagtttttaaaaaaaaagagtttcatgattcataatattaatataacatgtgttttaaatgatttattttagttataaccatatgatccgtaccgaataaatgagatttagtcaacgacggacacgctttgatccaaatgtccccatcttgaccacacgaaaagatccgaagtctcctcctttgttatattcccggcaagttcaataatttagttggccttaattgtgatttttaatttgtaaagatactttataacacatgtgagtttcattcatgcatcaaacccactgttttgtgcccaacctgaaccgttaaccttgtattagtattatatgccactgttatgattaataccacaccaagactatccgtattagttatgattaaaaaacattcagcgcgtaagacgtaattacatatctaatttggaatagtaagttgtccaaaagaaatgaatccgatcgaccaatgagaatgatacgattaccgtgtgtaatgtggggcctatgtatggatatttttttatttctatttttagttacaagctctttcacaagaaagaaaaataaaaggattttattagctatatgaactattagaaattttgtttgttaatttcataagataaatatatttgatatttttataagtagttatagtttgcagtctttattctctatgttacttgctatgtgtttactattcaattaaaacattttaactagtgatttttttttttcatcacctagtgatttgttttggtcctagtgatgatctttttggtgaaaactattgcataaattagtttccggtagtccgaccgattttcgatttaaatgcttgatactcattaatacccctggaaaagaaaatatgtttctatgaagaccaagtagttatggtccattcacctcaaagtccaaaatgcaattaaataatgtgaaattgtgaggagaagaatctatcaaactttgaaatcaaggtggagcaaatgcattgcatctgaaatgtgggcaatcctggaaaaaggtaacattatcccatttttatattttaaacattagtatcagtattagtattatagtattttatacttcgattaactatgtaaaatatgattctcatcagtgtttgttctccgacaattttgcagccatctgtctttggtttcaacccgatctttctgttttatggtctatacaatgtgtgcattgtttattttgttgttgtcaaaatgtgtctgttttaagtaacacataagtaagtaatcattctttgttttaaaaaaaaaatacatatatttgtttttaagatatggtttaattgttctaccaattattgagcgtaaaggctgcatgtgtgcttcgtcaagccatccgcagccgcatgtgagaccagtttaagtatttgcagtatttgcaatattggctacgattttctgtttttttggaagaagaagagttttcaaaaaaaatattttcgttttgaatcatcaatataaacacatagttaaatttgggtgaatattttaaaaagataaacaccaacctaaatttatgaatagctacgcaacctcaacttcgtttaccaagctatgaaaaaaatagaattaaacaatttggaggactaattctttaaatagaacttgttagaatatattatgatttgtttgtgtatatctatactttttttaattgtatatttactcaaataagatctttctcaattcagtcataccatctagaatgacaaaagattctttcatcttacatggtattaaaatcctttgatctttaaattctataaattacagcgctgtcttttttctttgctatgccgctgctgcctaaacaaaacaccaccaccatcatatctataataaattaaaatttataataaaaacaacttaaaattaatctgataaaaaaacaaattaacaaatatcatggttggaatatgtttgttttctttcgtatcgtttgctttatcagtaaacaaataattgatttttaccattcgcgttagtagttattaaatatttgataagattattgtgacggcaaattttattggaatatataaataaacatattaaattttaaatttaacataatactatatataacgatattattatattttcagcttattaaaatagttataaatttttaaatggttagatttatatttactgtgttatatatagtgttaacatatcattcataaatatgatgtaaaaatatatgattgtattaaaatttgaaatattttctctcgtgacagcttgccaactatcaataattaggaagataagtaattgtatacagtatttgttttctttactactcaatacatgataaatttttaatacttaaagttatatataatttcatttaataataattatttcaattgataattaaataataacacatgtcatatgtttgttaatttatatatatagagaaacattggtatgcaactctccatatctttacttatatttgtatttgaggataaaatttgtttgaaataattactatgttgataaatttatgatatttataagaacattaggaaagtttctttttgaaaataagcaactgattcaattttgtatcaaatcatacacttaaaattatctcttttaaaaaccagatttaaaaaataataattagatgaaaatatagttttttttgtcagaaatataaattataatttgagaatgtcattaacgaatcatttctagtaataataaatatattttttttaatttttctataaaatcaattgaaagttgttttcatcaccataagtcaattgaaagttgttttcctatttctttatttttaataagaaaataagaataaataataaaaacactctgaagtatatttttccaaaacaaaaaatcaaaatatgacaagcaatatacaataaaaaaagaagcaaaacatatttttatttttatttttttatagcaaaatataaattgtttccatgcaaagcctaaaattaaaaacggtagacccatataaactcaataataactactactttttatcctttcctctaaaaaataaaagatgacaacatacttaatctcggattttagtaacaaataattaaacagatatacatatcaaaattaaactcgcatttaatcaaaaataacagatctaaaatcattatcacacatcgtgtctgtttacagtttgctaaccaatagaagcagacaacacaagtcaacacgtgtcaagcaagcgcgtgggctcctcaccacacgcaatatatagaaaatccaaataaaatcaatcaaaaaattaacaaactataaaaaaaaaacattaatatcaacataataaataaaaacatttaagaaaataaccactaaatagataaaatgtcttttagtaataagaaaaaaaaaaaaaaaaaagcttcttcactctcactttcctctttcgtggagacaaaaaaaagaagccacgtaatatggatttaattaccaaaactgccactcggccgcccctttgttgacttatatttgtcgtctcctccttataaatgatgtcctcacaaacttcttcacataacaaactcatcaaacttcctcagcgtttctttttcttacataaacaatttttcttacataaacaaatcttgttgtttgttgttgtcatggcaccgacagttaaaacggcggccgtcaaaaccaacgaaggtaacggagtccgttacagaggagtgaggaagagaccatggggacgttacgcagccgagatcagagatcctttcaagaagtcacgtgtctggctcggtactttcgacactcctgaagaagccgctcgtgcctacgacaaacgtgctattgagtttcgtggagctaaagccaaaaccaacttcccttgttacaacatcaacgcccactgcttgagtttgacacagagcctgagccagagcagcaccgtggaatcatcgtttcctaatctcaacctcggatctgactctgttagttcgagattcccttttcctaagattcaggttaaggctgggatgatggtgttcgatgaaaggagtgaatcggattcttcgtcggtggtgatggatgtcgttagatatgaaggacgacgtgtggttttggacttggatcttaatttccctcctccacctgagaactgattaagatttaattatgattattagatataattaaatgtttctgaattgagtattatttgatcatcatctaagtagaagctttaagtttaagtggtgccaataatttttttttttttttttggtcatcagcagatagttttaaagaattttttagtgttgagatcgtgtttcgttcagatctgctgatgttcttttaaatatcattaatgataatcctgatcaactaaaatgatactttgttttggtattaatctctctgatgaacatataaggttgttgatcttatgttttttacctatatccaattggatttgaggaaatagtaggattcttaattatttttttaataaacaaatataatggagataatactttattcaggataatgagattattggtcaaatataaaatttgctgttttgaacaaaagcaataataagttatcttgctcgaatcaaggaacacaagctaggacaagaagctctaacttttctttgtaaaattgttaaacataacggcattagttgtaagaacgctaattttttttttttttttaatttatatatatatatatatttttaataaattatagataagcaatctataatttatattatattcaaaaactaaaataataagttatcgttttgttgtattgtttcttgttgttatggaaagtggcattcgtagatatcttatgttaatcgttgttttaagaaaaatatagattgtttatctaaattgtatttgggtgtagtctataccgtgtataacacactatttttttttttcgttaaaactcaatttacctgaatttttttttttttttaattaagatgaaattttgtatatcgataacttatatgatcatttcttatttaattttcatttttgccaatatggaaaatgaattgtacggttttcattcttagattataatatttgttatcttttctatatatgaatgtacgattttttatatgcgaatgtattttaacttatcattgaccaaaagtctattatagaaaaataaaacatagatattgtgtcttttaatatatctaaataaagagaaagtcatttatacatgtatagttacttatttctcctaacccataatttttcttttggacaaactcctaaccgatagtttatacacgttttggtaggaactataaataggtcgagtcgtcgagaggttagccatctttcagatactaatctttggatttcctctttattctatatcagtttggggaatggaaacttgttggggaaagcctgacattagatagaggcggtagtctcattgctaaaaacataacgtctgattatcggctgcaatcctatatggatactggccatttcttatggttaaatgttatgttctgcaatgagagagttttgtcctctatgtgagtatcaatttttttggcttgagagattcatagggagccttattttttgtactggccagagaaagcttgtatggtcgatttgtatgggtgaagttaagagtagtgtagcatctaactgtcttttgtataagtcggatcaataatggcaaaatgttagatgaatacagtagtccatgagtataggtttgctcgatatatatctcatttccatatacatactttacctacaatatctgtatcaacgttaacaaaactgaacttggacctcgattgctaaacagcccatcaattcttttggcccaaatattaatgtttattgctccccccccaaaaaaaaagattactgtcaattgtcaacaatgtccattgcctttcaattatcttatataatataactagatttcaattagcttatataatttttttgacagaaataatcttgattttcttagcctatcagttctatatcaaatctcagaaatccttcattttgaatttgttgattctcggagatgaagaaatcaaatgggatacataaaactaacgattagttcctcttgaatttttttgagctaaaggaataatttttgaagagattagccttattacctaaattcatgggttaaataggcacacaatatactcacatagagcaaaaagttaaaaactcagaaattgtaaaccagaaaccaataatttccaaaaccgcggatagtttgttgggacttattttggacacatatcttcgaaccatttcatacacacaaaaggcattattgattataaacctcaaaaattgatggtcggccactgccgccacactttcaagaaaaatagcactaaattgttataagacttttttgtttgttttgtcaaataattatataaaccttaggtataaggtttatgaaaacgacaagagacacgcaaggaaggactaaaataaacagttaagcccatataaaaaaaaagtaatgtagcaacccaaagttttgaattgatttttcactaacacaagcgatatcatgcggcggcgcgtggggtctctttggccaatttggtaaattcagttgcaccgcagaaacacatgcagaggttcgtcgtcatagcgaacatatgtttaaattcagattatacaactggtttattaggcctaaaacataaattttttgttaggttctaaatatttcttaaattataaaatttgtcgctaaactctttttgtctttctcttgctaaaagctacatgaggtcgattacaaatcgcttatgaaatacgataaaaagaagttgcaacgaaactgttagaatttgatcttttatgaaagcaatatgcataatgcatgatctttgtttagtcaatacatatgtctaagtgtctaacacatgtaacagttctatgactgttttatagtctcataaaactacacgattccggttctacatataaaacataaacataaaatcttcacaatctgcatgaaagttttgatttcgctacgtgagatctcctttagttaattaatttgacttcttatgatatttgattatatcaaacatgtttgtttcatttactactgaaatttgcgttattttaagacttctgtagataaatttgttatgtgaatttgatatttatctatataggaccgtcaaaaattttatttattttatatttttagatgcttctatatatatatgtatacacgcataacatatataagattggtaaacatgagcagaaaaattataggacaattaaacttcctctaattttatcagaaaacttttgttcgaattcatatgaaaattttcaaaataaataaaaaaatacaatttatttacaaactcaagactcataatacacatatcttgtccgtaagtgaataagccagtccaaactcacacgcttgctcagcatttacgtctctcattagtctctatctcttttgtttgtttccttcttttctcagtccgtcttttgtcgtgatttaagagagaggcgcgtgagtcaaacaggacactagcaaagcaaacagctgcacaagtcagtccgtacttcacgacacgccatagaatacgataagatttttaaaaccccctcgaaaccgacataagcgacggtcgtaacacgatccacaaacataattagatccacgttcagacgttgttaagtttttgtgttgctaattaagaagtttcttgttttttccgcaacatatggatctcacaacaacaatcgatctccgactcttacataacgaacaaaagaaggattaaattataaaaacaagtctactaactctaacaaaagatactatttgctaaaaaaagaaactaaagtagttccaccgaaagtggtctcaaacggcgccgtatagaaaagtaggcaaaacggcgccgctatatccatctttatcgtttgttttcaaagccaaagcggcggaggctcgttgaggtcaatggctaagccacgtctcaccgtaacaggggaaggagaagaattcatcatcggaaacccaaccacttgataaccaggcgatgacgtggctgtgttaggcgaggaggtgaagtaaagcggcgcttctgtagaagagtaatctgaagttttgtcgtttagcacaccggttcggagaaaaatgcggtggtgttggtgatgatggtcggagcttggaggaacaggaggaggcgcagcgaaccagagctgttggtgttggtggggttggttatttgcggcggcggttgcggctgagggagcggaagggaggtggttgaggtcgagagagagaggagaagggaagttagttttggctttgataccacggaggaaacgagcagcgccgtcgtaagcaagagcagcttcttcgggagtgtcgaaagtgcctaaccaaaccctagttttcttccaaggatctcgtatctcagcagcgtagcgaccccaaggtctctttctgactcctctgtaatgcacctctcttgcacacgtcgttgacgccattgttagactctcaagaggggaaatatgagagaatctagagagaaagtggagaagagaagaaagaggttttgctttgttggctcgtttgacccaaatgagagagagagtgagtgagtttaaagagcaagaggtgtgtttgtagggccgcttgagaacacccgtaatcctcggcttcttttgacgattatctatctttatttgttgcctatacgtaatatatatggcaagttaatagtaaaaacaaaactgaatagtgtttgatttctaggatcgaggttttctctggggtttgcaagaatcaagcaccgttcgatcttttgctgttgggtgatgtgacggtggtatgctgagagattgttacacgtgggtgttctacaccaaaataatgttgttttaataagttgatgtatttgaaaaaatacaataggatttctcataaagtgaatacttctagtggtgagtggacttattctaggacatgaaagaaaacaatgctaatcattcctttgagtgctaatactgttttcttatctaccatttacaacttctgttatataaaaaagatttgttaggtaatggttagaaataaaatattttagttctactctccaaacaacctcattaccgttgtaacttatggtaaattaactcattacttgctagtgacgataatgccatactatgaaatttatgctattataaaaagaagatagaaagatcatttttgcataggctctccaaacattttttcataattcaagtactttgttttcgatcgtaacaatctcgatgctttttctcacagcaaccattgatacaaaatgatcaaagaaaaaagaactaaaaataaataatcttgtacatttacgaagaggaaagaaaaatgggccgcctctttgactgaacctgtggcatagggatgctgacgtaatccctagtactgataatagccatctctctctatcttttgtatctttcactctattatttgacaagtatttaaatgctctcttttggggttttattggcacccatatatatttatgatgcacgaggacaaggctacaaggagatcattaaataaagttacttgacacaactactctatctttagctctgactgattttgtttttctttttgtccaaaattcattagcccatcttatgcaaacttactatactctctagtctatactaatagagtagattacataggctctttcttttccctctaaaaagtgacgtagtttaagtctttatattgtgtaaaatatatagtaatcataggagtcaaaaatttatagcaattgaagtggcttataattttcagtaatagacaatgaattaaaacaaattagttagaggttttttgtttttgttttatcaactgaagttttattagattaatttgtcttttaacttctctatttcttgacattttgtaagatgtttttgtttggttttagggttatttaaaaataaataaaaaaatctgtgtttcctttcacgtgacaaggcttagggtctgtcgttttgattgaacaaatgcattggtccatatctaacaaaatttatacacgtgcgaactctgatgtctgacttctctctctctgacatatctaattatttaaattaaccctacctataagcacagtaaaaaaaagagagataccccaaagctatataagctactacagtactaataatcattttcaagaaatattttggagaaaaatgtgaatgtggctttcgtgttcacgtgagcctgtgatacataagagctttatgacgtgtctttgtagtagcagctaggacaaaaggagcatcgtcatcaagtggtactgactggctgcctcctacaaaaacagaacacaactcaacactcacacgaaatcatgactttgatgtctctctgcttacgtgtcttcttctcattccatgaaccccctcctcctctctccccacacctgatctgactgcactttcgcgcctcttttttgactattttgttgctttcttatctttctttttttccaggaattacttacaggtagtaacttttacgttttaccatcagctagctctttttactagtcagtgtgattcacaatttcgattagaggtaaaaaataatactggaaaattttagtttaatgctcttgtagctgtggaggtttatttttagttgacaataaatcacaaaatttgtccaactggattctaatcttcgaggctcatatctatcaaaaaacaaaaatgaactttaagagatttgttagctttcttagtaaccaccaaaatccttaggaaagctctttaactgatgtccacaaatactctctttgcttctgcaacttcacctggtgactctaaaagccttgcaaaaagaaagaaaaaaacgataagccaaaatagttagaggaatatataagcaatgggctttgatcaaaccaacggggaatagtttcttattaccttgacctgttccagtagatttttggcacgctcgttggttttaaagtgatcgcgaacaggctgagacaaaacagtaacaataagaagcatatcattcatatacataaaattaatgactcggacatcaagtaaagattgaaaagagacgagtttcatgttccatgatgattgtactgatgccagaaacttagagaagaagacgctttttaataaggattgcttgctcattgtttgttgcagagtatcgtcatttatagatggaaatgtccttacttgcagagttatattcaatgctttcatcagagctttcttcagatcctcgggatgtagctcgccggtctcgtagtcggcgacaatatcttcaaagctgttgaaggtcctgacagttaaaaagaatttcaaagatcagtctcagaagtggttatgcagataccaaatgtgatgcagaaatccaaaagttgcaagacttcattcgaactactcacttattgccgccattcttttcactttcaaccttgaactcattgaatcgtggtagaacaatgtatttgacatactcgagacatggattgccttccacagttttcggagggcaataggctttgctgatcttctcattaacatcagcctggaagacaaaagatcattacacaagtttgatatctacaaaagctctactctgttctgcaactttatagctactagtttacctcctcatcttccataaatattgcagatgatggatcacttttggacatcttttcttgtccttgttggagaccaggaagcatatctgcaaagccaataagctattaaaaacagctcaagatgatgacagcactggaaagaacagaaaatgcaaagagacatacggtgggacaagatgatgggtttatttttcctcttaatgtcagcacagtattctcttgctagcatgtttacttttcgctgatccatcccgagctggcaaatatcagcctacacaggtcaaagaacaagtatcaaatatcaataacaatcatagaagtgtatatgtattatataatccaaaactgcatttaagagtacctcaagtaagaaaatatccgcacactgcatacaggggtaaagaatttgagctgcactcagcacctcagtctcactacgtcccataatctgcccacacctgtaaggaaaggtgacatatttcattcagatccgttgtcattgcaattatacataaaccaagcattgggaattaattacctcaagattcgacgtaggttgtttctacgagcaatgtccatcacaagaggccaatacttactccccttgccatttatttcgtctgatgcccaaagaaactctactttgtcattgttcatcccacctgcttgccaaatttccttgaagtattctcctaccactctaattctctccaagtcacctcccaacttgttgttcaattgagcaaaccaatctgctatccaaattttcacttggcaaccagctgaagtcaatttgttcacattggtgaccttcataactccctgttatggaaataccaaaacgagacaagttataagaaagttctcatgcaaagaaatatatataatcaaaacagcaaaaaggctttcagttttcgcaagtaatcttctatttcaataaaagttttatctatataagtacactcatctatcctaatgaacaatcttatccttcggattataaaatccttcaaaataatcacatagaacggaacaaactattaaagctcgacaactctcaagctgcgtcttcaaccttgactaaacatttccaaagaggcttaaattatgagagaaatctcgcatcaattatgattggccactcagaatctttaagcaatataaatcaaacaaaactgaatgataaccgacctgggcgatgtgcatccttcctgatggttcaaaaccatcgtagcagataggagcaggcttcttggctagaagattcttcagctcatcctcttgtatgcattcctcaccaatactcctcacaatcttgtatttcatctcggcctcctcgctcatcctgaagtaataacgtcctaatcagctaaaccacaagtgcataacacgataggaaaacgcacaaacatattgataaaacatagtagaacttgaactagagtctgtgccttgttttcctgattaatctatctaaaatcacaggaggacactattaagcaactaaagcaagaaaatctatctccaagtttcagatacgagtcacaaagaaaccaaattaaatgagaaaacaaacattgaatactcctaagtcatttatcttctcggacactaagcaacggaacatgaaagaaattgaataggagatacagaagaaagtcaagaaaccactagaagattacttactgtaatccggcggccgaagaagatgctgatgtgttgatggaaagatcctcctcctttgtagatgaagctgttggtatgactctgacagaccaataagtacatgaatacattaggttttggttataaaaagtttcattaatgagagaagttgctaaaatattgccatctgagtatgcttcttgctccgtaatttatttacctggtgactttgtaaccctacaataacacatgataaaccaaaaaggagagaaaaattagaggttgcgtatgaatgtccaagcagtagatctataagtaactgatggtacctgaaacatgagtggaaagagatttttattaccttgacctgtttgagcagattcttggcgcggctgttggttttgaaatgatcacgaacaggctgcaatatgggtaaaaacagattaaaactatccaaaacctaaaattaatgacctaatctcctctaggaggtaatattataactgtattgttgcaacagaaggaaatacttacttgcagtatcttattcaacgcttttgacagagcgtccttcaaatcctttgggtgcaactggccgctttcatagtcagtggtgatgtcttcaaagcttttgaaggtcctgaaaaatgccattccaaaagttagtacttcgcattgctagataaactgacaaagagacatgtatactgagaaaatctgaccaaagaaatatttcatggcagccattagttagagattaaacccaggaacagaacgaaaacacagaaggtccataaaaactagaaaaactcacctgttaccaccgtacttttcatctcgctcaactgtgaattcactgaaccagggtaaaattatgtgcttgacgtattcaaggcatgggttaccttccactatatccggagggcaataagctttcttaatcttcacattaacttcagcctggaagtcaaaataacacgattaaataactatcaaaccctctctgtttttaagcttagagccgaacaagctactttacctcttcatcttccatgaagatggctgatgaaggatcactcttagacatctttttctgtccttgttgaagaccgggaagcatatctgcaatccgttagaactagagattaaaagagcccttggaaagatgcacagcagaacagatatcaaacagaaaatgtagaacatacggtgggacaagatgacaggtttgttttctctctttacgacatcacaataatctcttgctagcagattaactgtttgctgatccatcccaagctggcaaatatcagcctgcagaggttaaggaaaagtttcaacaccaatcatagaaaagttaaaaggtcgatggacttgatatagacagattggagcgccactacaaaatttcaaggatccaaagatgattaacgagagcaggggaacacttatacacgggagaaattatgacaaaatacatattaaagtacctcgaggaagaaagtatcggcacattgcatacacacatacagaatgtgagctgcactcagctcctcattttcactcaagcccataataggcatacacctgataagaccagaaacatactcatgaatgtttatcatcaccattcacatgactgcaaataaatgaaacttgggcataccgttttatttgggcgagactatttctgcaggcaatgtccatcacaagaggccagtattcatctcccttagcatttatttcatcggatgaccatagaaactctacattctcactattcatcccggctgcctgaaatatctccttaaaatattctccaaccaccctgattttcttcaaatcacctcccaacttattgttcatatatgcaaaccaatctgcaatccatattttcactcggcaaccagcagaagtcaacttgttcacattcatgatcttcatcagtccctgccaaggtaatagcagagttaaacgcgccagcagaagcttctcacttaaagaagaaagaacataaaagaattccaaagcaagctatgtgaaacaagcatatgacaagtgtaacacacctgagcgatatgcatcctccctgatggttcaaaaccgtcgtagcaaaccggagcagccttcttagccagaagatccttcagctcatcatcatgtatgcattgctcaccaacacttctaactacattgtatcttttttcgacctccttacttattctgaatcaataaaagatctaatccggtaagctgacaagtgcaaatataaactggaagattcacaaataaagtatctatctttatttttctaaggtttctacctgacaagtgatgcaaaaagagggaaatcacaaaccaaatttcgatggtgaattggagaatacaaacttaaggacgtgcctttatcactgaaatcttatctaaaacatgcggaagaaactagacaagagatcaactaataatataacaccaatattggttacattcacttcttaaatcctaggcaataaaattgcaggggagatagagagaagaaacttactgtaatccggagggcaaagtagaagcctgagttggtgcgttgatggaaagagcctccatctctgacgatgaagctgtttctgaaaatcaaaacacacacaaaaaaaatgacttaattttgaaactttatgcagaaagaagtcagagtgaagtaacaccttatcctatattctatcatctcctctctctgtatctctctctatctatattgtttggtttccaagctcttggcttttttcttttacttacaaactcacacttgttctcattgtcaccaacacataatcggttatgcaaagttggtagctttagcatataattcgatctaagctttgagtattgagatcgatttcaatctagaaactgacattggctcctaaaattgagaactcctattgaaaaacctccaaatacaacctaacaaagacagaaatcgagctgacctctgagattggtttatcgtaggcgtttgtgttcactccgtgaaaagtctgaaccctgaagatagaagaaacagagaagaagaaaccctttagaggctttgactcagatttggaagaaaatgaaatcagaaccggtttaattcggttcactacaaaaatgggagaaagaaatgagagtagaaaacgtgcagaaacatgggacaaagttattgtataagacacatgacttggagctctcttatatgattttctgctacatttttgtcatccccaaacatctttattctggttccctttgttcatttccatatattcaaggctttctcgaagatcttgaagaaagttctatgtagttatttttaatatacttggtgtagagttagagttttatggaagttgaagctgaagctgaaggcgagcttgttagcgagattcaagaaccacatcagaagcatgcttcttgaggacaaagtcctgttttgtgatcaattgatttggttctagcttctaggagatgtatccattgagtataacaactccacattcggttgttttcaactaacatgtgtaatatattgaaacgtaatttttatgttctagttatcctctaaactcccaccagacaaaagtaccaaaggactaatcccataaaaactgaacaagaaaaatcgaatcctattctatgaactggataattaaaagaacccaagaccatttacaaatgtatttcctcttggtcttcttcctgtggcgagcaatgtggtagacatgatatgaacattttgaccttgtgggggtttgggattcgtgttgctgaaaaaacccaaagaagattgaaagaagtgactcaagacaacaagctcggtccattttccacagcggtacgagcttggccatggttattgtgcccgtgccgtgacatttggatgtcatgagatacgtgtgttctctttttcgcataaggagctcctcttgctgcaatattttcacagtgcaggctcataaaggtttgttttaaaagactaaatacaacttcctagtgacggaaatgaatgtttacctgcaatctgctgtgcccgaagaatattctgtcgtcgtttccaccatatcattgcacatgcaacgatcaataagaatgctagactaacaccgaatgcaatgccaatcttggctccagaagaaaggtgaggcccgcaagctggtagccccgggattccgcaaagacctgcattatctgtgaagctgcagagatagagaaaacagttacagggtagtgagtgctatttgccaaacatcattcttcacatgccaagtccaaatatttctttaaaaactttgtctctgattcaatcatcttacttgaagcttgctctgtgcaacagccttccacctacagccgctggtacttttccagacaaagagtttccgttgagattcctgtaatacaataaaaggtttcatgttgccgaccatgtgaactccactggccactgaaattgacatggagacaaacagaaagttgataatcttacagaatccgcagggatgttaactctcctaaggtttcagggatagatccattgaaggaattgtaggagaggtccctgcaaagatgcataaaaattcagtttcagggttcagaattgaaaagttaacacataaagtactcaattaataaacaaactgattacttacaatacttccaagctcgtaacgcttccaagcgatgcaggtattcctccacgaatgttgttttcactcaagtttctgaaatatggacaagatatggatcaagaagctttcactgtaagggggattacacaaatgagggaagaaaaactaatgacacacaagaaaaatggacacaatttcttcattagacaagtcattttcttggagaagataacaaaattgttcgtttacatacaatattcgtagacacttggataaacatttgcaggatgtgcataatgtattgacttacatgctctgaagatgttttagctttgatatatcgtttggtaggaaacctttcagaccttggttatcaagatcactgcaacgaaaaacaaagtttgtttattagaaaacctgataaaagaccagaaactcaaagagagatcctttgactctaagactctaactaatgagatgcctaagcaaaagaaagggttaatgaatctgttatttatgagtatacacaaaaagaagagaaacgagctatacagtccatcaatgaaccatctgctggtgttcttgtccaactgacaattagccccgctccatggatgttgtgggggaacacatggatcaccattccatccaaacctagaaggaagtcctaaagcttttttcattttctgtaacgcactgactgaaacagaaaacaacaagcaacattatgtacaattataataatctagtgatacagaaagcaatcaaccagcttagctattagaagaataaaccatgagtgacaagttttctccaacatcagaactgtattcctacttagattagcacaaatacgaataagatttacttgaatcacacattacatataaaccaaataccattctacaacagtagaaagacagctgacgacaagaggcacacatgtctcgttttcaagtaaccaaactttatatgaatctatgcaggaaaacgaagagcggtgaaaatacaacattaaaaagtgtccatgaaagaatgtgtaccttcatcccgtaatgttttaaactccgcggttatgatttcaaagacctcaatggcattgataatagcatgaccacctgccttgggttgtagaacgacagttaaggttcttccactcacagtcactgttgcattaagaacaagtgctgcataacgaccaccactcatctttatgatatccacatcttcaaagaaagtatctccatttatcacaacatcaaacaccctttttccttcagcagtgatagtattatcaatctctgcaaagtgcaaccatacagagtaatttctgttgggttccacatccaagctatacgttaaatcaggttggtcgtcagtactaaccaacgcagactgataaagtccttctggataaaaatttggtgaaactgaagccttcttaatagtttcctcagttgatctaggagaatcagcactcttaccaaaagatctcatacgattccaaaacctatcaccaccccaatgatcccctctataatcctcatcaaacctagacttcccagtaccacaagtcaacctagtggcagttcttaaaatcactccttgaccccaaccttcaccaaagctgtaagctttatcatcaacctgaagaatctcaatactcaaaatcgcaggatcgccatgaccagtactatgaaaacagatagtagcagtcccacccaaaagaaaaatgagagcttcagcgaaaacttgatcatcttgactactccaaccagatttaagagaagaaatctgagtgccttcaatagaaatgtcaaagagaggttctttatcaaaactaggttgatcaacaagtccaaagaagatcctgacagagtaatgacccttaggaactctgacaatgttgtagcaattgttaggtccttcagagattgggaaatatctaagagtcttcaaaggaggagttatgtaagtaggcgttgttgcattggcaggtacgcctcctgtatatgctatatccttgaaccaaagtgcgtaagttggtggtgttcgaacattcttcctagctccacaactaatcctcaaggcatatggagctaagcaaatcaagcgaatcaaagtcaaatgcaagtcaaaagatttcgaatcagaagaaactaaatctagaaaacgaacctggtcgagctagagaagagtagagactaaaagaggaaaggagaagagaagctaggataaatcgaagcatcattgattgatttttctagaaagaatctcaaattatgaagcttttttctgtatcttctctcacgaatctctcatatcgccattagagagcactaaaataactttatttggttcgtttttgtttgttttcctttcgtgtaagagtgaaagaagaagagagaggacgtgagtgcaggtaaataaatatcttattaaatgctcccaccgttctttttttttttaatttggatgaggaataatcaaatgttttgatgcgcacttaagttatcgtagtcaagctcaatgtcatttatctttaaccattggattgatgatcttataggctttggaaatgtcgaccacaaaatccatgtatgcgtatatcgaataagaaagctcaaatgagagaggtctcgttaaacttctagtaagggtataaaataaacttctagtcacgaaagtggttacaaatttgatgtagaacaagattaggaaaaaaggtcaaaacaatatctaatccttttagggtcttgttagtttgcttatttaggatatgcatccaaatagtttattcaaatgatccatctcattaatttatctgaatgatgttcgtttttatttttttggtatttatagtatttagttttttttttgtatttataacatttagtattttaaactgaatcacttccagttaactgttctgatcagaatcagccagatttcgatcatttttggatgagtttattaaaattcatttaactgatttatctcattgctctattaagttggttaaaacgaacatcaatattcaaatccattcagataaatgatcttaatggagaaacgaacatcaactaggtaaacaaatatttgtatttgtatatgattgtgataggttttaccgtaagtcatagttgaaaaacttagatttaacttttgtttcaattgacaaaaataatttaatgtatgtataatgactgaaaaatgtactgatttacggattgtggatttgatacaaaaaaaaaaactacaaaactgattttgcggaattgtggagtcggtggagtagtttttgtagtttttgcaatcaattagttgttagaacaataaatcagtgctttagtgattaattaaatattactagttgctaaaaacggttttgtttgtaaattaataacgataaatgttggtgggaacgaacgacaatgaaaacgtcccgtgacgaacattcccggtctcgtggtcaccagaaatgctagttgtcattcaaaaagacagaataccctttatttatcggacggctgagaatggtcgtaatctatatagctttgactttgttgacttttgtaaccattgattgatgcgcaatctttggtaaacacatcaaaagcatttccccactcgagtcgttgaaccaaaataagaagtcgttggctataaatctctctattacatataaaattctctactacaaagtctacaattgaaaccatttgtaaaagttttttttttgttttttttttcataaatatgaaattatagtttatcatcagacactacaaattgctctatcgtctccatcctccacaacatctatcattgatttaaattgctagtattattaggagatatctaacaagatttccactaatagtaacaaagagcgaaattgtagactaaagatacacaagtgccataacgcaacttatgaagagtttgcgagatcgtcttttcttcctgctgcaaaggtgtgatatgtttttcttattggttttactgttctatgtctaaccttgttgttgtcattgtattcaatagtatttactcaaaactcaaaacttcctaatctttacataaacatgtaaataactaaaactcgaatagaagattagttaaactatttaggtattattcaatcaacaaaataatgtaacaacaaatgggctattgtgaatataataatacttgggcttggtgatgcgcatggatagtttggccttcatcatttaaagcattagctttctaagtcaacgggtagcttcaagagtgtaagcctaactatctttgatcacacgatgtggaagactccatccttcttttatcttttcttgatgctccaacgatatcttatattagttttgacttttgtaaagaggggaatgtgtatctatgggtaaaagtaaaactgtaaaagagtcatgtaacggctagatctagcggcccatgtgttgctgatatcgctagcttttcccatggttttgcacatttgtgaatgatgatgatatagctttttctggtgtaaggaagaatcttcatcttttctttcttctcacgttaactctttgaatatgtggaaacgagatgttgatataaggtccgtttagttgtttatgcattatacctcatatccaaactttaattagatgaaagattaaaaaaaattacgatatataaacgcaaattaccaaaatttattctttactagaatttggtaagaattc

SEQ ID NO: 997 - DNA, 154716 bp, Arabidopsis thaliana
gaattcactttccaatagatcactcatttataaattgcttcaaatcaaacacatttaattataaaattgtttaaaaagtttgacctaaaaaaaaagtgtattttagtgacatgatcaaatcaattattttaaacttttcttatccaccaccacatttctagattttggaatgattaaaaaatgcatacatgatgtttttataagatttttacggtgttggttctattttgtttttcttattgccattttttcgattattagtgttttgtatgttaaacttgccgattgttccaattactataatataacaaaaacaagttttagctatcgatttttccaaagttttacaacgaagtttttataagttaacatgaagtaataatagtatatgttttaaaattatacgtttttttgtatgaaattaaatgttacattacactattaaagattccaataattaaaacacatgttacaatgagtaaattttattatcagacaataaacatctctttgctctaagaagaaacctatgctagtgaagcgttgactctggaaagatgcaagtgcaacgtgtcgctgaaacattgaaggcgcgtgtagaaaaatgttaagctaaagggaagttcactttctttaaccaagttttgcgttttgcaaattacaactaaagaatccactaaagctaacccaactaaattcaaacatttttctatgtgatcagtttaccatcaaactatttcatatttttgcaatgtgtagtaaaaactttctttgttacattatatgcttcttttataagcaaaaataccatattacattacatgttcatttcatttttgtttggtatttgcgcttacaatttacaaaatgattttgtttgatactatttacatttacatgtgaaattattgtgttcatcgtaaaacgttcaaaatttctaaaaattgtaagaaattattgtaaatgtaaacaaagtcggtttcctataaaaccacacgtctgaaccaccttaatcatcatcacaacatgaaattacaaaagcagcgactttgtcgattgccgtagtttcattgtagcatagataatcccgtcacgtgatgttatctatttttaactgtttcaatgtagtcagaaaagctatttgtttgatttcagaactgtttgattagtggccattgaaaaattctataatctatagtcaatagtctatacacaattgaaaatggtatagttgattttttaaaatacgccattaaataaaattatatatagaacttctctataatcgataaagtcgaacactccaggcaacaagcggaccgaccacggagtctaacgtaagagtattattagtgatactgtaggttttctttgactaacgataaagaaaaaacaaacatgtttaatttctcgtgtcctctatattcatgagtcatgacgttcatacaatttattcttgttttaaatgacgttcatacatcattttcatggttgtctattagttcactagaaaaacgaagtcttgaacgttgaagcgaagcattgaatatcattttataattttatggactaaactatacatttcaatcatctttgcaaaaaagaaaaaaaaaaatgagttagatcataaggagtcaggacaacagctagcacaaaaatctcaaaatcctatactgtttaacccaaaacaaccgtagaacaaatattattatacacccaaaaaaaaaaacatatttgcaatcacattagtttgtaaacacttctatttcgttccataaccaaaaaaaaaaaaaaaaaaaaaatcaacattcaattttttattttaaaacatgtttgcatatgttcatggtatgacattgggtattaatctatcacagagagctaaagcccatataaataataacagaaggcccatatctattaataaccaactcttaaccggtccattctaactgtttttctcaaatacaaaacacgtggataacacgaggaattaaaattgaagttaaacaccacaccatgtcgcgtacgaagctgccacatcactgttctattaacacgtggcttaatatgatgcaatatagacccaccgatagctggcgctttctagtttaccaaggtgcgacgtaccagataacaccacctctccacttttgaaaattaaaacgctctcttttggtaattatttagggaaacttcgataattaatcgaataatgaaggactaatttgcagttttaaggaaataagtaagcacacacgttagagaagaaagaccgttccagattgccacgtcatcgtctcctctcaacgagtttctgcaaaacctgaaacgtgctgcaccttgcctctctttctctctcttccttcgtttctctctcgatttgaagagagaaaattcgttcgatttcgttttctcttcttcttttggattttcccggaaaattttggaatcggtgagtctctatcgattactggtcaaccatgaatatctttagatttgctggcgatatgagtcacttgatcagtgtcttaatccttcttctcaaaatctacgcgacgaaatcttgcgctggtgagttctctctctctctctctctttcatgaaatgtgttgtgtatattttgaagacgagctcgtagacgaaacaatcgcattttgctttgaccttttgttttcctttccatagctttcaaatgcaatcttatttgaatcctgttgaggtctatttatcgatttcgaggcgaatccgagttggtagattgaaattgcaagtcaaaatagttgtgaaatctcaatcttcgaaaccactatggaatttctaaacgagtgagatctctcacccctaaattgcattaggtttaacggaaaattgctacacggaatggaaaatgcttgtagatgctcatgattttctcatagattgtgcagctcctaacattgttgctgttgacttttggattttgttggctaggaatctctctcaagactcaagagctctatgcgcttgtgttcttgactcggtacttggatctgtttacggattatgtatctctgtacaacagcatcatgaagattgtcttcattgccagctctttggctatcgtttggtgtatgcgtaggcatccacttgtgaggaggtcatacgataaggacctggacacatttcgtcatcagtatgttgtgttagcgtgttttgtactgggacttatcctgaatgaaaaattcacagttcaagaggtattttcatatgaatttcacattgcttttgtgtttttaggttgtagagactaggaaagcgaatacttgttgttagaagacatgcatatgttgtgtaatcttgtttttggtttatttattcatttgattcattcggttccttcttcttatatcatttggatttggtaactatcttggctagtgtagaatagaatatcgtctatgtaaatgaaactgaacataactccttccagaaccaattaggagtccggcgtttatagttttatttttgcttgtttaaacgttgtactacctatgtagcctctcactcgctgattgttttgagaaactctttgaatatcaaactgttgcatcgtgaaaggtttgtttgcttccattcatggaatcttctgtgtcctacctacctatgttccataaggtgccccatggattagtgtcatctgtatctcgctgttacttttctggccattgtgttctttgattatcttgtcataagaaactgtagtgactccttatatgcacttcactaagatcgttttcccttactaccttcatatgtatttttccagtatatgctcttggtaaagatctgatctttgcaaactgccttcactctttaagtatttttgcagcattgtggcctctctgtgttgatagccagaatcattgtgcaatatgttaattctgtgcattccaaaccatttcaggtgttctgggcgttttctatctacttagaggcagttgctatccttccccagttggttctgctacaaagaagtgggaatgtcgacaatttgactgggcaatatgttgtctttctcgggtacgtaattctaaccagacatatgcgtttgctcacttgatctccactggcttctctgttgggtttgtttttagaattggtttatcttatatatatactgtgtctttcactgctcatgcacttgttaacttgatcaatgagaatcgctctccagtgtcattgtggtgtttaaaaatcagtgcatatttctaaagtccagacattgttttccgtttaatgttaatgcgtctggaagctgagctgaactatatttttttctataaaggaaatcagactgctttacatcttgctatgcatttggttctgatgcatacctttgtgtccagtgcacaatatttcaatgtgcaaaattgagtaagtattctgtatgcactcacatgggcaatgattaacatgcagggcgtatcggggactctatattatcaactggatctatcgctatttcacagaagatcatttcactagatggattggtaatgtttcaacaaagaagcactaaatgcattttaaccatttgtttttcctcaatgctaatgttttacgtaaatccattttccagcttgtgtgtctggtcttgtccaaacagctctctatgcggatttcttctactactactacataaggtaaagtaacctcaccagtctgaataatattctctttatagttactgatcatgttactgactttggatcctttttgattttgttgtagctggaaaaccaacaccaaacttaagcttccggcttgaaaagaacccgaatttttttgcaatagtatcaaaatccaggaagttacagcaatggtgacattagaaaagaaagacatggttaacatttgggtcctccctctttctaacaatgagttgaaaattgaatgatgcaggattgttgtttaaaatgtgttttttttttagtctttaatgcacattgtaactttcccgacgattttagacattgagaagaggcatcgttttatcaaaactagtctttatagataacacacaaactctgtttcttttgtgcgagtgtttagttcaaaactgtagctcagatcagagccaagttaacaatgtgtcttcaaaacttaaacctagtcttcttgattgtgtttcactatcttggtcttcttcttgtgctctcgtgtcttcttgcttcttagctcgtctttctcttcaccttcagagactttttctctactgcgtttctctttctttgacttttttgttttgaccggagccttctcaatctcgtcttcattctcctcatcgtcttcaccctcaaagactatttctctactgcgtttctctttctttgacttctttcttttcacaggagccttctctgtttcatcatcttcctggtccatgatcgtcatcttctcctctgtggcagcctcagccactgtgtttgctacagctgtctctgcttcaaccatgaatccaatcattttacaaacatactaacagaggaatacaaacatagatgcgatttgtgaacggcattagaaaacaaacaaaccttctccagaaaagcccgagtcgaatacaagacctgtaagatgctgcttcaagaaaacctgcaataaaacaatgatatataagtaagactcaacttcaccaaaaaaatactagtccaaaggttgaagagcataccgcagaaatgagctggcgtgtcttaacgtcataaacacgtaaatatcggtccagccctagacaattcaattaaaagaaaaacagatgaaattgttgaacaattaaataaaacaacacaaatgagattgttgttacgggttacggcatatggacgttgaagttgtgataatgaatcttaccgcaagaagctatcacttgatgctgtggatgtctaaccacagatcttatgcttccagagcattttcctaaaaagcttcccaacagctttcctgcaatagagatgctcgattaattgtttgattcagcaagcaacatagtttatgatacatttttagagagaatcaatgaacctgttcgtatatcaaaggaagctaggtcagcagaagcattcccgacatagatagtatgaccgtctgggtcttccgcaattgatgtaatagcggtctcacggaaatcaaaggacaggaccggtctacgttgagtagaaatgtcataaagacggacctgtctccagcacaggcaagttgtgagtgatcaggacaaacttcaaactgacaaaagaaactagagatattaacctggtgagacttggttcctgtgacaaatttacggtgatcatccttgctcaagaacgtagcactagtgaaccaggtaggcgtgaagattccaagattgttcttaggaggctgcacaaaacagagattgattggagaagacagtaaaggcttagtgattcatcaaagaaactgagaggctttgaaagggataaagatgagaaagcaactcacgcatttcgcgctccagatctttgtacattgttcaagatcccatatattggcctcaacccgtttcctgtatcagacattcatttcagtatggtaacaaccaaaaccgagatataacgaaatgatctacaaatataagcaaatcgattcagttctaactactaaccctccaaataagctgaagttttcgctcccatccactttaccaaccaatatttcaccagaaccacatgctttccatgttttaggagaagcatcatccgtggaattaccatgtgcatctggaaatttaactgatctgagactcacatctccctttttcgtacatgtaagcaatgtgcaagatctaagaataccaaattttgtttagaaacgtcaatggcaacacaacataaaaacataattcaatgggaatttcaaagaattagtgtaaagttatatacctttctgtctgatcatctatctttttcctgaataagtgcagggcagaaatttcgttatcctcaggggaacaaccatcatcaccaaatacagagtatgagaagtgaagatcaccattacaagggttaataacctcaacctatggaaaggatagaaatgaacaaaatgattgtataaatgttggccaggctatggagataaatatattactcaaatacacatagcttaaagtaaggaaaacttacattgccatcttttcttgcaacagccaaaagctgcaattggaagaaaagaaaaagagagaaaaagttatgagttaccattttgacgcaaatacggaaacaagaagaaatcaaagttaagaactcaaaatttgctaatacatttccaaagcatagatgttatcatgtatgcttaagaaaggaggaaaaaatctgaagagctatcttgtagtaacagtggagtcagagattatgaaactgtagcatagttgcaaacgaaatgataacatattaccgataagttctcaattgcaaccaaaacaaagccaaaactcgtggttcaaaatgccaaagcaaaacaataaactaaaactaccaacagtctgattagagcgaggaatctaacgaaaacctcaaatttggctcaagattaatacaatgatcttcaagtccaagaatcacaaattcaaatcttataagctaaattcaaaaaatgagctcatttcagcagtagatatcaatctgaacctgataactaagccacgcctagattcaatcctcatagcttaacataaacatgaaaagaatgaaactttttaccggattccttaaccggtcatcaatggaagcagcaagaacacttctagatgcattcatctctccccatgtgttcactacagtcggaatccctctctcttgaccacgagcttcagtcactgcacatcaaaattgaaataatctattagaaaaaacgaaacttctatattaaaaacagagagagcgaagtgggcaccttttattaagccgagagagtcaaaagttaaagcacggaatggtgggcaaccgagattctccggagggatgactcgaggcattttttatcgccgccgtataatttgcagatgctcgacgacggagaagagaagagaaaccctttttaaaaccctacgttttgattttggtcaccgcttttgttgtcgtatccctccttctaaaccgggtacaaaatcaaaatcaattcgggttacctgaaccgggacagttaataaatactacttggttgtctctgtttatagtttgcattcaattttcgtttcttgtaaacaaaatgctaaagtgtttgtgttaaaacaaaaaagtcagtttaattgatgatttttttttatgttcataaattgattagtaaatttttttttgatgaattctgctaatcatgaaatttttaattactgttgatcttaatctagtgtatatatatgtaaatttctactaaagggttttgattgaaccttcaaccaccttgtttctaaacaaaccgtctttggatggatggtgcttcagttgccaaatctcgggttctatttggagattagcacaattactactattctacgatttgctgaatttcaattcctcaatccaaagataacatgagctcttaaagtccaaattagcaaaataaaacacagactagtaaccaatggagaaatttggtgtaatttttgaagaaaaaaattctaacacaaagtaacaactaatagagaaaaatctgttggttaatcaaaaagtgtctaccaaaatgctcttttaatcgtctattgaacctttgaatgaacacataagaggaaagctacttcttaattaggctttcaaatttctcactagtcttagcaaaatttacccctttatatgactagaaacaatcagaatccaaagaaaccaagctcgctggctttttccttctcaaaggtttcaaaatactgatatatgattgtgactgcaagtaagattccagtccccgacccaatggctcccatgaaatcagccaaaacagtgagcgcaccgatgcacactcctccaaatgcagccgctgttgggatgtaccggttcagctccttttgtaagttggactctctgtgtcccggcatcaccatttgttgttcctaatcatattttacaaataaattcactttccatgtcgaaatgtttaaattatttagcaatggagaaaaggtttagggattattacctttagctgcttagctacatctctagcagaagacccggagacttcaatccatgtttttgagaatagggcacaagcagtgagcatgaagacgatatagaacagagcatggaatggatgagctgccatatcggcaaaactgtaaccgtggaaaacaaatattcagagaactggaaatcaagtattgttatattgatggggacacacgttacttgtgaattaccttgccggagctgtgatcaaatatgcaagaccactaactggtatagattgtccactgtactctgattctttccactgtcccaataggttcacaaagaaatttccactgaatttcctgtagagaagctgttgaagaggaaatgcaaattgtcaactttatgttctcagctgtgttgtcccttaatgaggaaacaaaagaaagcacaagtacctgagagatgaagtagaggtttgagacgagagcagactggagaatgattggcatgttggaggtgtagaacagcttgatcgggtatgaaccctgttggccacgagcactctttgacctcacgggcaacacaacacggaagccttggaagtatataacaatcaagaagatcaacactgttgcaagcaagttggtaacatttggaaggttctgccggtaaaaagcttgtctgagcgcagcaaccttattggacttagttatcagcatatggaacaacgcaatcacagcgccttcaaactcagctccacgaccagtgttgattgtcgtggggctaaatgctttccagataatgctttcactgcatcaccacaatcaactcaaaacgtttaagaatctctgtatctaaaactctcttcccttacaaagacaagcactttgatgtaaaagatgagctctttttaacataccagatattggttgctatgaaaagagagattccagagccaagaccatatcccttctgaagaagctcgtcaagacagataacgatgattccagcaaagaaaagctggaggatgatcagaatagcatttccaacaccaagttgaccaacaggaccatacattcccgaaagaacatatgcaacagcctcaccaatagcactcagaatccaaagaagcttctgagcaccattcctacaacacaaacaacacatgagacaacgattctcgacttgatcaagaaaattaccaaaagggaacactttacaagagagcacgatcctcacgaacattgttgtcaacctcaataatctttgaccctgctaagagttgcatcactaatccagatgtgacaataggagtaataccaagctccatcaccgttccacgattcgatgcgagaatgacacgcatccaatagaacggatcagcaccggtggtagaatggatcccatagagaggaagctgactacaaacaaggaaaatgaagagggagatgacagtgtagatcactttctctctaaatggaatcttcctgtcagcactttgcacttctggaagaaaagccaagaatggcctcaccaaatgcaaaactctaaatcctcctcccattatcgaatctgttactgcaaaatttagagcctattgagaaattcttgaaacaaaatgcgaatctatacatactagctacatgtatcttgatattcaaccaaaagcaattcacgatatatctccggaaactagatctacctagaattatccacgaaatctcagatccgcattgtgaatttgataatcatgaaattacagatctactagaaacgaaatcacagaaggaatgcgaaatcaaaactggggctaagaggaggatcagaagaagctttacctctgcgagtttgagagagaacgttgcgaagaagcaacaaacggattcaaagttttttttttgttttttttcgtttttgattgatcttgaagctgatgttgaagctttttttgtaagaagttttacacgaattacatgtcatcgaaccaataatacggatacacgtggcaaaatacattcgtttctgattaagtgatgaaaacatgactaaatagtaaatacactcttattaaattttatgaaaagattgactaatgagttttgattcaacttaataaatatccaaacctcttttaaaaatacgttattgtttatttcaagtgagaattttcaattttatccaatatattatttttatgatttctatataataattctaacaaaatatgttatcaacaagtaaaagattatacaaatcttatatattctcgcttgtaaacccactgtccatcactcacactcttacatttagtcttgccaaaccttagatattaaaagcttttctaccataagtaacttaattatataaacaaaatatttaatttttctattaataattttattttaaatctagtatttaatattatccaagctcaatcaattgggggttttgactattctattttgtgtacacttgcttaatcaacacaatgaactttttgtgattctttcttcttcttgttttaatatgtcagtagttactacttacaggactggttacttaatcttattctagaacccggatttcaaaatcaataactcaaatgaaagatgtataaaaatagatggcaaaaaagatcttaggagggtttagttctcaactgcctgaatattaactattaaggtgtccatttcacaccaaaagaaaagattttgacagagcagaatccacacattctctataatcctcaaagagaactcaaccaagactattcaaagagaccaaattaattcagcccactttgtctagctaaaaaaagttaaggcccaacactttttcagtatatggtgattgtcaattatatgatgatgttaattgtaatactaaaaaaagttataaatgacgacaacaacaacaacaacaacaaaacaacaaagagtaaaaaaaggacgctttaaatccgcaggtgactttgaaaaagaaagtaacaatgatgaggtcttcttcgaagcgcaaccttaaacttttcttgtaatggcattgtgaacacaaattcatttttattgaacttaaaagacagatatcatgatgatttagattacttggcttcacgagttttaaacaattttggacccacccactatatcgttcaatggactatggcttagcctaaactattatacctaaaacagcgtactaattcttttacactttaaattttaatccaaaaagtgtttataagtaatgtgcaatttcaaactattagagccatccttagattgcggtgctttacttaaatcctagtactatttaatctgaatttgtgttaatcttcggaatagaatccagttaaccaatttgtctctaaaaatgtataagtattaaacatcctattttgtcaagcgacatcgattgtttcttaaagctcaagatgtagtaattatcatacggtatggtaagtaatcataacacacatacacacacattcaaacatctatatatttaatagattaataaaatattcaaacaaactaagacctaatttagaaacatatttataaatgcgaatggtattgatttttttaattaaatctactttttctatatcattttgttttcgtttacagagacatcatttggactttggagacttggagtttacattgaaacagataaaaacacgcacaaaaataaagtatggataaaatcatacacacgtgaagagcaaaagaaagaccaattcagagcaagcatgcaatatgagatatccgattagctaaaggaggatcgatccaaacttgttgtgaatcgttttatggatatgttggatcaatatggcttaaaaatcatttgatgcattttgagttctttctttccacatctcataatcaagttgcaaaatcaaattgctaaaagtattgagtctattaggtaagcggaaaggaagaccttacccaattgattacgtcttgataatgaagactatgttattgaaccattagttattcacttattgcttggtaactttagtattttacatctaaactcttaatcaagaaacccattttctaacattgtttctcttttttatctaactgaatgttacagtatgttcactcacttcaaaaaaggtaccttatcttcgaaatatttatttcttcaattatttttacatatatatgagaatatatatatatatatatatatagaataaaaacaaattatgatcattgatcaccttagtataataaaaagtaaaataaatctagacataattacgtataagtgcttataattaaccccattaatctccgacaaactctacccgaccacaaattttctcaatttaaaatccttgtgaaagaagcttactcacactgctacacatgaatgttattcaattaagtgtcttactattcaaccacattatgctaaataaattaatatacaaacgtatattaaaaaaacaaacaatatagttatatataaagtattcaaaagaaaaagagaacaaaatacgatcgaccttctctttttcttctatctatcatctttcccacgctttcacgctttgcctcattttattaatatttgttatttgaaatcattccttcactcctttcttcttttttgctgtttcagactcaccaaaaaaacttctccttgtcagaaaaaaaaaaaaaaactactgaatctctctgtttttttttcctttcacaacatctcaatggagacattgaagaagaatccatcagtgagaagaaaaagcaagttagcgagaacattccagaaagtatgtaacctaagaacaacgtcgacgaaggtctcctccaacaacggaatcggaatctgtatgttaaagtcccaaaatccaaatttcgacgacgaagacgacgacggagactctgttttcgatttaaagagtacttccagtagcagaagcggagagatcaaagtgcgagagcgtaatagagctgttttacaagctgtggttgcgaagatcttcgctagtacgacttccattaaagctgcttacgcagagcttcagatggcgcaacgtccgtacgataacgacgctatacaagcggcggatacggcggtggtcgaagagcttagagctttatcggagcttaaacggagttttctcaggaaggaattgaatctgtctccgcaagttgcgattatgttagctgagatccaggagcaacagagtttgatgaggacttatgaaatcacgattaagaaactcgagtttgaagttacggagaagcaattgaagatcgatgaattgaagatgagttttgaagagagtttggttgtgaataaatcgttggagaagaaactctcagcgagtggatcggtctctgtgtttgataatattgaaattcgaaatttgaatttgagtagttttgttcaggttttaggttttacgttgagatctgtgagaagcttcgtgaaattgattgtgaaggagatggaatcagcgagctgggatctagacgccgccgcttccgccgctgtttcggtgaacgttaaaaacgcttccaccgttttcgcgaggccgagtcaccgttgtttcgcgtttgaatcgtttgtttgtgggaaaatgtttgagaattttggagctcctgatttctcgagacgtgaggaattcgaaaagttgagatccgttgacccgattcagtacttgacccggaacccgggttcgtcttttgccaggttcgtggttcataagtacttgagcgttgtacatgcgaagatggagtgttctttcttcgggaacttgaaccagaggaagctggttaactcgggtgggtttccggactcgggtttcttcgcgacgttttgtgaaatggcaaaacggatctggcttttacactgcttagcgttttcattaagcggaaacgtcacggtgtttcagctcaaacgaggttgtagattctctcaagtatatatggagagtgtgaaatccggcgatgagtcattattctccggtgataattcagatattcgggtcgggttcacggttgttcccgggtttaaaatcggcgagaatgtgatacaaagccaggtttacttgactccggttaacggttttacttcatgaataggccaatccaaagagaacgcggtgggttgtgttcacgcgccggggaagaaaaaagagaggcggcgcgtgaaaaggaaatggtggggacatgattccttgggggcagcaagactggcaagtgggacatgttttaagaatgtgacggagacagaaaatggcgcgagggacaatcattatgaaaaaacagtttagattagtgatcattttttgtttttaaaatttttagattatacagcttaaagtatgaagggcatagaagaaaaataatattctgtgtttttctataacgtattacgtaaaagtttttgttatatacctgatattttataatgtttgtagttggtcggataatgatggtaaatatttttctaattaattttattaaaataggttatgtgtcgtcgtagctagatgttttttaaagatatcttctgattatgacaaaatacgtaattgtggagtgtgacttgaaaaataagattagaatcggcttttatagtcaaatatttgggctatagaggctttattgacttgattagttttttaaaatatcagtttagctaacgtgagtgttgttagcattatggaaaaatatgtttttgttgaatagtatgcgtgagattagaaattagaaaacgtgtagataaacgaatggagaggagagagttaaaaaatacgattttgggtaagagagtgagacagatatgtatgacgtaaagagaatcaatctagtgaaagagatagaccaatgagagatttccacatacgtccgatttttaaatctactagttaggcaacttattcaataccgttgaataattaattccttttatttaatattgtatgcgagttggtctggcataaattattagtgataaagaaaataaatgaaaaggagacaattgagtacttagagattaatttcattcaatacatttttagttattgtttacttaattagttggcgatttgatcttatgagaaataagaacaatctctatccaaagcaaaccaaagatgaaagaatgatgttgtgtgtgtagaggaagacgaaaatatgttgttgtgtcatcgtttagacgaagaagaagtgtcgcagatttgtggaagtcggagacagaaaacaacttgcgatgcactaattgtctaatttaaaatgagcaagagctcaccaatattttaaacccacatggaaaatattagttgatcaaaagaagtagataggcccattagtaaatggcccactgataaaccaacttgtaaccgtttttcttataagaagtattgttgagcccaaacaaaagacgtataccgtgttttaaatgattttagatcaaattacaactaggaaaaataattatatgtaagacaaagctctagcctctaaaactcgtctaggaaacatcaagaatatgtttctcgtacatttagaatcaaagtgatcggctacacaccaactaggtaattggtcgatgatcatccaagttaaaaactaaaaagcatgcatagtttcttcaatccgaccatgttcagttttttataagtatttaagcattcctaaacacagtttttaaccacagttttaatttctctaagtagttgttgtcttgttgaaacctttaattatggttatgttttctctaagctttgttttgctttgtttagttatatgtgtaagtagttttcttgttgggtcttgactcttgaggattatactagcttaggttaatcacaaatgatgattaaacgattatctttttacaaactgtaaattaaattacttaatttttagttcataaaatagctagtcaatcatgttatatacagtatcaccaatcatatactctgtttattaggtgtgtatacttatgaagaacagtattactctaacatttttccatatttccacagtcgaaatatcttaggatgacatatctaactgattcgagtttgaataatcctcaagaaaactatacgaatctctaatcaatgagcggtggcctagaggcagccaattcaacgctatcgtacacctccacaagtaactaacaactttttgccgtcgagtgattattaatattagaatctcatatattctactattattctattagatattaaccttggattgaaaggaaaggatgattagataaggatgatcgaaagtttgacaaaaaagagtgttgtttctatatgattttcaacttttaactatgtaaaattttctattcgaatcttcaacatcgacttaagtaaatattaaacacaaatgatctccaacttgtttattaaatatactgttaacaactatgtgacaatgtttataatactctcagtctatgatctcgcaatgtattgttttgtaaccgaatcccctgaacgcattaatttcaagaccatgactgcaaatagataaatttaacgcatacaaaataaaataaaaatattatactactaattaagtactaaaataaagaatatatagccagtaagattcaacttgttatgaaatgagaagtaacattaactaattacaagataggatattaaacctcgtgtgatatggaagaaaataaacttttgactaatttacatatgcaaaagttgtagtaacctgaaaaaaaaaaagaattctaaaaacaaaggtataccttgtaggaaatttcgtattatatagttagaataaagaatgtactaaatggaagaaaaaaatatatatatgaatctagccgagactatcaatggccaacaccgggactaggaacggatcggagataccgatcaacggtggagagatgtcgtgatcggagctttccggcgaagacggccgcgtgaccctttttgctcggtgtcgagttgggaattttcccctttggtagagcacttaacgtactagttttggtcacatgaggcatgtgactcttctcttcctctctcaccgtcaagttttcttgtttcttcacctccaacagttttcttgaagataccagcgaaggcaaggctgacacgatgacggcaaagactatgaagagccagatggtcggaattagacgaacggccatgaagagctttgatctttgggttgagaaataaagagagagagagcgagagagataaattcaatgaaattcttaagactcaagattgctataaaacaatgaagtgttgttattgtatatatagtcaatagatagagagagaaagttcctaatttagaatgttgataaagtgactaattaataaattggtggaatcactatttgtcttttgagtttttttcatttttctttaaaatagaagtctaaagtgacactctaacacatgcatgcatagcaaattagtacaacctggttagaattttcaaacacagttgtctatgaaatttcatttttatggtaagttgggggaaaatgaattgagaaagaaaattcaacgttccaaaagtcatgcacaaacttatgaatgaagattcgtggcagtttcatctatactaaagtaaaatgaaatattaagtactcaaaagtcaaagaaaaagtttagataacagcctaaagaggaaaaggtgaaaatagatttcacataaagataaatattagcaccaaacaattgttattccgaaatatgaaatgtatttaatttgcaattgggccaaagtcaatgatcaaataaaaactaaaagaaaagaaagagaatttagacttggagagaaagggattagtaatataaagattggtttatgatctttagtgaatcaagttgagtcttatgtacgaagtgaatcaaattaattcattaaatacaatcagattactttaattagcaaatgagttcggtaggctaattaaatctcttgggatacggtattagatacgatgtaacacgtggagatagtttggtgagtgatgaaattgatgtttttcaaaaaattagtagccgccggccaccatttcaacggcggtcgtcacgccaccgtcaaatgttaggcctccaagttccaagtttcacactttccggttcatgttgttatcccaacttttttggagtttgtttcaatcattatttttttgtctgtggtatatttaagacacttatggatgatgtaacattactaattacttttacttaatatcaatttaaaattttgtttcaacaactcactaagtaatcaatatacttagatggctgaagactaataaccaattagctagtgcttaacaacttcttcaactctgattgaaaaaaatacaattatatccaacttttcagaaatttttaccttttccaaaagctcacaatttttccgacactatcacaaattataagacgttcgcggaactcgtcaacaaatagtatagtatatttgtatggtcaattctgattatattttcatatctaaaccataagactaaattacttttttcatactatctgatttcgtcactgttctatctgtagaaactatgcaaagcgtgttcacgacattaatgagcttaacataaaactcgtggaggcagagaaaagtcaaaagcatggccggtagtaagactccaaaacgggcctccacgtaatccttattacgctataacatgacaataatttctaaccaagaatggaacaccagcaactatataatatttcttgtataataaatactaaaatcgtataagcatgtttactgctaactagtatggtctcccactaatgttaaagtagtaagcagatattttgataagaacctttttataaattcactaaaattcaaatataatattgctataaaagtaaaatatgatatgagatataaattctcgaataaaatggtaggattctcatacctaaaacaagttagcaatatataagatagccttttcaatgatacaaatcaataatgtttttttttttcggtggatgtaacaatctatgacgtccgacaccgttaaggggtagattcttaggcaaaaaagaaatctatgaagaaatgacaaaaagaagaaagaaagagtgggtaggtcacatggccatgttcttgtgttgccgtcaacagagaaacattggcgttccgcgttttcatgaacacgtccggtcccatcctctctagtctctctactacaatctcctttatgtacacatctgatctttgtacatcattaatgcgtacatataatttgtttagctcatacaagagatgtatactataaatatgcatacaccaattcggtgatgaatagtagaatatggggattcaaaaatacctaatcatcttttacatgatagtcatggaatattcaaaagctagctagttttactaaatgatgttaaatatgtgagaagtgatattattattatctgttgtcaaaacagaagtgatattatggccaaaaagaaaattgccttctggctgataaccgagcctttttgtattgaaatctatactaaattcagaagttataatgacctactaaaatcgaaattgcagtgagaaagtacgaatcattatcgattaactcgtgagattaactcgtcaaccactaattaaactgccattcatcaccttaattttctggtgaaaagtgtacatatattacaaattattcaaatcagtttgtgcatcaacaatatcactagtgtctttgcctttttagccaaggaatcaactaaactatcgtctgttcttttaaccctaatgatatttattcctacaactctacattcaaagctcactacctcagaatattctctaaattgtatattcttttgttcgtcctttgatcaagccgaatagttgagaacatctcttcaaacacaatgcaacatagttattccactcggccctgaaagcctaaatcaaaagccattcgttcagcttagaccgaagtttgtgaccacaaaatcttagcgacaaaaaaatctctcttttgtttagatggtgccaatctttattatcagttgtttttttcttgtttctcctactgtctatatcatttctaaattataaccccactctccgaaccttttttggtacgtataaattgtctttattgataattagacggaacaatatttttcaggctttgacaataaactgtcaaattggcttgtacggcagttgtatatttatactacattaattagtgttaaatcggagacttagcttgaatacaagtctcaatgtttccgtaaagtcataattgatatggaaacgatttctctttgtcaggatttgtactttgacttgcaatttttaaaatttgagaaacgacgtgtttggtcacgttgtgcacaacctatcccacactctgtatgaaggtagatacttaaatttctttttgttatctataagagataaataataacaaagcgaattaagcaaacaagttatgggctgccgacaataattgcttggctagatattgtaatttataaggtataattattattgtattcaaattcagtatgtagcttataaactatcaaatatagtgtcatataaaagatatatcatggaaatgaacacatattctcaaataaggtagccaaactcggtcgcaactcgcaagcaataatactagaattttagaaacacacgaatatgtggaacacaagagttggtgacattattttttccaacgaccaagaagaacacggaatggtctctctcattgtcacaattgctgactttactcgatcgtaatataagcttcttctttgttcttttgctttaactgagtctataacaaagaattaattatatataacctaaaaatttactatttttgctttaactgagtctataacaaataattaattatatataacctaaaaatttactataaccaatgcgtcatatcgaattcgaattttgtcgaccacacataactaacatgaagataattaaaaagagaaatgtttatcagagcaataaattcgtatcatgaagataattaaaaaaaatagagcgagaaaaaaacatgagtggggcttttggtgagcaaaatggggtctgacttgttgatcgatgtcagtggctaaggtatctgacttcagacacactatatgtttgtgccccaaagtattcgttttgtctcaataaactttgcattgttaaaaagaaaaaaatacgagtgttggtcgatggaaaaatttaagagaacaaaagaacacaagttccttgaacgcagccaccggtttcgttaatttttcggtttttctcttctctaaaacataaatgatgatgtttcatttttgctatcatgatttactcgattggattgatatacttctggtacgtgcattttcattgaagagtaaccaaaattcaatctctggttgggccgaaagatctacatttaatgacgatggtgacattgttggacggattttgcaatttaattaaatttatgatgactttactaaagttttatttggtgaccacttgtgaggaaaaagcaatgagtaatatcaaaattctcttcttttttttttttttgtctcaaaatttgtagtgtttaaaattaatgatttgtcaaaattaaaacatgtgacacatatcaaaagaggaagtgtagaccaaaaatgttttcagccaaaattgaagaggaaataagacaaacatcaaccaaaattcatggaaggatcttcagtgtttattagatactcgtgttaaataatatttttgatttaattttaaattaataaataaactaaataaattaagaattatttctaagtgaaatccatattcaaaaattttaaaataacattttaattattactacagtgttatttcatgaataatttttaaactgaaaatattaaataaatttagaaaatggaaatttaaactaaaacttaaattaaactttatcttgctttctttcatttcattttcaatattaattttttcatcaattataaaactgaactagattttaacccgctgtacaccgcggaaacaaattattttttaaagttagtatatataaaattttgcaaattgcatttatctataacatatttttattttatagtttacagttgttattaaataacgtcatgccaaacccgtcctgtaaaaaaaaccatttatgatatgtttattaatcattgtctaaatattttagttgatgcgggacgttgaactaacacattttttgccaattggttaatatatgtttatttttaaaattttgaatcacaaaatatgacggaaatattttttgaaatttttaaaaactctatatattatatattgatgttaaaaattttgatatattaaactttttataagtttaaatattaataatgttttataaagtttaaatatataaataataatatttcaaaattaatattttttgccttttaggtaatgacataataactctaaaagtaaagatttagaagatttaaatctttaattaaatattttaattcctaaataattaatgccagtagcatgacattgtaaataagttcaaatacatgatttatttattttaataaaaaatgtttagtaagaataatatctatttagatgacaaaagaataatatttattttaaaaaaaaactttgttttaaaatatggttagcaaatacgtttatgctaattttaagggattgatgtgaagtttgtttggattaaatttgattgataatgttattgacaatttaaattaagaatttaaagtaaaattaattattttggaaaaaagatttaatgctaatggcattgaattgtaaataaattcaagtataagatttatttgctaaaatagctgcaaaaatgtatatgtagatagtacaattgaccccatgtataaatcttataagaaaatgtgaaagggctacacatagtcaatagccacaagaccaacacatagtagggacaagcccaatatcttaaagccgttagaacttatgacttggtttgcaagaaaaataaatgatctcaattctatagaacgtaagaaaatgcaaaacctagtcaactgttagggaattctgttttaagaaattgaaatatttgtatgctatgaacgttgatccgttaactctttgttaaaaactaaagaacaccaattaaacccatcattgcgtttcagattgttaaagtttcccaactcaataccaattgatgagagtgaccaaattgttcttatttagacaattcctaatgttcatatggaatttctaacatgtttcattcaaaatgatgattatgttcctaccaacaaaaaaataaaataattgatgattagcttagccattcattttctgaaaacccaattacagaatcaatttcaggttggtttgaacaaatctttttgaggtcggattaagattgctcagactgagcatgtttgggtgttcacgttttaaccctccagttcaaaatcagttaacaatgaactatttgatgtcttttatataattctgatctcatcttacttctacatctaaaaaaacactcctctagacttctatacacattcaataaaattatgtagaggttggactgctcaattttaaaaaattaaaaactctaaaagtcagaactacagtttgaacataatataaaaaatatgaacgcaaactttaataatagtaattacagagagtttggcagacctagtaacgtgaatcatagcacaactaattaattaccttatttatttctgctataattcttcacgtaatttttttattttttaaattcacgtacgtaagcatgtacatgtaccaccaattaattcttaactcactgttttgaagatggagttctgaaaatatgattgtttatcaagatattatattcattagcattttttgtcgttagtaatattaggaactaattaaaaccaacaacaattttttacaacaaactttgatgctagctaatcagataacactccagcgaaccaacaagtgagtatagagtatcaaacttttgtttcaatagaaaaaacatcaaaaaacctttagtccaagtttacttaaaaatgtaaattctaccgatccaacaatggataaatgattttttttcctcatatgtttttatcaattaccagctatagtcaccgtctctctattttactttgtgaacactaatgtaagtagtatataactaatctctaaattttgcttttgattgttttctctaaaaaatctattgtttattcatacatttgacagtaatctttttagaaaattataagaaaagtacaatcaaactatcaaagtccctactattggtgaactctcacttctcaacgttctactcttcaccaatcaatgtgaaaatacaaataaaatcgacatcgattacatatacataaaaacgacagctatttttattcagctaactacattgcaattcaacctataattaaataaaagaagaagaaaaatccaaaataaaaaattaaatcgagaaaaataaaagatgaattctcaaagagtagagggtagtaaacttttgtttttaaaaggaattacaaaatcgaatcataccttttttttatcaataacaagtataaagagtcttatatgatgatttattgattaccgttgagaaactaaaacaaaaacgccgtgcgtacaacgcttcccatgtgagcgacaataatatccaataaaatatcaccacgtgtcaaaagatctcaacttgtgaccccactacgctactccggtgacgaaacaccacagaacactccggcaactcgccgagatcggcgaacaaagactcatcctcttctcccatcggaaagaacaccgccacgtcatcagcccccgagacagccgtctttttctccgacgagaaaatcgggctctcaagaatcgtcgaagatgttgtctccatctccgtaaaccatgcgaactcgtcgacacatgatggcgtcgtttcaatcccccttccaagaaccataaacttattatcctcctcctccgcctctggctctacctcaggctcaggttcgggtttgggctcgggtttaggtttaggcccgtttcttgtggaagaagtgagaggccaaggatggttatgctcagaagtgtaagtgatgagaatcatcgttggatcatctctgcttctctcgacttgcttcctcgccggacaaccttttgtgctactacaacggtaataacctctagggtatggagatcccttaatgggcttttggccgtacttacgccaagcccatgaatctgagggcggagttgtgtcccctttgtgccgagatccttccatttctttcatcggtacgttcactactctcttctctacggatctcctgctgtaaagtaacaagtacatcaatatatgaatatactttagtcaaatgagaatttttcttgaaattgttatataattcgaatcacatatatctacctaccttcttttaggcgaatgagaagagataagagctttcatgccgttaaaggttgaagaatttggtgattcgggtccggtttcttgactactttcatgatcattgtagcttctcgccatatctagacctcgcttcatgtttatatatatgctctatagagtatagactatagttatatatatttacaagaagttaagctaagaaagaaaggtcggatcaagattcggatattttgttgatcttgatcactttttggaaatatatgagttgcagatggagaaagaggagtagaagtagacagagagatatgagagaaagagaaaatggagagaaggtggagaagaagaggggttgtgtatgaatgaggacgtgcgagcatatgtcaatttaatctctacttgttttaaaataatgctttatatccttatcatttaagagagggacctcgattgattactattttaatagataattatttgtccataaggcgatggttacatatgatcacaccctttgtttacaatttataataattttattgcgttttgtttgaatagatggggttaggtattattagtatacactagttagtttttttttgtctttgtccacccattgttcaaacaatcaaacacccttcttcttttttctcttacaatgtaattaaatgattggaaaatgattaggtaagtttattggctggtgtagtgcgtgtgaacaaggaaatgtagtgcatggtaactaacatatgtgatcaaactttattatcatccgcttaaaggtacatctaaagtttatttgtatctggtgcacacacacaaaaaagagagtttatttgtatctttttcaagaacttttccatgcacaaaaagtttattggtgtctctctcatctatgaaacttggattaggtctttcactaaactcagattaacatatgtattataatatgtaatgactaatgatgcatgtcatcttaatcttattcaccatatatatatatatatatctatttacccatttgaatgggctataccgtgatttctgagctattaaattccagacataaagttaacgattatcttaatatcttgttttgagtataagctattactttacgttgcatgtacaacagtaacatgtatgatgtataatgaaaactgaaaagggtatattgctataaaagagctaccacttatctcatgcatagatgcatatcatgcattcccactttatggaaatttggccatcatgtattacagtattagcctatatatatatatatatatatgtatgtataaatttgtgtacaaataatcccaaacactctgaataagttgcactccaaaagtacgagctaaaactataaatacaatattaaatcaatttttcttatgaccttttccttcaccaaaagcaacatcataatttgtcagctgatgacagtacccatatattatatagttatcatgttggatttaataagaaatcgtgttgctaatcaaagagataatcttctttattaatgatgcttatcgtttactgatcacagtttaccctttcttcaacctatagtttttctctgatctcaatttagagacaataaaaatggaacataaggaaactgtaacatccatacagtcaatcgtacgtatttaatatgattatcagggttgttttatttgtcttttctttagagattactttgtacaacataccgagatattattgtctatttcaataaaaaaagttcatatcgatcctaggattttctatttttaatcaaaagagactagaaaggtagatttagattttcttctttagctatagatttttcagtacaacatattgtcaaaaagtgaattaagtgaatattattagtagaagaactacaaattatacttcctataattcaatacaagttgttttagctaaaaaaccacatattaatatatactcttaaaagttcagccaatcataaaagataatgcataatataaatatgggagattgacaaaaatagcactaaaataagtttttcttttaaaaatattaaaataatatataatttacataaaaaaattgaaaacaacttatattgtaaaacaaaaaagtttataaaatagtttatattatgaaatggaaggaatatatattaatgaagttaaaagatatttacaatattttaaaaaattatattttcatcaaaattttatactcgagaaaaatgcggcgacggtggttatgacgttggtaaaaatgtgacaataatgatattgatctcggcgaaatgaaagcatgtgcatatttgtggataattaactatttcgtttcatcgatatcaataaacatagataaaacatgttaaagttttttcctgtatcgtcttaaataaattagtgtatgatatatcatattattcatatgaatatgtagcaagaagttattagaaatacagtttaatacgatatattatgtatattaacatgttagtactaacacaagttatagaggaagcaaaacgacttttccactttcgtcactagcgtgtatccatcctaatccaaggaagaaactttgtttaaaatgatccaataaaccacaattcacacctttgctcaaaaagaaaaaaaaaaaacaaaaaaaaccccacaattcacacatttaggaaagcagaattatacctgaaaagtagacatctaacaaaatatagttacatagaacaattttcctacgatttatgtgtcgttttttataaacactaacatttatgttttttctgtaaagaataaactcatgttcttaatggagttgcaagaatcttatggttacaaaacctcattactatggaaccgagagatcaaaaagtgggttatccctaatttacatgaattttctttctattactagataaatgccccaaacccatataccaaaatatttatcaatttatatcaatatgaaaggtatgaataaatatataaaaactgtttgcgtgttgacttggcattttatatattgccaccatctgatcatgtctcagttcagtttgaaaatatcaaagataactcagccttattggcaatttgccatataactacaatttttctagaatatataaaagaacaacatctatcacatatataagccatatatagtgtctaattggtgattacaactttattctagaactgtatatatatataattttatttttggtagtaagacacttactgtctttaaattttaaaagatcagtttttagaaaacaatatggattaaaagaacaaggaaataatggttgtgagagtttgtgaaaatagttggatccattccaagatcttaaaaacccgatggttttagaactgttgtaaaatttatacgaaattttattttatagaatacaccaactagactaactatttaatacagtaagttttgacaaataaaagtctaattttggattgatttatctaatcgtttggattaaactgaaatgtattgatgcgtgaagcggtgtggctgtaatgtgaaccaattcaactatattatagcgacgatttggcaaactatatttatagtgtattattggctgattgcatttaagtatcttattggcggctaatatcatggaattttttgccattgaaaatgggaccaataatttggcatctctgacttttcctaaaacctcggcgtggttcttgtacaacatgccatgatttaattatatgatttcaatatatcaagatatttattttttgtcactttttttagtacattatattaattttccaaccagcaattctggattaataaattcttttttctttgttcctattccatttccttatattatttgagaaatatttgaaataaacgtgctgatgtgttgcaaccatatattgattctcagagttttcttaacaaaatagaattatttatatgacaatacgaaaattgtcactgtatataaatgttgaggctaaaattatatttaaaattgtttgatcaaattcatgcttcccttagttaaaaccctggatccagtgtcctctcgcaatgcttatccgttttacagctttattgtgtttaaattagtagtctgattgctttcttataatcactggtctattgcataatatgtataggctttcattttgttctatgttataaatgattttaaaaacaaatccaccaatttattatgctctatatattagttcaaatcccacatcttcaatgcatccaaatttttccttgtaccacttttctccttgtggattgatatacttgttttaccgaacacttgcggattttaaaactagagaatcacgaaaaggagtgttaaatgaaaacaaaacgataagtggatataaaattttgaattttaaacgcaaatccaaacacaattactaacgctaagtgcaaaaatcaaaagcttacgtaagtttcaatgcaaaaccaaacccggattatgcaagtacaaatgtaaccgctaaagactaaccttaagactgtaaacacaaatacgaaaactatccaatataaacataaatgtcaaaagcaacaaaaagtgtgaacgatgtataaaaatacaaacaaaattatgcatgttataattaaaatatatacatatataaaagagaatggaaaatgctaaaatgattcgataaatgattttttttttcttcttaaagtgatgtgagcacttaatggaaacataatcgcaagcataatatgcaaagattaatgtaaatttaaacgctagcaaaaatgtaaagacaaatgtgaatttgatgcaaatataagtatttagcatttataaagattaatgtaattttacattcatgctaaaatttacattatctttgcatattgtaaaagattaatgtaaatttacatttcactaaattttaatttacatttgtatttgtgtaagcattttgcatttataaagattaatgtaaatttagcatttaaattttaaacgctagcaaaaatgtaaacacttgtccgatgtttaagtttattggtgaattcagttaattactttaaatttaattaaataagaaaaataatgataaaaataatattttttttgttaatcaaatacccatttttaagagcctcacatttgaggatgttctaagttgttacatggaaacatagaagacctagtgttcttgctcctaattgcgagtcagtcagcaatatactattaaccataaaaaatatagttagaaacgtgatcacgaaagaaaagagaattcaattagctctgtggtgaacgttggccactctttatgattgtcaatcatttttacaaggtctgagaaatcggattagaaaaccattgagactattcctttcgcaagagtacatttcatggccttaactaatgcatctaactccgcgtcaaagaggtgataagcatcgtcgattcaaggtttgttttgagtttaaaatcaaaatttatttttcctaatcaatgttggtagtttaagaaattaaaaatcctaacaataacaattattgaaatagatttgaagtagctaccttaaaaatatatttaaaagtctatttttcaaactcgacttacaactttagaagcatggacatacttcatctcaccagtgaatatgaaacacattcttgagctttttcccccttttaagtccttttatttttttattttctaaatgttacagtgggacacttggcttgacaagagctttgacaagagtttgagtcaaatcatccacactacaaagcttgtctttggattgaggtgcaacaatggcttccatggcaaatgaatctaggcatgatgcccttgcttgagccacattcaaccccatttcttcaaatgcttcaagaatattcacaagattgttttctccccgtggactttttatttttacttgaaacatttccccaatcttctctaccttcacctcctgccaaagttcaaaaaagaagaagaataatattgaacttagagtgccatgtgaacaactcaattagagtgccatatgaacatctcatttatcttgagcttatatttgagcttagaagtttatagattaagctaatcagttccaaaaaaatatgatccactttttctatgatcaaagttatatgtggtgttgttatataaaaatattcgattacattttggtaaaaaaactcctcaatttttcataggatagacaaaagtttctcaatatgactatgtaatatacatagaagagcttcaccaatgataaagaaatagatgaaaggagaaacctgaaattggtgcaaagattcttttttggtaatcttgagatcttcatattctctctgcaaagcttctatctcgagtttgagcatggctatgtatagaagagcttccctaataaccatgctctgttcatgtatactctgcataataactcattggctttaaacattttaaaatagtagaatcatcaagtgatatgaacatatatttatgttgtacatacaaatttaaagtgggtgagatttttaagaaaatgaggtttcccttggcttgccctcttcttttgttcactagccaccatcactttctcaattttttgaactctttgagacaacgattaatattgtttgaactttaaaggatatatctcgggatctctctatatatatacacacatttcttgtcgtgtaccaaacatacatgttggtgataaactggtagcttattgaaacatcataaacaaaatcagattttaaataataaagtataattagaatatgtatggtggttgaagatatatatatttttcttcatattgtagattgggcctgtgaaaagttacaaatgcaatggtttcaaaatgcaccgaccaggccattatcttgaagttgaaaggtgaagtctgagattatatatatctctttacatggtacctccctcacttataagttgaatcataatttaaaacttgcccactttaaaagcacgggtacttaagaaacatttgcttgtaaacaaatcacaaattaaaactcgaaaatcaatagacttacataatttgaacataaaataaatgaaaaatacataaagagagtggaagcatacatcgacgaacgcgaaaggaggataaaacaatggcaaaattccagttgtcagagacagatagatacctatgaattagccaaaagaatcctaccgacacatatatagcataagcaacgaatacaaaatgtgtgtgttagctaaatattaataaatgtatattataagagaagatctgtcgagggaagagagataagaggagtcacgggttgttttcttacgtttgtctcgcttcgaaaggtacgtaagaaagcagactaagttgtaagcatgaggctgctttgtttcacatgcttcgttagtaccatttcctctattttattctctatccttttctttcctattattagcaaacgcaatatcgtaagtcgtaacgtataaatgatcacactactacgtatatgttttttttatatatatatatatatagaaatgtatgaaatttatccttttggataatgtagtgctacattggctttttgtatgaaatttttgtttccaaatttcttgatataattgtttgacaaattttggttgagggcgtatcacaatacatatacaactggccggcgaataaaattattcgttagaatcatttgtaaaatactaatttaaaaaaatacacataaacattgctcacggatggacctagacaaaagagaaaaaaaggaaaagacaaatgatcaaccccaaaaatggatagtacacgacgaagatctatcacgagacatttggtaagaaatgtagacaaatagatagagatatgataagcgttgggtgtaatgtgaaagctgaagaggtgaccaatagactaaagcacttttttggatacaaaacaacaaaaaaacatggagatgttaacattaagatgacagtcttgtctcaacccatcactcgacatttgtttctttttaggtcatcacagtttatctagtacgatctgctatttgttttgtactcctttaaccttcataatatcagataaatattttatttttgatggaatttggttggagaatatgagtatcacatatattcaagataaatggagtctaattactttttttttaaattagtaatggtctgtttacgttttcattttcatttgtgatgattaaaaattaaaaattataatatgaactcgtacatcaaataaacaatcgatgctaatttaacttgacttacttagtactcgtgtttataaatccataaactcagaatatttgtcatcatgatatgaaatatatatatcctaatatcccgaaaaccgaatcaatcgaaaatacacgtatgttttgtacaaagtgtcgaaaaaacaaattaaatgaaaattaaaaatatatattggtaatacaccacatgtaaatatccaagtatatacatttaagtttctcgatatccacatttatgtatatccgtgaacttttagatctggtacaaaatggattacttgagatcggataatagatacatagagaatttaccatatttatatccacgtatctttctcagttaaaaggacagtctaaaaagtaaaataaacaactaaataaccactatcagatgaaagaatagagggttaatagtttcttcaccaaattttattgtaaaaactatacactaaatatagtgttatttcaataccaaaatggtgttatggttggagatgccctaataggttaagactaatatttcaaatcagaatgttaaatctttgggaaatggagaaaaaaataattaatcactattaatttttcagtatatttatcaaatgtttttgattaattatacaatatgactaattaaggaaaacactatgttaaactgaataatgcatcttaaataaagagattatattgaaaacagtatatatacacaaaaatacaaacccttaaatttttttaatttttttttgctgcatggttccttacctcctgatcttttccagtgataagtgtttcgttggtgtgatttttccttgtctgtttctatatctcctccattttaaccgttcttgttgtatatggtatttcaaaatttgataatcagcttcatgttaaccatggacttacaagtatatgtgtatgttaaacccaaaaagaaaaaaaaagaaaaaggtgtatatgtggaagcaacaccaatgttaagttgtagttttttttgttaaaatcactaattgaatttggttatcattttggtccggattgaactaaaccaaactatatatgaaccaatctaaatcctcaacatctaaacaaaatttaattaaaccaaactcagaaaaaaaaaaaaagtgttttcagctttcacataccttaattaggacttgaacatcgtcatcaagagccaaagaatcctttgttattcctcagattctgtttagttttattcttttgtgattaatcatattaatatgttggtgcagaagaattacagggcaaatctcctttggcagataactcactaattaaaagcaatgcataaagagatgcaaagatctaagtaatggtttcctgccaatagagatcttaccctgtaatgcatttccacctttgatccatctcacatgttcacaattgtaacttgcaaatttgatgttatataaacttggaaagaagcatattccacggtacaatgctactgcattgtaaataagaccgatgttttattccgacaatgatctcttcttcgtataatttcttaggaataatcttccatgccacaagttttatggtcagaaatattcctaaatgaagagcagtctaccaccttcttctcttttaacaatttctaatccttcgcaacatcttccgcgtgcatcacaacaaaagtaaaagatcgtacatgtgtcatttaaattcacaaaatttaatctctagttttaacataaaaagtcaatactaatgtgtgtctattacatatagtatgttcttgacctcgtggataaagcaatattatagttcactttaatactatatgatataatgtcaagccctttcatatgtttaacccaattatttgtctgatttgaatttagtccaaaagttgagacggttgtgagtcttgtgacttgacaaaatgtgttttgagatcttttgtttgggatcggagtactatattaaaaaaaaaatcataagaaaataaaagaatctttaatactatggaataagataaaaaagagagtggtataatagtaaagtaataagtagaaagtgattcttgaaatggaagatccgtaagaatgttcttgtgattttaataagcttctacctgaagacgcataaaatgcaaaagctcgaaactgcaatatgctctagaaagttataaatatgtacatttatgccactcaataaagtcaatcaactatgaaaaagaacaaaattcgaattctacagtatactataaaaggtacattaccctaaagtaattgactttatatatattatgtcattactttggacattatagaagattaacatatatcttagtcctaatatatatgttaatcaggtctcattgtaacaggttaacatatacactagaacataagcaatctatctactattaccatcaatcacaattcgaaagataaccttgttcatatgtgaaactctcagtaacttacatttcttcttaagcaagatcccaactttattccaactacattcctttaacaaaaaccaaaccaattccacaacaaataaagatgaaactgttttgcaatcacaaacttacttatgaatcaactggctctaggatccatcccttgctgccaaacataaacaagctcatcccaaccagtactcgccattaaaccttcaacaagaacactcatatcgatcccaacagcaaactctgtatgatgatcatacctaccaaccaaagcatcttccaccatatagtcccaaagacaaacactcatatcataagagcaagaagctatcaaactcctcctatgcggcgagaatttcaccttcctcaccgcatatccatgaccattaagcacagccaaaggaactctataactcctaacatcccaaaccttaactgtcttatccactgaagaagtagctaaaatacaatcatcatacttattccaatcacaagacaaaatctcaaaatcatgagcagggatgatcatagttgatccaggttctctaacatcccaaatccttaaagtacaatctccagaagcagaagcaaacacatcaccatgtttaggattccaaactgcttgataaacgcaataagcatgttccttaaaagtccttacactcgccggacgatccatagcccaaagcttaaccgtatcatcccacgaagaagtgagaaacgaatcgcgccgcgtgggattgtaatccacagattgaacctcacgcgcgtgctcttggaatgatctaatcggattagaaggaggaggaagagctgtgtcgtaaatcttcactgagccgtcaccaattgcggcgatgagcacagagtcatgagattctgaccaacatacgtcgtatacagcgtcggctgtatcgtacgagacggattcagttacgcctggagctccaggagcgagctcgaggacatggattcggccgtttccgagaattccgaagttctgagctgtagcgacggcgaggcgtgactcgtagaatggactgaatttcacagagtagccattgaacggagctttgaacaccggcatagcttcttcttcttctccggtgagtgattgaatcaaaagaagagtcttctcgaagattcaattcaacgatctgatcggataacgccgattttgctcatcgcagaattaattttccccccaattgggcctattgggctggagcctagcccatttgtgtaggttgtgttaaaacgatgtcgtttggcatttcaagttagggttttttgggggtttggttcaagcttcatcgtcgtctctctgtctcttcaatttcattcgttttctgagataaaagtgagagagaaatctaaattcgagaggagaagttttaatttttctgagttagattcaatggaagagatcacggaaggagttaacaacatgaacttggctgttgatacccagaagaagaatcggattcaagtttccaacactaagaaaccattgttcttctacgtcaatctcgccaaggtaacgaaacccttttaatcgaatcttaataaattcgtatttagattgaaatctatggattcgaagtgttcttatttgagtaccaagtctggaaatgtctgtgattgttcatgagtgttaatttatctgttattgactttgatgagttattactggtggttctgtgttgtttatgtgactctttatcaatgtttgttccttagatttgtgaactttgttttgctctttagatttgattaaacctgtttatgttattgaccatgtttggtgttttgttaacagaggtacatgcagcagtacactgatgtcgaattgtctgcactaggaatgggtaatgtttattctttatgatcttgtttatatatcaaatctaatatgtatggtttttaaactatgtaactgagttcattaaattcaaagttattatcagaaaagctgtttccttttattgttatgacatagaatcttttatcttctgtgattttgtaatatcttatccgagctttctttattggaagagtttattctggtttctcataaaacattgatttgtgcgttgtgcagctattgccactgttgttacggtcgctgagatattgaagaacaatggctttgctgttgaaaagagtaagatcttcttaatcttgaatgagttaatgttagcacaagagatttgaaagattcagtgactaagttttgcttatttggatattgttttttcctgcagagatcatgacatcgactgtggatatcaaggatgattcaaggggtcgtcctgtgcagaaagctaaggtatatattttcgaatcatttgataaattgcttatgctgtggaattctagcttccgtctaatgatttttgttctctgggaaattgctatgttggttgctaaattggtgacactgtgacttgtagattgagatcacgcttgccaagtctgagaagtttgatgaactaatggctgcagctaatgaagagaaggaggctgcagaagcccaagagcaaaactagattgtttcaagttttttctgttcaacgatcttatttcttcgttccctatctctatctgcttaattttaagacacttctatttcgttaatttttggttcacttttttatttcaccttggattgtgtcctctgtacctctgagcatttttatttaaagatcgtaggaagtataaaaaagatggcttcgttgcataaatcagcttccaaccttattatgtagagtaatacatgtagttgaaattttattttgaagacttggaatctgtccataaaaaaggttagtgatatggcttatggataacaaatcactatctctgggataattgaacaaatgtaagccacatgatacatatgtgacatcatgagctataagttataactaatggctatatctaatttttttctttttgtcagttcttttagtttaacactaaaacgtaaccatactagaagaaatataagaaagtattatagtgtgcaataaggttattacttgctaactaatcactttggttcacattcttagcaccaataaactataataatagtatattatagttcaataggatttgaccaaataaaaagttgtcaattagaaaaacaaaaagaagttgtcaaattctgttaaactctcaattgccatttgttaattgcagtctgggatgggattccattgcttgatgataatagcttttgacttttactgatttaattattatgtctgtacaattagtcaaggctaattgattgatgagtgattggattgaatgataatggacaaagttgaaattaagagaatgaagaaaaagaagaagatgaagttatctaaacaaattaaatgaatggaaaatcattctcttaatttcatttttgtccatgatcacttatcagttactccataattatttttttcaagatcaaaatatcactctcaccctttatcttcatgtcctctacatatttatcaatctcttttctcctctaacacaactattttgtgctggaatttgttgaccaacacaccaacacaatctatcaaccatagtgaaaccttcattaaacgtaaatgagatacatgattaagcttaaactaggatttaacccgtggtacaccacaggaaaaatgtttaattcatatatataataatattaaattttatggtttaaatttagtattaaagttatataattttatataatattgtaaataaaaaatttggtgatgataaaataataaataaagatttaactcgtgttatatcaatccaaatccgtcccgttatataactcgttttatgatattttaatatttttttataaggataaatattattaatgttttataaagttcatatatatcaataataatataccgttaatgctaattgatcctcttaaataggaatattagtgagtagtatattttagtttagatttggaaagatttaaataattgttgtgatatatttattttagtttcctaaattttagtaacaaaattagtttatatttagatttgaaaataaaattgttaaatattaaatgccaatggcattgggttgtaaataaatcccaacttgaagatttatttcataaaagtgttgcaaaaatatatatatagatacaaaataaactaaaccataattactaaccaaactaaaccataactaaacgaagtatatacactctaatacaatctttttattaccatcaccgttcaacaccacctttccgtccgggtaatgcgaacgtgttaacattattacaacaccatgtaaaaatatagtttcatgttcggtaaattgatttataaacaactaaccacaaatgtagtccatccatataatttttgtcgatgtaagcgtgacttatctaatattcatcattatcccgaaaaaataacaatcacccaacattttgttctttattttcgcaagaatcaagagtcaagacttacctcctggtcctcctctcatgaagatgttataagttaaaacatgtcgtacataattttatcgacgatattctataagatatagcgtgtaaaacaaattaccaacatacatgattaattgattatgttagagggttaagtgaggaaaaaagagagaagaaaaaattgttactaaatttctagaaactaaatttcatcaacctaatttcatcttgtctagtgttatttttttccgtctaaagatttcattcattagctgcggtagagatatacaaaacagacaagaacaagatcttttcggagacaacattgatgggtacatagaaacctccaaagactaagacccaaattaaagggcaaacaaacataaggaggaaaagctcctaaaagataagctaatgagagaacatgtaaaaggactccataatagcaacacaactcttcctcacaagccaccgacaagcatttccaaagaatttgtaagtctagtgttgcctaactaattttattttgatttttaacaattagtaataaataaatgaaatcaatagttggtcaaaaattaaaaaacaataattggcatttggcactgttagcatgcaaatacgtttatgagggcaaccccgcaacggtgttggaaagcagcctgctgacaagagtgttcgttagccaaccgtttaatcccttttaattagtaaacacacaaaaacaaattgaatttactaatctctcttttgtataatggaatattcactggttaggtgagttttttgtaaagatgataattatggttctgtttatatgaattaaatatttttatatatcataaaagaaaaattatatacatattttgcattatgtatgtaagcatactttagtatgtcatacttataacataacttcagtgtaaacaaaatccaaactttcagaagatatgaagacaaagaaaactcctggtataataacagcataattattgattgaaataatatgtgagctaagttggtatttgtgtgtatttatttatccattctggagttattataaaataaaaggtttgaaaatgatagattgagttggttgcgccaattttttttgctttcccctatcaaaatgttgtcattctctaatcggcccacacctaaaatgatgatattccacaaaaatgcaagtgaaaagtgaaaaggtatctcataattgtttagttatttaacaatcacgctaccatactcagtcgtggtcagcttatataaactttataagtaacgcatagatctatggattctagatatgccaccaaaaaatcaactgtgtatattcttttgtaattgtaaacgatcaatcggtgacgaacgaacaaaactgtagttaaaagcagtacaaaataaataaataacgaatagagagcgcaacaccaaaacaaataataagaatattgctctttgcatcgtttttgctatcaattttgtgagtggtacaagattatactaatcagtaatcacgtccaatatttgtttgattttacaaccgaatttggtttggttcggtacttcggttaaatgttgtcaaatacactattcatgttgatcattgaccaatagaagagaaaataaatgagagaaagcgtaaatacaagtaaagaggaagaagagtccaaatgtaccaatcagctcgtgactactttcagcttacctttttcttctccaagtcccatcttcgtctccgtcatcttcacggcacatcctccaaaaacgcttagcttctctctctgttacgtttactcaagtcttttttagtctcctccttaactctcaagccttttccaagtttcaagcggctccaacggttcaatttcgcactttccgatttgtggcttcactttccggtaacgtactgatctcaatccttgtagctctaaaacgactctcctagtttcgcttattttttttcttgaaatttctactgtagaatgaattaagcatgtcgacgaggttattttagttgactatcgattagaatttttcgtgagcgttactttctccgtacattatcctcagttctgcatctaaatcttgcacttagttcttcatttcttgagatttgttatcattattctctactctacttagttataacgattatgacatcgtcacagtcttctatatgtggggtttctggtactcaattgcgcaaatccttgtaatgattgatgtcacgggtctgaaaattttgacaccgtcactagatttcataacttttaagcggtgttggtgttgcgttaaatattattattaaaattgaagtttctagtagtaaaaaagttcacagagagatcttttctttttgtctgtatctacctacttacttcagaattcagataataatcctttatacatagagaaagagatcatctactatatgattattatatggtttttatatggataatattcaagattactgaaaaatctgttgttttgttttgtttcagatctgttctagagaacttcaatatatatccatatatggtttcattggtctgtgagccatatcctaagaactaaactagctagctctcttactatggaggagaggaaactgaacttcagcgtacctcttctttcaacaagacggatgcagaagacagcaggagtctctgtgcgtagaaacaagagtaataacttcactgattatgactctaagacaagtgaatgtccttctgttccagttcttgttccatatatgatgggtttagatgatgaggttactgaacctgcctctgttcctttcacttgggaacaagctcctggaagattaaagggcaatgatttcaaaccccaagtttgtgttttgatgaaagaagaagaacaagtttttacaccatgtcttccaccgggtaaagccgttgatgcaaacatgacaagattgcagagttcaaagggtaaacaagttgaagaatcagatgatgatgaagatgatgtgttttctgatgctcttgacactctctctccaaaggactcgttttcttttaacaatagcattagtggtgtgagtgaatatggtggcgttgagaccaagaaaccactggatgctcaatctcgggatttcatgatgagtcgttttttaccagctgccaaagctatgactgtggagcagtctcattatgcttcgaatcgaaaaccatccacttttatggctgaaccaacgatacagataagagagttagtaccgggggagaagcagcaaactcctaatagatatgatgtgtctatagtcccatcttactattaccaccaagacattgatgatgaagaaagcaaggtgggtgaggaagatgatgaagtttctgagtacgcctatctttcaaagagaggttgtggaatgttgccacaattgtgctttaaagactctctcggcatgctgaacacagtgcctggttttaaagctaaacacaactctccaataacatcaccaagtcatgatcaagtgaagtcaagcaaggttgctcaactcaaatatcgattccaatctgttaaaaaggttccacctttagactcctattagtcccttataaatatgattagacactcactgactagtagctcttgtacattttccagctagctcttgattcagtttctaagcacaagttgagtggtaaagttcattcaccagttcatccaagcaatgggaagaagttcaactctgaatcaaacttgatttctgctgcgaagaggtcttcatctccttacagacactctcgctgtatgtcaccatttcgcagtacaggtaacggttctcctttacaccatgcgggtttccctgagactcgtagggaaaccgagaacctgagagctaacaggttgagcaatcatactagaaacataagcaggacgtctcaggagttactctacccaaaaagcaatggttcaatcttggagaagacagtttatgtcgacaccgagaatgatcacatgaccaatgatcagcataactcaaatctcatgatctttccagaggaagcagatatgacaggaaggaaaccagatgccaatcctgaacttgaagcttttgaaaatataagtattagaagtagtgaaatggtgaagggaaatgagttagtagagatcagtagtggttttgatcggtctcctcttgcaccaccttctcccaaaaggccttctgaatcttggctttgtcataatctgccttcagtaacttctcagatcacttcacgtagatatcatccattcaacccccaaaagcaggatcttacagaaaactacagaaatggtaccaagtgggaaactattgttaagacttcctacatgcacagagatcatatccgatattccgaagtaagcatctctcattttcacatatacagtgctttaagcaagaatcagctagccatctttggtatttacttacttcaattttgtgcaggaactggttgctcatacatctcatcaatccaaaacttgagaccttgatgcttctcgagttctgacctccccgagatcatcaggtttatacctacgtttcagctcaatcattagttatttggtagtcatttcatccactggtgaaaagaaaatatgtgcttgttttatgaacctcatttacatgtgcagcttcaatattaactctaattaatgaggcaaatactagtaagacttaggatgaagaaaacagtgaactaaaggaaggcagagtaagaatttccattaagctcgtctcttgttttacatatatatacaaactatatatgagcaatccaccaaaaaactggctctgtgaccagaaaaaatcgactaaattgcctgatctctcaccctcttttgcttattttcttccctcatcttcctatcactcacattacaataccacttatatacataaacacacactgggagatttcggagatcacaacaaatcgtgaagatctccgaaatctctcagttttacaccaacatcaacattaacatagaacaagaataacgaataaataatcaatagtaacaaaagaatgtaacacaatcttgtttcttgtatattcttgttatcagccttccttgttttatactattcagtatcagatggcaaatacaatgcttcttctactacaacttcttcatggattagtttctccagctctggtctgagttccttgttgcaaaactcttcatactcttctctgtctcctcctttcttcttcacctccaccaccactagagatggagtcagctcaaatatctcagccgcaattgtcaacggtccttttgctccttctctacaaccttctaatctcaaactccattctttcttcctcacagtaaagctcacgattttcgcaatctcttccagcttcgatatgatctttgaaacaggagcacctgacacaaacctcgtcccttctcctccttcttcctcaaacaaaccagacagatcaaaccctgaagagaaagatataatgtcaaacgcgtttaagctcgagggtcttggcattgaacctattcccatccgttttacatcgaactctgcatcgctctctgaaactgtcgaagagcggcctgatgatgatgcctcttcctcctcatcttcatcttccctacacagtttatcatcttcgatgtagaatttaacatgtttgaatcctttcttgaaccatctgttcttcatgatctcgggtattgtaatccgagtatccggattcgtatcaagaagccgagtcaataaccgaacaagatccgatgaaaaccaacgaggacacctaaattcccctttgtaaatcttcttgtacataaccattatgttcttgtcgtagaacggaatgtgaccagccatcaacacgaataagatcactccacatgaccaaacatcggctttcgctgcatcgtacccttttctagtcaaaacctcgggtgcaatatacgctggagtcccgcaaaacgtgtggcagagcccgtcttgacgaagctgctctgccaccgcgctgagaccaaagtcagatactttaaggttccctttgttgtctaaaagcagattctctggtttaaggtcacggtggtaaacaccgcggccatggcagaacgaaacagaggagatcagctgctggaaatatctccgagcagtttcctcgggcaatcgacctttagcaaccgtgttgaacaactcgccgcctccaacgtactccatcacaaagtaaatcttggacttcgtcgccataacctcgaatagatgaacgatgtaagggtgacggacacggcggaggatagagatttcccgtttgatgtgagcaaccaaaccactcttcataatcttctccttgtcgatgactttaatggcgactttatctccagatttgatgttttgagctaaataaacctttgcaaaggttccgtggccgagaagcttcccaagctcgtacttccccatgagaatgttgtttcttgggctcctaggactcctcggactctgtgggctgatgttaccatctttgtctgtatccattataccaatccggccaagaagatccgccatgtatcgtagagcatacggctttgggtgcggtggtggtggcggcggcggcgggtctgggacgacggtggtgaccaccagtggtggttgagccaaggcttgagccatccgtgtccaaagaaagagcttctgattggtttgggttttgtattcggggggttttggttggtttgtttgtttcttccgtttgagtctccttgtttggttggttgggcaaacgtgaaaacgaccaaaaagccaaaagaaaacagaacgaaaataaaatagggtttggttgttttggccggttgttgatgtttggccttacctaattttgtcttgttttataacggttttggtttaaattattacattgaaatggtctaatagtctttattggaaaatttaatatatcatttgacttcgaaattatcataaatccgttttttgttttgccagcatatttacacgtgttctaattaatttttatcattatagagaaatataaatgttacctaaacacgctatatgcctattacctatacagtatacaccaagacaacaactttaaaataaaaatggttttattttgaatataattttagtagtatatttattcagtgagaaaattaaatttatttctaatgtttgaatatttaaaactgtagaaaataaaataaagatattgaaacttatgatggtgtcgtcttcgttatcacagtacaatttgcaatgaacaatgggttttgtgattttcgctatgatatttctacctccagcagtttattcagtgccagataatagacagaacttatcagtagcaaaaggaacctgatcgatcagcagatcatagataggtattcataagaagttgccatcgtatgacacggtcacgctttactgagttaaattttatttcttttgtcatcacttttaaataatatttataactcttttcttgtgacgacaacctatatgaatcagaaatgtaacgaatggtattgtgggaaccaggtgttgctgcgttggtgcttacgtgagttcgtggacttcacatcgccgaccaaatccgagttcatttttccttacaataattccagttctttctataatattatttccaaagttatatccaaatttggttttctaccttctatatataattctttttatcatgttttctaaatggaatattcttttctacactaaaatccaaatcactaataacatcatatatatattcacattagtttagttttaatgaaatgtacactatttgaaaatcatctagtaaacactaccctagtaactgatataaataactatcgacaatttgccaccaaattaaaactacctttttcttataaccaacatattaattggtgcatgtagatgttgatgttatataaaaatgactaagaaaaaagatgtaatatcaacaaaagaatatacatgtttgaaatcgacttgtgatttggactaacaaaacaaatagttatcgagtaaaagtaaaactaagtcttgttgaatagcttattatatgggttgctatcatttgattatctcaaggaagtgctatttatttaaccctatccataagcacaaggaagaaacacataagcgaaagtcactactaacttcaaacgactctttacaatctataagaaaagaagaaatagttttctaggtatgactacgtaattactgagtatatattatactttgaaattaaatttattcaaaataaggcttttaattaatttaacttgtaacttttcatagaagctactgttcatattttctttgctagtcttaggtctattatattattgactcacaacttaaaaactagaaaaaaattgtataaataataattacaattcagggcaattttgcttaagaactagacaaatgcaaggtagtatgaattaagttgcaaccaattgcaatgaaacaaacaaaatttaacatatttcttcaaattactattatatttttttaaaaactttagaatgtaaagacattaaattgtaaacaaataacaatttttttcctgttttatcatctagttttaggagtttgtcttacatttgaagattaaaaaaaatatccaaaaattaaaagcaatatcatatagcaatctcgcattgttttggactcattgcacaataattttagttattgggcctttagtaatagataaacgatccaatttataactacgtcgttttaaaaatataacatcccaactgggttctgattcggtggatccaagttcgggttgcaattcgattcagaatcaaaccatttttgaagaaccctaaaagttctcttcttcccccaaatttgaatttgttcttgcaatcggattcgaaatccgaaagtcttagtctcgaatttgagctcaacagtttcttatggctccgaagaagtctgaaggaatcgctttgctttccgtttacagtgatgaagatgacgaagagatggaagacgccgaggaagaggaagaagaggatgagaagcagagaaatcaggaagagagtgaaaaaataattgaagaagatcaggtagaagaagcgaattatatggatgaagaagagaaaggaagaggaggagaagattctagaacgccgaggctattagatggtgttggagcttcttctagtgctcatgggactcctcgttcacttgataacgatgaatcatcgagacctgattggagtaatcgaatgattggtgagtctggagttgcggatggtgagagaggtgatgatgcttcaggggaaagtagtgatacgttattggatcagtttcttccgccaagaccgagagagaggtgctctgaggagctgcaagtaagtttcctgatgatgcttcaatgttctaattttaaaagtttaggtaggcaagaactcattggtgtgttgtttggaaatagcagtcttctaaactgattagtttgtgattctaagctgattactcattgctctgaggagctgcaagtaagtttcctgatgatgcttcaatgttattttgaaacattaggtaggcaagaactcattggtgtgttgtgtggggtctcttggtacgtatggttggaaatagcagtcttctaagctgattagtttgtgattcagttacaagttggtctgatatgtatttttttttgttgtgtttgtagaggaaaatagataagtttctgagcttgaaaaagatggggaagagtttcaattcagaagtgaggaataggaaggaatacaggaatcctgacttcctattgcatgctgtatcttaccaagacattgaccagattggttcgtgtttcagtaaagatgtatttgatcccagtggatatgacccaagtgacttctgtgatgcaataggtaactccacctttttgtagcttcttcgtttttttcttctcttttcttgtttactcttgtctcagtaagaagcatctttgatatcttttgcttataattttgatactctgttcagtatcatgcactcattattactttagtaaattattgatgctggtcactattattactatattctgcgttctccatatttcatgatttgtaatgatccttgtttatgtgttaattacagaaatcgacatgaagaatgagagggaaaggaaggaacaagaaagcaagaagaaccagaagcttgactttgtttctgctggtactcaacctggggcggttttcgctgctcaaaagcctaacatccccattccaggtgtgtgaaaatgactaggtgtctgattggttagttatttatctcagctacatctctgcaaaatatgatgaattttttttcaggtattccagctttagctactagtggattgccttccataccaaccgaaattgctgctcgtgatggtagaccgaacaagaaatccaaatgggataaggtttgttatcagatttaaatatctagaatgtgactatatgatgattttggcatacttagttcttcgcttatttcattttatgtgtttatggttaaatcaggttgatggggacgtaaagaatcctcctctagcagctggaactcaggattctatatcctcaatccggtctaatgcagctcttgtatctgctacaagtgctggttctggatactcagcttttgcgtaagttatattgtctgttgtttgatttgtaaactaatacaatcttgagctattcctcagttagataaatcggataatcatttcattaaccatacaggcaacaacggagacgagaggtggaaggaagaagatcttccgagaggaaattggagagaagaagttgagagacataaccagaacgaagcttttctatgttgtgattcatgtagcaagagtttctaaagaggttctagttcaatgtttcataacgagtacaaacttaaaatcaatgatatacagtaccttcattctttttttgtactaacgggtaatcaaaaatttcagaccagacactattgttttactttcaaggatcaaaatttacacatacactcaggacatctcggttgtctataaatgctgcgtccataaggcctagtacgaagcttttggccttcctctaccatttttctcacacgatcttcaaaaatcttccactttattgtttcactgtctgataagattgctgcaagcctcttcttgttaggtctcaatgttggtgcctgaccgtttccgtagtagtttctaaatccagacactaaggatgatagttgactcccagaatcagtcattgcaaagacatctgatgctatacaagctatgaaatctagtgcagctagctgcaaaacagcgtccgaaaacatcgaaatgaagtttgagcaagaacagagtaactcgggaaaaagtaagtttaagattgtttatatctttttacctgagaagagaagttcttgaatggcgcaagttcttgaggtgtaaggagagtttctttggtcgcgatattcgggtacagtcttgttaaaggaagcatacgagaagagcctccatagatttgagatccagctaagtaaatatatgtttttctcttgaatccaagaccagcaagaaccagagttgcttcctctggtgttagtggacacttgcccgtttttcttaactcttctggggacactggcctgaaaaataagaaacaagatctgattagctttaaagaacattgaagagggcaaaagtagagttgtttcatctatcgttgtactttgatttcttcaaacgtttgagtagaagagggaaatgatcttcacggtaagcttgaagctctttgcgctcggcttctcctcctccaaaatcgcatagagaataagcaaccatgtcttcttcaaaccttagatgcaaagcaagatacttcaacggttcttcttctcctttaacagtacttttcaccatggattcaccaagtaatgcttcttccaatctgctacgcgatgttttgaatcttcttatccgtttcaccaacagagatcccgcttcttgaatcttgggcgcgaatttcagcgcgtgaaagttgcatttacatcgtaatctctttaaatgaagcaaaagaaaaaaccatattatttctaagaaaccaagtgagtactctaattatgcattctcattttacctgaacgtcaaaaggcaatggatcaaacccgaggcgattcccgtatccgaaaagatgaaccattccatacttctttaacaaaggaagaacatgttcgatgtaatcgactggtgttgcctcttttacaagctccgtatcagtaacctatgtagaaaaacaaacattatgaattttgcatctccaataaattagaccggacaaggaaaaaagggagttcaaaaacacaccaagctgagattcttgttatcagtagattttagatgttgaggaagattcttcactatattcacctcatctttcagatactcgataaaatgatcctcttggtatatatcaccaaattggctgccatttacgcactttcgcaaaatcaacaaacaaattttttttataataaattttgaaagtcttgaggagtttaaaatacctaggatctttccatacattgctgtaaagaaaccgaggaagaactagagtcgcgttgagcagagcagcaaccgcaacagcgttacagatctgcaagaaactaacattcactatatatactttcttgatgaatcaaatatataatgattactttggtatatacttacagccacgcgctgttgattaaggcctccatttgcactaaccatgatgtaaccattgcttaattctctagacctctctaatgccacagctgctttgttattatctgcacaaggcttccactgtgatgactttgaagatctttcctcccggaagtttggtgtatcgggtttgaattcattcttgtaatacaaatggagaagaagattattaatgattcaagcaaataacaaatataatttcttacattttcactaacctttgcaagagaatccgaagctaagtttagaagacggctatacatttgaactggtgaagcatctactgctccattcttaattgacataaacaaaaattaagaagcaataacaatggaggatgtataaagaagatatatttattctcaaaccttatgcaaagtcatattgctcaaccttgaaatgtcttgcaccacggctctactatcggaatgaaagatcgaaaccataatggaatccatacagaaaatgaaaccggtgactgagatcatcaaaactatcgacttaaagttcctacgaagccatgaatgttgcttcttccaaaatttgttgctactaccactgctttgatcatgcttagatccttgagccttggaaacttcacttgcatatattcttctaccgagtaagagatcattaccagataaagaatccaaacttctcctcccaaatttctcttctttatctatggtttcaggtcgaggacttctcggtgatccctgtttccccattaatgatctgtctcttctctcagctcataaactatttaggaaatgcaaaatgaatcaagaactctctcgatgtatggcaagcaattaagagattgatggaaccaaaatattcaacaataaaatatgacaattggtgaaaaaagtgtggaggaatcccgacagaacaaattaattctaagtgaagctaacatagttgttgaggaatctctgaattcttttttaatgggaagagtaaaacgcaaggcaaaaaaaaaaagtttttataaataagaagagccacgacataaaccttaatgaagaagattgggtatggagatagctacatgtgaacaaatcacaccagaacagatagcttctgttcttctgctttctcgttcgtcgatcgttaccgatctccatgacggaaccgaatcttctatcctttatttaacaatgcgtgtgtttgaaactgtgttataatacctagatcatagaaatctgtcaggaatctcaagaaatttatccctgtattatattttacccatttttgttttttttagcatagacccgagaatgacttgtgacgcaaacttgctctttcattgttttgttatataatattagatgtaacggtgtgtcaactatccgttgtagtctagctggtcaggatactcggctctcacccgagagacccgggttcgagtcccggcaacggagtttttttatttttattttttcgttgggggtaaattcttttttcgttgcttagttttgaaaagtgttattgcgtagatggaaatgaaggttcgttaaaaacaaggattaacggaaaacacttcaatacttcatatttggaattgatgtttttcacttgagacttgagagtattttggcatccaaaaggacttaaacacaataaccatgacaactagagtgtgtggaaactcttgtagagaaacctcagtgaaggacttatgtgatttttagaaatagaattcaatggtggacggatggtagagttttccgccataaatgttaatccgcatttttccgccaaaacatgtattccttccaaaatgtaaattcgtagttttgccataaaaaacgcaaaactataattttccaatcaaaaattgtgatttcataaatttctcaattttgatgataatcttgatgaaaattattgattattattttatattaattattaattaaattattatttaaatgagttgggaaacccataaactcatttgaaagaatgagttgagttgagttgggttactcattttgacactcctacatataacattacataatcgagacaaagagtcttaaataaaaacacacatacataatcgaatctaatcttataaatcttcctgccgctgcttcttcttcttcttcttcattcttcaaggttgattgttgtcacaatcatgcacattctagtgaattgggtctgtgaaatgattcacctccaccttttcattctttccacccttcttcttctgtatgtacttgctattgaatgagattgtcgtcacagatttcctaatggctccatatttcttcttcaaataatgaaacaccgttgcaaccttcttgtcatatccttcgtcagcttcgagctccacttctcttctttaagattctccaacgtaacattcaccttcctcgccgcagatgcaacagcatggctcgtgaatgggatcttcctcttggttgggaaagatccgcacttaacaacagccttaacagctttgatcatttcttgaacaagatttttcattttgcgctttgattaaaaaaaggattaatgtatgagttatgagttatggaatgctcatacatatagaagaagaataagaaaaagaagaagaaaatattaaattttgaaatcatcattttgatgagaaaaattggatcgtgtactctttggggttttagaggtcacatagagcacaaaaggagaaaaaaatggagcgtaaagggagaagagaacgaagagagagtgaatctttagttgcaaatggatgtcacgtagatgaataatattttgtataggattgagttgaataatattcagcgttttttgttcaacacaatttttccaatcattcatctacgtgacatctatttgtagcctacatttcactaaatataaaaatatgatagtttcctctactactataaagttcaatagtatttgttttaaagatgtcaaaactataaaattaatttgaaatatatacctatatatctttcttaaaaataagctaacttttttggttttttgtttaaactaatttataaacctgcaaaatattacacttacatgtgattttacacaataatgcatgttaaacaaaatcttaatatacatgaataatacataattttaaattaagtttataaaggggttaatcagatgaataaaaaatctcatcgacaccaagtaattattttaacatatctattttaattaaataataaatagcatgtaagactttgttaacgtatttacataacatcatatataattaatactcttttaattgataaaatttactaaaaaaatttaactaatttttgcataaagtttttttttttttgagcaaccatcaatgtttacaagtgatccaattctaacatcaattaaaaacgaatgatacatttattgagcataattgttagaaccgttacaaatactaacatcatttgtattaattgatgcaaaatttacagacagaacaaatcaatcaaaatattgcatgtcacttttaatttgtttatatctccatcaattattaaagttagttcttcaaaaagatttgtttagtttaattgaactcaaatagttcaagtcttgtctaaatggtgttggaaaacttgctaattctaacttaatccaatgtttgttttttttttcaaatcaccttttacatgctctattagctcaaaattaaggaagtgaaaagaagttcaccaaacaccaaaatgtgaaagagaggggtccatgagtcaatcactttcaaaaggaaagcaaaacccacatgatcttgcttccggatatattgaaaacacacttctcttcttcttcttcgttataaatcatacaattatatatatgttctctcatttaaatcaatgaagttttatggaaataagcaaaaatttgttaaggtttgtaggtaattttctttgtaaatttaagttcgaaattagatataaagacgatcatacgaccagtaaatgtattgttttgtgatatacaaattttcgaaaagtattaatgaataagaaaaagatttaacatttactgaaatccaacaagatgcgtgcatatcatgattcagtgaaaaggatccaaactaaagttcgactatttcttattggattgacttttgatgtcacttaacgacaacaaaacgaataataaaagttaacatcaaaaaagacaataggaaaaaacacaaattgcaagtatgataagttggttctaatagttgttatgtgggtttggaagaaccgtactagtatttactttcttttctaatttatgaaattcttttacgataaaaaaataattttagctctcgattgtttattacaaaatttacatttataatattgcaatcaaagtattttatcaagtttcttttaaactactaaaaatatttggactggatgatttttttaatctctaggcttaactaagtgaattatggaaagtgatgtgtaatgtgtggtgatgacatgatggagacccaatgatgctacaacatgtgtctacccataagcacccagcctagatgaacaacaatgtccattataagataatgaagaaataaagaacaagatcgaagaagaagaagaagaagaaaataattgaaagctttatagcgaagaagaggggtcccctcaaaatgctaatagacgatggatccaaaaggtaaagtacattttgcattacatcgttgggtgcaattattcattccatctatctcaacccctcttttgttccctctccccaccttatgtatacaaaaaaaattcgaaatatttatatttgttacttgacatctttgtttcccttactactccatttgtttgtttatattaaggtattgttcaaatgattctacatttttcgtgtggtttatgttcaaaggaaagttttctaaggaatatataccaaacttttgaattttatttttggtaatattgttctagactttaagacatatatacggatcacaatttgtagttccctatactgttgttggtgcagtgtatgtatgcatatataaatgaacaaggcaggtcatgaaatttaaaagaatctttcataagctttaggtaaaatgttatcgagcaataccaaaataatattaaaaaaatgtaatcctaaattcagccgctgaaaaagagcagaaaaagagcaactaacagaaaccataaaactatatataatacacactcacacaaaaatatacactatacaataatcaaagtttacaagacgacatcaaaatcgaaaataataaacgcaccaaaagacatgactataaataaataataaacacacatggtctaaattcctcaaaaaaagaaaagaattacaatttaaatttagttcttcttcaagcttctctcttcaagatcactaccttacgtctctctcatattcatcttcaatcttctctgatgattttttacaagaaccaaagtctttaaattatttgcttttcttcactgaaaaagaatgaaggagacaatcaggtgttgcatcgcttgcattctaccgtgtggagcgcttgacgtgatcagaatcgttcactcaaacggacacgtggaggagatcagtggcacgatcacggccagcgaaatcatgaaggctcacccgaagcacgtactcaagaaaccatcttctccaacgtcagatcacgacgagcgtgacgtcatctcagccacaaagatcgtcatcgtccctcccgaagctgagctccaacgtggtaagatttatttcctcatgcctgctactaaatctgataaatgcgccggaggaggaaagatccgccgggaaaaaagtaacgcaaacgccgtcgtcaagaaacggtcacagtatcgccggcagcatcgtgacggtgatgagaaatgtaacggcggcgaaagtaatgacgttaaagataaaaactacgagaaggatttattgatctcgtctgatcgatacttgacggagatattatcggagaaagtggcgacgcaaaaagatcggaggaaaggacgcgtcggcgtttggaggccgcacttagaaagcatatcggagatcataactgaagactgagaaaacggcatcgttttagtggatttcttgatagtaacaatcgctactttttttcaccttctttttttttaaactatcgtcagttgtgcatttcaatgaaaatattcaagaacaaaagattttaacttccgattcacactcattcaccccaaaaagaatattttgtttacttcgcatcaatttcttaattgttttagatgtgtactcttcttatcaaacttactacacctttgattatatcctaattatatttaagttatttttcgacccaagtatacatatgtaaataacttttttaatataaaaagttatccaacaattttgatataaaataacaaactagtattgaacattttagggtgtctataacctaaacacgtgtgttttgcttatgtataattaacttataaacagaaatgctaagaaaaacgaggagtgtatatgttatttgagatgatggcaaatttccactcttattttgcatatccaactcatcgttcatggataaacctatgaatcatcttatagatttcagttttgagccattaagtttgatttgtggtcatcaaaatcatacactcgtcctcaaccataaaagctaacaaaaattaaaagtgggaaaaaaagagacaatggaaaagaaaagaaaaagcttttattcttgttagtaaacgactaacgactatatggtaagaatgaagatagcaaagattaaaattcatcaaacataatttagaattttttttgagtggaatctatcaaaaatgtctcagcttctctcccgactctccaatctctctcccaggagcccattcactcgtaagcttcacagtttaccgaacaaaaatgatttttttcctctggaaattaaattacgttatgtacttgaaaaaaagaattgaaatttcagtttctgaactctttggtactaatttggttaggttcgtttgttttcatcatcatccaccaacccctttttgtcacttgcgtgcaacacggaagcgttacgaagtggcggaaacattggagatgttctcttgttcgacgctgctaaggaatatatgctcactgtacctgacaaaacagtacctcaagagatcgttgatgggagaggactcggaacttctcatggatgggtagttttctgtgaccctcatgatcgttttgtgtgtatcagtgacgtttttaaccccttggcttctaagacaaacccgaaaatgattcctctgcctcccgcttactgctcttaagtcttgtcaaagccaaatcttttggaatgtggcaatgtcctcttctcctcctgatcaagattggattgttgccatcaagttcttggatagacagcttagtctatgtagtcctcatcgtgacttgcggtggactaatatcttaactcctttggacttttcggaaaactcaaatctgatgttttcaaagagagaccaaaggttctacttagcttgcatgctcctgtaggcaaccgtttgttctcatatgatctcaactttaaactagtcaagaatcctcacttccatgagttgcagttccgagaccttccggaatttggttttcttaatcttgatgactttcccggccacgtcatagctggttttggaagctcatcataaacacggttacaaattcaataatatttcttacaacaagtgaacaagagcaataaccatatagctatttgatcaaatctctcgactaaacatgatgaatacaaaatgtggaacaaaatattaatcgaataagcaccaacactgttttgtatggacatcgcttcctacaacctgtgcaagatggtcgagacatatgattattgggcaacacaaatagctttcttccatccttgtagatacacaatgaaccgggcttcatgtataagtccttcccaatcagacatctgatgtgtaaggtgacacaacaatattcatcacacttataaaaccggtctttcgaacttactttttcctcacagacttcacaccaatatgtctcagtatttgtctccttcccataagaaagagtgagaatatgatcatcatgcttatacctcacattttgaggtaaagtagcacatccaaaacacaaagcaaagtcgcatttgatgcaattgaatgtttcatttgtacattcaagtcttgaatctttgcaaacagagcatcctctttgctctcctggtttagatgttaggaataaaggatccatatgactttcatggactaatggctcagaaattgtagcgcactgcacatgaatcttaaaataacatccttctttatcacacacatagaagaaacctgctatgcacgaccaaggacaagctgaacacttatcctcatactttctaacttcgttatatcctcccactagggagagcataggtggatgtatcgggtgatgtattttgcgagataaattcgcacattcttcgtgaagaatgaagctgcattgtatacaagagtagaggttaccaaaatagattggtgtgatgcatgcatcacactgcttactgtcatcgtaatctctgtctttgttctcatcaagtctcaaatgatgttgttgatgactaaaatgttgtatgattccatcacttatcgtcacaaacggctcaacttcttcttcaatctcttctaacaccccttcaagctctatgccatcccacacatttctttgtgtggcacatcttgaatgtgctccgtacgaacaatcatccttgatgcaagaataacccccaaaatcgttgtcgatagtttcgcgacaaacaccacaagatctatctcgttggtcgaacaaaggggtaaaagagatgcgatgggggtggcgagatatccttatgacacgtggtaagttgatacatcttagatggaccacaaaatcacaagggggacacatatagataggagagcttgcatcggccaaggcgcacacattgcaagttaagaaagcttgtctaggaaagagagcaagtgtatgctgatgccaattcggatggtctatatacaagactggtggtttttccgcacaaactatattcatagcataatcacaatccgagcaatagtagaatatcttttcgagatcctcctcacaacagaaacactttctggtttgaatccgatattgagttgctgaaagatattatttgcttaatgagtgatatgagctccgactctggctccggctccgaatccaagtccatagagctgacaagagagattagttgactaaaacgtaaaataagtgatttcgtttttgacatcttttgcgactcatccaactcctcacccgttaccacaaccgtgtcgactgtgagtatttgagaaatgactgatatgagctttgactccatctccgaatctgaactcgaacccgaatctgaatctgtgaaatccggctccggcgacatgaaaagactgtatatttgaacgatgatcgatatgagctccggtctcggcttgagtttgaatgtttcagagtagagtgacataacctgtgaattaggctttggctcagaatcagaatctatagagttttggagagataattcttgagtaatgagtgatatgagattccttaacggctccggctgggaatccaaatccatggagttgaaaagagagattgtttgagctatgagtgacatgagcttcgtctcgggcttcggctgcgaatccaaatccattgagctaacgagagatattatttgaataatagtacatgatacgagctccaaatccgaagagttgtctagagagatgagctgagtagcaagtgatatgagcttcgactcgggagaatccatagagtgcagagagagaacgattacttgagtaacgagagattttgagtttgaatgtgattaacttagtgtttctgaatttctaattgtaataaaaacacatcttacacatataacaatgttagtactatatacgtgtgttagcttacaggctgtccgactacgaagtcaacgatcgatttatagattagatatgtataaatcatcggtagttacgtagtattagtctacaatattacaactagtattcgagtttctaaactaatactaagaattagcctacgcaattactttcacaaaacaacaaaatcattattgaatgatctttcctttatgaggttgtccgaacgcaaagtcaatgatcgatttagagatgataacagatataatagtgcaacttgctggcatttatatatgttgagaatctatcaccctcgaacacgtaccaactgatcaccaagatcaggcggctaaaaagtgcactcggtctaggagtttcgaatacttgagttaaaatgaaattttatctagttcatatctttgtatatagactacaatacaaaatagtgtattggcaacaacgagaccattactatgggtgttaagtgttaacataaattgtttgtatcgtatctacttattttcatgcttctctaatgattatatatttgtatattacatcatacgtatttttatcatcaggttcgagtataatatttattttgaaactacaaagccacaatgaaatttggtttattcactgttggtgactttcccgccacattatagctggtgttggaagctcattaatttgactaatcaaaacaacagaaaacagattcaataatatttcttacaacaagagcaatatgttgaatacaaaatatggaacaaaatattaatcgaacaaacaccgatattatattattttgtatggacaacacttcatacaacctatatatgcaaaatggtcgagacatatgaatatatgattgtaggagcaatgagaccatgactctaggtgttaacacaaattgtttgtatcatatctacttatttgctatctcttatatgattatatattacagtcatacatacccttattatcaggtttgagtttaatatttgttttgaatttaaagcttcattgtttgataaattaaatctaaacactatatggacgtaagccccgtcgaaagataacagaagtctaaagcaaaattaaaatttgttttgttctaatttctttcatttcaaaattataaagatattaattctagaaaatccatatagttatctcatatatgacaataaaatatttaatcagtacaactctaccaaataagcaaaatataagcaattataaaaaacttataacaaaaggataaatattttgtattcagtttaagaatttaaaacaaaaatagattacctgtttatggaacttcggtttttgttatggtagaaggtagattacacagaaagagaataagaaagatgatacaaaggattttaggcagaaagaaataattatgaaattgcatggcattgttaacatagactagaactctgttttgaatgcatagattattttttcgaaagagaaaaactttcatatcacatgatttttttatttttttttggatacaatcatacatataatgtttgatggatgaaagacaaagcgaacgccaagtataatttgttcataaaagatcagattttatgatatctggtgtttacgatatcgccaccagaagtatccgtcattttgaagaccaagttgaaacaccataaggggttgagtttgacagcctccctgtatggcttcctcccacttctatataacaccaacaactcttagttatgcttcttcttcttatattagttgagaatgaaattaagattttcttcaatatcaaagttggtgttttagatacaattgagtcttattatgaggttttgggttcttttgaaatcctttgatgtctcttcttccatgcaagttcgaattgtaggatacaaaaaaaaatgtctctcttctcttgtcaacttgaacaaaaccacttggaagatgattttccgtgttctatatgcttaatgacattactgcttcttgatttcctcttgtttttaacccaaattggtctctccccaaagtataatcttctgggtctttttcttgtaaaatttggcatgctccaagatctatattagtagctatctcttttttttttggtttttggtggttgtttgccttgttcactcctccatatatagtaactcttaaactgtcgaaacattaccgtataacatgtttgtttgtagtgattattttaatcgatgttaatatgcatcagttgcaaaaaaatgatattaattttgcatcattgaatataagtgatttattatttgtatcaatttatcaaaataacgttaatatttgcaacatttataataaataattttaagtgtttatattaattataataacttataaaataatactaaattagtttttatgaaacaaatatctttattaattaatattaagcgaacacttaaatttagttgggatagtaactttacactttttggacaccatctaaaaccagaattatgtaactttacatatataaaaaaattatggaggtttttttttccttctgtgggagatatgtggtatgtaaacaaattgaataaacaattatatcagttagtgcaactgatgctaaatctgtaattagcatcggttattattgatttaaattttgtatcactttctaaatgattaaaattcacatatttgtattaatattgtgaaagtgaggcaaatagacctagatttgcattaattttaatgaactgatgtcacacaaactaatacgacatcagttattgcaattgatgttaaattataatttttgtatcgattgtaaataagtaattcaaattagtattttttaaatttttgttgcaagttaattgatacaactaaccttttttgtagtgagattcttgagacataatatccctgcctcttcttcttcttcaattgttggggttgttctcccaatcataaacattctggtggatgtaaacataaagagcaagtgattttaactcttgtatagaaaactaggagtcttgaatgcattggagaaaccactttgcatcggatatgcttaactaatttacctagttccaagaattataaatgtggaattccacgattacaattaaaaattgtctacatttattgtatcatactagaacgtactatttgtaatatgtccatctcactcgttggactttgtttcaacatgtaaccaacccaacaattttatttattgacaaacaaacaaatccttactcaaataactacaaaacttgacgaaacatttatttgacattgacattctctcactttttttccgaaaaccacttcatttttaaattacaaaatcgaacatttattctgtaatcaaaattagaatttaatgttcatatcgtgcgaaccaataacctttctttgaaccaaaaataaaaataaaatccttcttttctcaaaaccccatcacgtaataacacacaaaatacaagggtaatttggtctttctacttttctgtaaaccccccactggtaaatgaaattggaaaggaatggcttgcgatattggcaatgtcaatgtctctctctctcacagtctctttccctctctgcctccaaaatttccctctctgtttttgagcagttaagctgcctcatcaatctcactcaccagaaacccatcaacaatcattaacctttttctcgttttcatcaaaacccattttctcaatttcttcaaaaaaaaaccttttgattctttctcctaatccttttcccagctctcttaatgctttagccacaaaactttttgtatctcaatgtgtgacagttttgtaccttttaagagaaaaaatgccacggaatgtatacggtatgaaccaaagcgaggtgtatagaaatgtcgatcgtgaagaccctaaagcaattctcaatggtgttgcagttactggacttgttggggtcttgcgtcagcttggtgatctcgctgagtaagtattcaattcgagctaatgttgcgtctcttttgggtatctctactgttgaatgattctttgagctagtggtgaagttaaagatgagaatcattactttgtgtgaaagtaattgcctttacttgtttaaggtaatctaattggtgtttgtagctacaaatttgggaacccattttgattgcatgatcctttgaagtttttgagttaagctttagcaaaaaggaagaagctttattcatttatgattctatgattgttgtgatgtttctatcaatcattctccatttttgctgtgtttagttttgtttcatgagcttagtttatgtttcttagcaactccttatgtggtgactctttatgtcggctctgatatcaagcttagtttgggtttggagtgatctctggttgataagggtcattttagcacaaaggaagaaactttcttatcgattgctttttctcttgattaaggtttgcagcagagatatttcatgggatacaggaggaagttatggctacagcttcaagaagcaatcagttaaagattagattgcagcatatagaagctacagtgcctccactagaaaaggcgatgcttgcacaaacaactcatatacattttgcatacacaggaggtttgttttgtcttcttccctcttgtcaatcttcttattgtcttgacccaaggtgtctgattcttgttaggtttcacattaattcttttaataaattatgtcacatccttagttcattgtaggccttcacatgctttttcacttaccctaaaactaaaactttctctgacgaggctagtttagaatctggaatgattgagaaactaaatcattgtatcttctgcaaaaccttaaaatagattaacttaaaattgaattgatagtattagttgtttggttccccttggcaaacttttatttattgtattgaaaccgtggaagtaatgggtggtgagaaagtggtcatgcttgtatttttcttactttatatcttgtgaactgaaggagtttaatggggttcaggtctggagtggcatcctcgtatcccaattacgcaaaatcacttaatttatgacgacttgcctcacattattatggatccctatgaagaatgcaggggtcctccacggttacacttgcttgataagtatgcctcaagctaaaatatttatatctgatatgtatgtactatgtactataatccatcatgttatactgattctttgctttattttctcagatttgatataaatggtcctggatcttgcttgaagcgatactcagatcctacttatttcagaagagcatcaagcaacctgagtcaaggaaacaagaagttccaaaaagataaaaagcattgtaaaatgaaggtgtggttctcagattaaattggtaaaccattttctgtagaattctcttttacttgacacatatatatctgttttctggcatggacagaagaaaaaaacttcgtcaaggagtcgagatatgtcacgtttggcctccttggctaaccagaatgccaggtaaattatagatattgttggcatatttaagtttccgtgcacctaaagaataattaactcagacatagttcactccaggaagacatttgcttcatttagcttcagtggacaaacctcttctaccaaaaccacctcaaccagtgacatggaaaaaagatatgattttcaagatcatcattctcgctcttttgagtccagaagtggttcaggctacaatgaatgcctttcaactgcaacttcttcactgaagactggagaaagaccgaaaggggtgttcgtttcatccagcttgacaccaggctcttgcactattgcttcagtcctttctgaatgtgaaaccgaagatgctcatgataatttccagtttagtccttctcaagggcaagctgctcgtggctcttcttgcgttagttgggatgagaaagcagagatagtggaatctcttggtctgcagacagatgaagcttctgaaatggtggaggcgaactctgttgtagatactctagatgagaaaccaagctatggggaagggataggtggagttgatttccattctaaggacaatgaaaatgataaatcagaatcaggactacgaaaacgtgctgggattgatgaggtaagagagataaaaaatggtcgggagattgtgggagaaccgagggatagtgaacaagagactgaaagcgaaggggagtgttttgttgatgcgcttaatactatcgaatcagaatctgaaaacaatcaagggcttcaaactagtcaagtgagcagttcctgtggtgttgcagatgagaggttggaaaagtcagtgtgtgagcaagaaacagagcagaattcctacagtgtcgaagattcttgcagatcaatggatgggcttatggccaacagttttaaaaatgaagagaatgcatcgtcagaaaatgtatctgttgaaatgcatcaacaaaatctacaggcgggttcagatatcaaccgcttacaaaaaaatgatctttgtgcaaacaaggatatgcgtaatgattctggtggaaaagataccatcacatttacatttgtgccaggtctcgagaacagcttagttgattcatcaaaccccttgattcatcatggcctacaggaaaatcaagaaacagaagctgaatcttctggggatctcgaagcctttaaaatatggactaatggtggtctattgggactgaaaccatcgaaacctccagtcttggcaatgccaagttctttaagtccagattgcaagaccgaggaaaggacagttggttttgcagaagctgaaaaagataaagcagatgatctagttgaaaatgcttcacatagacatgttctgaataattcaagcttagcaacgccaggaacccaaaatccaggtagttcaaatggcatagtcatgggtattgtagaccaaagagagtcccatgagacttcttctggagtttttggactcagccacaagtttcttactagtggtttccgcagaaaggattcatttgcacatgatagaaagactgtaccagcaacgattccagagaacgatgaagtgactacagagaggaggaggttttgtgaccaagatattaatgagaaaacctttatggaccccttcagagacgaagctcctattgattggatcacttcgtctccgcctcttcaacacatgaaaatatctctcaatcccgctgacactcttcaggcttcgagactgaagcttaaattttcagatggagacaacacttacaataccttttcctccttccagttgcttccagagactggaacttcccttcctgattcttattctgacgacgacactttttgtagatcatctccttacatgtcagataccgattatcttagcgataatcactccttgtcaaattctgagccgtgggaagaatccagtgacagccatggaagaaaagagcaagaactatatgattctttccacgaaagtaggcatgttgataacaatgctgaagcttcccctctagggatcaaatcagaaagttcttgcgtcgccgtaaacctctcatatctccaaaatcctgctgagcccttaccaccgccatttccacccatgcaatggatggtttcaaagacaccttcagagaaaatggaagacaaaacacagtccctacaactacaagaagctctcaggtttgcgtttgagaagcatatttcattgcctacagctaagaacgaactgcctagcatggtgacttctgctcctaaaccagaaattaaggtatggagaagattttgactctttcttcctacttttctacagtgtgggtcagttccatatattccagatgatcgttttcaatatagttcaaattacgaatcttaacaagcatatgttctcataggcccatctgaagaataatgtcagggaggagaaacaaagtgccaacgcaaaggagactgaaactggagacttcttgcaacaaatccgaacacaagtgagtgcaaatagttcctttttgtgaaagaaagttatattctgatgcttgatttgttatatcatcttttgctacattcttggtttctttcaaatcaaagcaattcaaccttaggcctgtggtcatgacaacgacatcatcggctactgcaacaactgaccctatcataaacactaagatcagcgcgattttggagaaagcaaactcaatacgccaggttcatcctctaacttctgcatctatatatatccaaagcaaatctaatctttatttcagaatctaagtactttttgtcttaaatccaacacaacattatctatcactcactcttttcttcttttcaggctgtagctagcaaagatggagatgaaagcgatacatggagtgatacgtaaaagccctttatcagattccatttcatctttgtaatctactctctgaacgacataaatggagaaaaggggttcaagctagtcctgcaagaattttttgtattttgtatcatatctaatgtgtggatttgtgtaggtgatagtaaattttgtcgagtgtgatctgtatcttcaagaaaataaagtagtgcaagaaataaaaatgaaagtaaaatctataatgcccattcatcttaaggaaaactttctagaacttgggattttagccacgagcttgctacaaaaaaaattcatgaccataaagagctaaacttaaattagtcatggacttttatcctagagcaactaagaagaatccatggtcatagttttttttttttgtagtaccactaaattttataaacaagatcaacatttgacttgatattaccatcaaagcaagtcggcaatagcaacattgaacgacaaaacaaagtaatgattcacgtttacggttattcgatatatttcaagttacgaatgagaagcatatgttctcatagacccatcttaagaatattgtcagggaggataaacaaaatgccaatgaaaaggagaccaaaactggagacttgttgcatcaaatccaaacacaagtcagtgtaatcgattcttctcatgaaaaaaaaaagtatttggattcttgatgttatatcatctttaattgcattcttgatttcttccatagcataaatattaattcaacctgagactcgtggtttccacaacgacggccctaccatcaaaattcagatatcatcacgattctattttggagatatgaaaactttatacgttaggtgcatcttctgataatatttgcttgattagttaattaagattgtaattctcctctctaaattactctatgcacgacaccttaggttgcggagagacaacctataaaagggtttaatcttgttatgcaagtaattcttattgtgtcgaatatctcatgtgtttattgtgtagtttataagtaaattttgtcgtacgtgatatataccttcacgaaatgaaaatataaaatatatacaatgctacgtttttttacgtagtggaagtaatagattagtttttgtttgaaatgcattataaaaaaatatgtttttctattcgatctctgaactatatggaagagtatcagttttgtgtcagctgtgctaccgtttcttgaagcaatcgcgcagtttaaaaagattgaaggagaaatattatttttaaaatttaatggattatggatttgatgatataaaaaaaactttaaaaaaatatcaaaaaagtgagttggcaagtagaggtctcaaaacacttaagccgtgaagttcgcttacgttgtggcctttaattgttttcttatactatttgccactggaatcaaaagattaaaaaataatagagattatgttattgtgtgcactgtattaatttcttaatgtctgtctcgcatttattaatatcgaatattaaatcttagaaatttgcttgtggacatgtgatgggattatttttttctaaatgggatattgaagtactaacagtttttgtggaaaaaatgtttcttgaactatagaagtatggatgacagaattataacttcagctggatgatagaaacatacagcataattgtgtctacacatttttgttgttgaaagtgcccgtttaatgattgatcaagagcttagtatggtagtatcctacgtacattagctaggtcttgcgttcaatcccaaacccgggtaatgagtatttcaaatttccaaaattcgaaattaatttttttaaataattctcctcaattccatcctttttctaaaaaaagttgtaattctaaatcgaaagtaaagattttcaaagcatgtaccctcaaggaaaagtgcccctttttctcaatgaaactaaacacgtataaagtttaattatttattcaatatcccactttatctagcaataatcaaacattatcgactttattaattgtatggatgtccttttttactgtggaatatggaaccattagtattgaaagttgtaagcctcggaaagaaactttgatcattaatatcaatatgatatccttttaaaccctaaccatacgtttatagagctaatttacattttatgtggccatgtgagataacaaactaaatcaaatttgtatttttggacgatatacggtagacgagtttgaatccggatagtgagttacatacgatattagtatgaactatatatatatgttctagtcatgctctaatattttaaaatatatctaagttatatatgagcatactcgagaatttcaaatataaatatataatttcatcctacataagatcaagaaagtacagagtcagatctctataagactataatagatatgaaagagaaaaataataatttatttctttattcttctaattaatttcaaatcactttattaaagataggattaaagaacaaaacccatataaaagactttgctttcctttgtaaagagagctttttttataaagtgaattttcagaacccaaaagaagcacatactgaaaagtttaagatttgaaaggagaaaagaaaaaaatgggcaaccaacaaaagttagtcaccaaatccattgaaaccctaaagaaagaagaaaaaaatagcctaagaaaagataatccacctttacaaggtacaactaattacatgtgtctatatatatacaagcatgttatagtttatacatatacagagtataaatctatgcggaacatgactaaaccttcctttgtttttataatgcatatttgtctagcacgcaatgtataatatgtattagtactccgtatatattcgaaacatgtgatctcaattctaaaatgaagaagtatctacaatacgttaataaatcccacattgtattgccactacacaaacccgtattatattgacatgatttttcttacatgattatagaaaaattaaagcagttgcgttgtattaccaaaagttgtcgtataacctacctgttacaattaatatacatgcatgcagatgtgaccattcttaaatcttaattgtcttttaattttgatttggccataaacttaaatctaatcacctttagaggaatatgaatacaattgtttagaatctgaatattttatctttatatgcatatatactttgcaaaaatagctcaatggatgaaattctttgtctacgtaaatatatacgcacatttatattccctttttgtatacgtctattacattcatctttaatttatatttaacttaaaagtcgatctcttttaaaagtgcttaaaagttgttcttttgcgactatatagtataaaggtaccaatgagaaaacatttagtataaaagcacgaatttgagaaaaaaagagaaacatgaacatcgattagtgctttcctttttcttttactttcttttcctcttgttttttttttcctttccctcatctttaacacttgctttagtgtttaataataacgtacgtgaaagttaatttaaacaaaatattaaaagaaacatgctttgcttaactttatgtgtttcttctccaaggtaatatccactcaaccattctagtagttgatcaagcaaaattgcacaaattattagtctaattgtaccactatccatggaccatgactgataagaagggatagatgttccattttggtttaacatagtgttgtccaactagaactagattgcacatatactattattagaagttctttttttcggattgaaaaaccaattccaaaattattttctaaattaatattttggctgacaaaaaaaacctcaaaacataacaagcatcaaaatccaaattcttgtttccacaattggtttctctccatcaatcagatgtttcatcccaacataaatgatcccttgtaagatcttaaaaaactttgaaaaataaattcaaattaaatatttattccgttcaaattatacgattttttaactaaaaatgcagattaagaagtatctttttttaaaaggttcatccaatcatgaaaaaggtacggcataatcaaaataattagaaaatatgaaataatatataatttgtataaaaacttgaaaacatttataatataaaacaaacaagttttcccaaaacatcttctattataaaacgaagatggtattaattttttatttttctttaagttttattgtagttatgaacacaaatctaatattaaatttttttctatagtttcattgtcgtctcaataataaaacattagatcattcacttcaatatatatgacgtaaacctttgaatataaaatttacacaccccataaaatcatgaaatgtaatctactggtttgtgaaaatatgaatccaactcttataaaagaaaaaaattacgcgccttatcaaaacattattgtttttttttgtcatgtttactgacataaatttaatgtagattcaactctgcttatattattttatataagaaaacaaaactctactaatactattaaataaaaagggactatatttattcgaaataaataaagaaatgaagaaaatggatggatgacttggaaaagagtggccaaaagatgatgtgagcctagaattgaaagctgatccctctactcattcatgcttaattatgcttattcatctcttctccttttctacgcaacacaccaaaaacgctctctctttggcggctttgtccaaatccaaatcattctcacttaaataaagattcattgaaatatattaaggagatacacataaaatagaaaattatatgttaatagttgtggttctcagctgatagaaacatcatttactttttcaatcgcataagtttccatatgtttttttcctaatttctatattatttatacattttggagattttgataaatattttttgtttaatttaaacctatagacctcacatattcatctcatgttgaagaactgggtcaaagcactggggtcgaaaccggtagtaaactagaaatgagagttacctacttaaattgctctcctcatatttccaaagatgcaatcatccaaaaatgttagtcaacggtgaaaacaaaaagaaatggatgatgcttatgcgaatttaaaaggaaataatagttatattatatggataatataattaggttttgaatgtgatcttaattttgttttgtgatacacagccccagttcagaaaatattaagaatttgccactgaacatacgtatcccttccaaatcactgttgacatactaacatcattttaaaaatattcaataatatcttaatataaattttatgaattaattaaatcgaacaaagcctttttttacccaagataaacaaacatttggatagcttgtaagttaattatagtagttttaggcactgtaagtatcccgcataattcatatattattagtgatttggaaatttagcaaagggagtaaattataaaaaaaaaactagaatttacacaaattttgataaaagtcatgtcaattttttattttttttaaaggagatgttaaacatcactgttcctaaaaaaactttttaaaatatacggaaagacaatggagaactgtaccaaaatacacacattttggagaaaaggaaaaaaaaaaaagcaaaagaacacacacattttgtcagctgatatatatggatcgatatttctttgaatgcaataagcaataaatgtgcctaacatattctttcattatttttttttaatattctccctactaacactattgcttttctctcctttcttacgataaagatataataatgttttcacaaaatctttttacaaaaagaaaagaaaaaaacacattgaaatcttcttcctataaacgtctcttctctctttcatcactgcaagaaacttaatcacaactctctctttaatctctttgtctctctctctctctctctatctctctctcattttaatggcgacccaagattctcaagggattaaactctttggcaaaaccataacattcaacgccaacatcacacagacgataaaaaaagaagagcagcaacaacaacaacagccagagctacaagcaacaacagccgttagatcaccctcatcggatctgacggctgagaagcgtccagacaagatcataccatgtccgagatgcaagagcatggagactaagttttgttacttcaacaactacaacgttaatcaaccaagacacttctgcaaaggttgtcaacgttactggaccgccggtggagctctccggaatgttcccgtcggtgccggtcgtcggaagtcaaaacctcccggacgtgtcggtgggttcgctgagttgcttggagctgcgactggagctgttgatcaggtcgagctagatgctttgctagtggaagagtggagagctgctacggcgtctcacggtggtttccggcatgattttccggtgaagaggctccgttgttacaccgatggtcaatcttgttaattatttttacatttttatttgtttgttttcgggtttgggtttgggtggtttgctataatttaacccgtagaaagaaagaacgtggttaaatttgctttgctttgattactctggatacgtacaggctagcaacaaaatttaactagttaattactaattaattagtaggtttttaatacttgcttatctactaaacagctgttgctttttaatttctcttgctgtaaattgaagctcgtggccgtgggatttttcttctctaaacaaagacggtgtggttgaccattaattatccttgaaactatttattagtagtactaatttttttagttattattgctcaatctcataaacctatagaaatctaacttttttggtctttgtagcttcgcatcgtttaagtgtacgtaaagttagttaaagattatggacattagtctagttaatctttcaaccaagaagaaacctcattcaattggacatttaagttttcacttttcagctataaactgacaatcacacaataatgggatacctacataactagaataaggtttttactgtttatgaagaagaaattgaacaaatattggaacactctaaatgtttgtccttccaataaaagaccagtaaaccactaatgataaataaccttttcaaacagccaaaaaaatgtcttaaatcttaacgaaatattatgatttgtgaaaatatatgccttatcaacatttttgtggatgactgtagtatgtcacattttagtgttaacatttaaaataaacgttttaacagaatttgtttacttcatcaataatcacgaagctaactagaaaagctactgtgatgaagcagcacataaaagaatatgacagaagaagagaacaaaatcaagacttgcttgtgtgcaagtcatgtcctgagttgagaaaagaaatggtgggtcctgtgaattgagttctgggttggtcagaatttataaatgcggagatagaaaaatcaatgagatttggatgaggtaaagattaaaggttttggaaaaagagaacacaatgttgacttgcgaggctaagaaaaagaaactgcaacaaccagatgaaaacaaactacattttaagcactaataaaaggtaagaaaccatgacataataagatcataagcaaaacgagtaatgtgaacaattcagacaagtttactttctccattgagaaacatcagtttctttgagtccaaacgatatctaaaaccagaaagaaagaacgatagaatgagattcatacgaccaactcactcactctctcaggacatgattttggcagaccggacataaaggctgtcgacgaccttccccatgtttgcaatggtttcgagggtagccgagtagatagcatctgcctttgggtcttcgaagatgatgaggcatccagctccttgatccaaggtacctgcaaatttcttgtcgagtatcatctgagatagcttcttttccacatggtcgagcggcaatccaatgagctcagcaatgtgagctatctcaactcttgagaagggctcgatcaaacgacacagattttgctccagaagcgtgtcatagagagaagagagatgcctgtggacaattgggtcatcttcaagctgtgctttgtagtcacggagtgcgttctcaaacaacttcaaggacctcttcgagtgagcatcagcgactgctttcatggcatccaggtcagggccaacgtactgtagtccagcctttgaggagattattcctgcaacatcatcagcttggctaaccatgatcttgcacagtaacatgtacttcaaactgaaaaccgctctcggatctccgagagcgttgaaggactcaaaggcttcaaagaagtaactgtatccggttttgtagtctttctcttcagcatgaagaatcccactctgcagatctatcgtgccttgttgagctggtgggacatatatagcgttagcagctgtcctagctgcagtgagtgcagcttttgccttgggtaagtttctcaatgagaagtgaagtttgctctccagcaagtctatgtcgaccagaaggagcttatcatctaatctcctaacctcttttaccaaagtactcaacaacgccaaagcttcaacatactccttgttctccatcaaaagagctgcaagcctagcctctactcgctgcctgaggaaagtacgcttctcagcgcgggtccattcgaccatctctttgcagagagtgatctggagatcagttgttccaggaatctttgccacagcatcaatgattcctctgacgattttcgcagttttcgccttggggattaaggaaaagaaaggcctcaacttggtcaacagtttccggagatcctcacctctcttctcttcagtcaatcgatcacaaaggtttgtaatcgcttgctccttgatccgtatagcctcaggagatgaagaagggtcttccaaaacctggtacagtatcgtaatagcctccgagctgttggcttctaaagccagggaaatcgtctctgtggtagcacgataggaaaccattgtgggtttagtgcaaactcaaatccctgcaacaataaagccatagacctgttaatgcaatgttcaaatatttctcctttcaagcttattgatactctttaggtttcacatcactacaaaaacaaatccatcttcgatacattaccaagataatcagataaagacaagccacgatggtaatttatcactgtaatttatcaactcttctgtacctaatgatcaagacaagcctagagatctatcaaagacaaagatacaacgaggctacaataagtaatacaggaactgaattacaaagcctatgaaactataacctaatttttaagtaataagatgaatcacagagacatagttcagtaattactaacttattcagttcgaattcttcgactcaaatacttttaagatctatttaattttgtattcagcttctttcaatcagaattagaacatcctcgggcccatcttcactgagatcaactaaatcgaagaaagctaaaccctagaactatcgagacaaggaaccagatgtggttttttaaaacatcgaaaacaatacgcataccaaaacccagaattaagcagatctgataagcaaacccagaagaagaattaatgaaatttcgcaagaacaagacttaccgatgaatcgtcgggggcgtgagattttggtaaagcttttcgacgacggtatagaagaaataagaagaagaagattcgagagttttttttggcttgaaagaaaagataaatggacagtcttctcgtagttttacaattttttgaagggtatatttgtctttagatgctgaaatcaggaaatagagaacgcttaacaaattcggcgtcttaaaatctagcgtttcggattcagagtttgaaaaccaacgccagacgctgcaaaagatcctggtgcaaacgcttgtcgtgaaaacgcgttttgtgattcaggcctagtggctcagactaaaggcccaatatatacaaaactctgatccgccttctttaggtaagggttcgattttatttgttgtcttttgcttatttcagtttgagtcatttacctcaaactataattcacattatatgttacatatgtagctttctcaaactgtcataaatttcactatgcatgtaaatgatttaaatttattttagagtagggtttttcactacatcatgcatgtatctgttcaatcgaaaagtaacaaataaatattggaaggtaatcaaatcattcgtaaaaaagaactcccaaaaataaaacaataacaacgaaaaaaaaacatggttaattagtaaactcagacagacacataaaaaacataaataaatgttttatatattaaaaagagtcatcaaaaaaattgaaagtgttgagactttgagagatcgatgtatatgggtgtgtatatatgtatattaagcttagaaggtgacgtcagggacgattccaagctccttgaaaacttgagggcattcagcgagaggagtcttcctcatgaacccaagtgggttaatggttcgagtctcgttggagacaatgccatcattggccgtgagactgattctggctgcgtttcttaggaattcttggttgttcacgtctccacactctgggtcaggtgattggaggaggacgatctcgcacacttcctcttcgtggtcacccattacttccatctggtagttaccggcgttgtcggtcacggcttctttggttagggtcactgtctggttctcacgacccttgcactcaagctttacctttgcccctgatatacacacaataacgtaattagtttttcttataatcttgcaacactaactcttagaaatgtgactaaccacatttttataaaattttaacattgttaaaaagacgtctatatatgcttgtaatcatttttgtgaatttttactacacaattctaaccattgacctatataccataatgggatcgattttttatcaaccaatatattttgctattgacagtatgctcaacaaatgaatttgattagagaatgtggttaattaccctcgagaaatttgctgatacgggtgatgaattggacacggcatgtgtcgcagtagacggagcccttgatgtggaatttgtcaaagtcgtcggcatcagctgcggtgaagtgaacgagggtggtgaaacatagggcagaggcaaggaagacaatgaagaatttggccattatgccttaatccttttttttcttgtgtttttacttcggtcttctcctctcttggatttgagagtttatttgtaaaatttagtttttaagggagaacaaattgtaagctttggttgagaggagacgctatgatagatccaaccaaatatctccttttatagagaacaaatagacaaaacaacaaaaccatgtgattctatatctatttttggaagtttttttgtttatttttggtgtttttgttcttgagttttgtacggctgtgttttccttgaacccgatcttttctcattgccatctgtttttcttttctgttaataattcttcatagattccgtttaggtcttttttgtatgaggatggtttcccaaatgtcaatctatagaatcttatgtatgtttagacctccactaaaaagattcaatgggggtggagaattatctactagaccccaaagtgaaagttttattagtagtaaatgactaattaatctgagccgcacatgaaagcttttgcacaattttctttgaattaagaaaaattccaaaaacaaattgactagaaacaaatgtcttcagctgaatctgttattttgaagagtagaggttgaacatatataacttttctctttaagaaaccttaatctataataacatctttcaagtgttgtatcatcaacaagctaatacaagaaaatcatgtacagatgaattggattgtacttcttctgatttcgccaagaaaaaaaatagaagaagcaaagatgcgaacattcttgatctgcaccgatctcccaaactgtatggtaaaagcaaaacacaggaatggttcaaatgtcgtagcacactcagcattaacgggtcaaacactcgaaatgctcacgatttataagctggcggtaataaacgtggaagactcttgctgttttatactatctgcaacgtgtgcaataactccagctcctgctttgtaaagtctttcacttttcacctgaaacaagactcaaaatctctgttagtccatgtttcaaagaattaaaaagctccaaagtgaagatgttggaagtttacgtgaatgttgttatgagctaagtaaggccagaaggtggagtggaagctgacatcaactttcttccaccccaacctctgcagaccgcggatcatttcctctgcaccaatatttgtataaattgtaaatctcatgccgatttagaagaatcaatcaaatgtttgggctaattctacaccttccacaatttcatgatactcaagtgtgttctgagggctaggagagctttgtgcggcctccttggctttagcagcttctggagggaaatgggcaccatctgatgaaacaggtggacagtattcaacatcaacaacatgcttgtatccatccagagaccggcgtgaaggctatattaaaacaggggaaaaacatatctatcagatctcactcgtgacagctaaataattttcaaagtttcatttgactggttacaagccacagagagcttcttgcacgaagctacttgagataaatgaattgccgaaagtatttttggtgattctctacagacaattgtttcatttcttagactctttacctctatgaaactttccctctatgattactcataattccaaaattcaggataagttagctaccgttagcatttcacagcaagctaactatcaatatcgatgaccccatcatctagctagtgtgtgctacacgtttcagagtcgaaatcaacttacataatagaaggaacatgaaaacaagtggggtaatattaaatagaaaggttccattgcttcatatagcatgaaacgtaccttgataagttcagtttctctcctaatggaagatgtacgccaaccaaccatgtctacttgatgtcaaaggaaacagttcagaaaacaaatgcagacacagctaggcacatctgtactagttaaacagcaacagaaatgcacaggatacggtcataagatacgtttgcatatataatgcgacttcgaaatgcccccagcgccgatctgccagacaatgaaatgcattaggattacagataagtcattaaggggtcgaatgatttaaattggtaagagcattactcacaagaatttcagatcttcaccatcagatgccatcctcaaaagaagaggtggtttatcagctttaccatcagtgaggaacaactgactaccagtccgaccaacaaagaatggagctattggtgcagcaagtttctcaagaataggaactcccaacagaaaaggcagctgatacaaggggttccagaaaaagaggagagaatgagatagaatttacagggattatcaattaatattcatcactcatcagtctagacacttaggggaccaaatagcaaaaaacgcaagacagttttgatgaaacttatgatatctgtctgaacacaaggagaaggtagatgaaatttacatgtgaaaaacgactaactactttcttaattacgcatacaccacatctacgtacaggtactgcgagatatatatgaaactctttgattccaaaattccaattatgataagtagagaagaagagaacctgctttctgcctctcactcctagatgaggtgttgccaaagtgatgaaattaatcggttctagccccgcaatcctacctcgcagaagatttgaattgccagattgagagacagcaacatcacttacttgtgccattgctgctgagtaaagaacagcaacagcatgtctggaaaataagccaccgagggagtgggctaaaaacgaaatcttctttaagctcttgctcttttggacaacttgtctaacctattcctctctcacatccagaatgggaacagaaatcagctcatgtactgaagttaagggctagaaaaccaagacctacctatacacgaggtgcaaatgaagatattaaaactcacctcttctgctagtcgttttccagctccatcgatcccgccaaatgttttagtgaaggtattggaagaacttgctgtgaatgttcaggagaaacagagtaaattaaaacacatcacgtgtgatccattccacgcatagcataaaagcacatgagtattataataaaatacaaaactaaagaagagttgtggttccagacgaaaagatcttaaatttttcaagaaaatgtatatttcgcctcttgccgctaaagattatataagaccttgaagtgttttcaattttgtgcccagcacatgcattcaacttacgttaccatttcattcccaaaaattctcttctattatacatacaatccaacaactactcaactaaactaatagatgataacaatttagaacaagatgagcataccataaatcaagaatcttcttccaaggcgtcttttcagctcagcttctacgtagagccagtcgctgggactgcaagtaattgtgtcttagtaaatttggagtctataaattattcaatctgaaaacaaagtagcagaaatgatagacataactttctttcttttttttgacaatgatagacataactttcaaattcaaatacttgcaagtttctatccaacctaaaacaaaaccatgagggtttcccaagatgcaaacccagtaccattcaattgatgaactacttagaaataatacctggccaaaataccatgtacaagaacaagaagatgatcaggttcatttttgtcatcggagtcgcctttcgatagcgaaaatttccgttgggctgtggaactcattgcctgaaccctgcgtccctgttggttccagcttctgtttgacccttcttaaagaaaaatcaaacaaatgaacccgcggaaaaagctataaagaacagagccaattcttaaccaaacaaatcatactatcaccatttctacttagcttctcacaatcatttaacatgttcaagcttattttcgatcgcagaaacagggaaaaatctgtttaaatagacaccgaaattgtgagctctaaatcaaaagaaaaacagagccgattcttgaccaaacaaaccatactatcactaattctacttggcatatcacaatcatctaacatcttaaaatcttctatctcttgcagaaacagggacaaatctgtgtatatagacactgtaattgagctcctcctcaatctaaattaggcgatactattcttcaccatcctaaacaacgtctttgatcgagaaatcctcagctatgaaactttgcagtacaatgtcaggtcatttccagatgtaacaacgcatcattcgataaacatgaacaaagtaatcaatccctaaatctacacgacaaacatcattcgaagatcaaagcctattaccgaaatcgaaattcaaaatctccgaataaccacaggagcacgaggatgaaggcgaaggagaagaagcggaagctgaaacaacgccggaggaaaactgccgcgcgctgcgagagcttggcttagagaaaccgccacgatccggtaagtatctaaaaggaggttgttgaatccaagaagaagccgtagacatattgatgttgagcttatatatagagagaggagagaaagtcaaaatcagagaaaggagtggaagaaagatccttgattcacggtttctgagtgacgtcacgcttcagaatcaaacataataactctctctacgttatcttcttcacagagacccatgctcctctctatctcttccattcactgccaaataaacattcaatcatcatcttcttcgacttttgccaatttatataatttgattttattacttttactttataatttcgggtggtgcgtgttgttgttaggcgactcaaacacagaatatttttattccgttttatattcaaaaaaaggtttagaatcggaccaggttcttcttcttcttcatcaaccaattcactccaaaacaaaggtcaaaagaatactatttacaattttttggtatatatatatatatatattttctgttttaaatttttaatcaatactgctagtagtttttttttcttttttttggtgtaaatggtaagataacaccaaaatatatttgtctactaaaccgagtaaaatttttatggtttttgtaaaaatccaattgttaacttgttagtgatgctttccaaaaaagcccttacatgatattgtcaaaggggtatctaaatatcatatggtgcgaattggttatgtatatgtagtgtactagtgtgtcgtcgtggacctcgaggtatcatatgtaaccgggtgttgtagatgttgttatattgaaactaaacttttatttggacaagttaaaaaaacaaatcaagcttaatgatggattcatatataatttttttttgtttttttgctaatctacttataatactgcctaaggtatcttaatcataaggatatcatgtcaagatatccattattggtcgcagaaatttaaagagttccaattccttttcacaaaacgttgcaacaatgttgccgcttaccatttagctaatatggatgtgtagattcacctttctatttggatgtctctaatccagccccatggatttgccatcatttgtactagtttgatattcgattaaagttaataaaggttcattttcgatgaaaaataaaatcaaaatctacttgtaattaacacgtcttacactataattttagttttattagcgataattttaaatttggttttaaaatttgcattgaaaattcaaacaatgtttcttatggaacacgatttaagtgaaaaacacatccctttatttattatgaaagtgagggaaatacgtttatatggagtaataaaatgaacatattacagtttttaaggtcaagtttaagttgcaattttaccacatgtaaacaatcataaaccaggctacaaaatgtatgatcacttcaatataaaaaaccacctaagtaaattagttaaaaaaccggataagcagcaacctgagctataccacacattccttgaggccactccacatctctacggatcctcatgtaaccattttctccccaactctcaccccaagagttcttaagaacccagtagttgagcccactcatcgttccgtacccaacgatcgtcactgcatgattcacgtctgtcccacagtccagcccagcgtacactccccctttgtaatgaccgaaactgtccgctcttgcgtcaatcaacaccgagacgggctgtcttcttacggcctcgagcaacgcacgctcgttgtggcttggaaccatttgaaaccctctaatctgtgtatgtggggcgcgtctggcgttggcacgacaactctcctttttcacttggtaagggtattccgtttctaaagaaacgcctccgttttttattatgtacttgaaagcttcttcaaattctccgccattgcaaccaccgtttttctctatgtcgcaatctattagctgttgttcggacagtgttaatagatttttgccagatatctttgtcaaaccttcatcgccccaatcgctgagaacgcccaacaacttcctgcccatgtatatatatattggttacttcattttgttagtaaacaaatcatctgttagccctaaacctaaaataaccctatcttggggattaagtttagcgaaatgtatttttttgtatgtggaatgtaattttgacattaattaaatgaccaatccagccgtttactatatcgtacgtatattgttttccgaccaaagaattgcgacgaatctgtttcgttggaaattcggctgaaacaagatgttccgacaaattctttggtcggaatatgctatcctttcttgtaacgctgtttccaattatagtgtaaagtgtttataataaatgatcacagtattcttacgacatgctccttgatatttaacaggtgttacagctccttcgtctctccagtctttgctttcgtcttccatgtcgatatcactcatgttccaattccttgatggcttcgttttattaaatagttcggatagtgaagttacgttaacgcggaggccggtgtgggtcgcaaggaactcttctgttttccaatccgtgaactcgttgacaccaagtgtatagctttggttccccatattattgaagttctcaatgaatttcaagtttttcttgaacactttaagcctcatttctttctcggattcatccttgtaaactcgagagaattgagtcatccattgttggtggtaatcaacaattgattgctcgttcaaagtgacatgaggtctggcttgagagatccttagatccatggaaagaatggttagagccacgaacacagatcgtacagacaccatttcgatttttgtgagtaatatttaaagtgtttgtgttgtggtgatgaagaagtgaaaatggggagaaagagtttttatatatatatatagtatggaatgagaattgtggttgaagcaaatgaaggtttatgactctattgtggtgatttgctttacttgcttcatgatcttagaggaataacttctttctttgttttgcaagataactttccattctttatatgcaaatgtattgctagtaatgtatatatatttcatcacaatttcattttctacaaaaaaaaagataagatctagctatattttatgtgtactatagcaacctagcttaggttttgggtagtgttacatttgcgtttaaaccgtacatggttaaggaaacaaataaattgaatacttaaaaagttttagatcaacttgatttcaccagtaaaatggaaaagaaaatagatataaattttcaccccaacaaagatagtgaataaagaaatccaatactggaaaactatataatttttgtagtatttatacatatatatatatacactttaaaaagggtagaaattcattttttctgataacttttgtttttcaacatctgtgatgctaaatatagacttgttctaaattaatagctttagatttttattttattctgaagtaataatatttcacagtttagaagaaatagtagtaaatatagtttttatttttattttaagtaatgatatcttagattttcaaagaaaattattgtaaatatctatacagtaagagaaaaaaatacaaaacttctttaaaaatgagaaatatattcgggagagaaatttaaatgattcatcctttagcaagtatttgccttgtgtttatcactagtgaagagggctcagcttgctgcttatccagttgcgtaactaatttggttaattaggtaattttattgaagtgatcatattcatacacatgtagtcttgtttatgattgtttacatgtggtaacatagcaacttaagcttggccttaaaaactatatggtgcgaattggttttataaatctttgtttgattgaaactaaacgtgattttttggtcaagttgaattatggatctgattcatgatttttgaatttcgtttaaaacaattgcatggaaatacaaacgatgtgaaacaagatctaagagataaaatgatagggagggaatacattttatggagtaataaaatgaacaccttatagtttttaaggtcaagcttaagcatctaattatgacgttattaaaagtgataataatatgatggggattattatttttatttattattattctccttattattttccatttcttcactattcaatagatctatcatgcatatacttgtttctaaattaagtacagcttattttattttttaattagtgatattttacattcttgaagaagattatagtaattcatatatatacatagaaataaaaataaaaattttactttcaaattgataaatatataccaattattttgttagaaaaacataccggattcgatagtacgcggtagaagacctcagaggctcagaccaaatacttttattcccttttttaggataaaataatcaaaactcttgccaaaattctagttccatttcctttgtgaaaactatatgtaccattactttaattttcgctcaaaagagcctaaatacatcatattacgacgtaaatcatcttttcaagtttgactagaacgaaactttactttttatcttgcgattatttattttttatttctgacggaatttcttaactaaatattacaatattgatttgagcgttgagttgtcacacacacaaaaaaaaaaaaagttacagaagagctatctacttatgcatacatacatatatcttacgatgatatagattatagacccgagctttccctaattaaaccaaatctaaaaccaaaacacttttattacatgcatgtttatatacaaattgagcacaaccaaaaccgaagcaaagttgttccacccacgtagttgttgaaatatgaagatcgatcacatgatgctgcagaaatgagggttttcttcactgaacatggagctagcgctcggattgataagacctgaataaggccgttcttgatagtatccatgctcgtgtccgtggtagccatgcttgtggtagttataggaactcactttctcaccgttcaccgacatgttgattcttttgcgaaacttcttcttgaagtacctgtcgttatatccattagattcagggtggtaagggtacgaccataagcatatatctctctttgtaacattccttgcaactttcagaactttcttctgctcggccgaaccagtcaccgttactctctgctgttttatgtctatctgaacatcgtggactcctgttcaatacaagacgtaattatcaggtttcttgggtgacacgaaaactaattactcagtaaatgttaattagtttaggatttgaaacccatcttcactgattaattaccgttcatcttttcaagagctttcctaactttgttctcgcaaccgggacagtccattggcacttccatttccactacctgtgtacacatacacaaattcaattaacttatatataaatgagctagttttcatggaaaatgataaggggaatcaagataattactcaccgttgtcatctttgtattatagctcaagagaccttaattataaattagacttaagagttaacacagtttggtcgatgaatgactagaggataagcgcaaacacacacatatatgtgcatgcaaacaattaggaacttaagggagaagatctttgacggtccataaaataatatttttttatgtgttgcttctacagaaatatcttgtgaaagtacatggaaactaccttgaaactgaagtcaaaagtttatgtgaccgcaggttttacactgcaagcaagctctagatctattatctatataaatatttatatgactaaatttgataaggatgatcatgatttgacatatccattctttaacaaaaattgattttgacatataagtttagttatttgccaacatcatgatatgaggaaagtgtgtttatttaatccgaagatgatttaagaactacacgaattctaactttctaaggaagataatagaaacgtacatatagacatatcttttttagtttataactgtagcaataaagacgatcaaactggaattatgcgatcgtactgatatttttaaaaatacatggatacatggactgtattctggactagtttaatgtaagttttaacatgtctcattacgcatattcaatttcaaattttctcccaaacaaaaatgcacaacttaaattaagttactaatatgaattataaagattaattaagcttgacaatgatagagcaaccaatgagagctttgtacaaagcttaaatatttagtgttatagttttgacgaaaccatctatcagctggtaagcttatcagtggggtaatattacaaatataagaaaaaattacgtacaagttgaagattttaaataccttgatgtctaaagattgggagactatacgagtatgagtgacttaccctaaaagaggctatataaagaaattcaatgttaatatttttatagtaattttctcaagaatataaacactttacaacaaattttttttaaaaatcgaataattgaaaactatattatttttggaaataattagttctgcccgggttgttgactctactgatcttaattgattcaagcttttggaaatccttctccaaaccgacttctgtctttctctttcttcagcttaataatttactacaatattagttctatctaggtgatatgtgtgtctatagttcatccatcttgtctgatatatgttgagtttaggtcgaatggatatatatttcaaactcttattcaatcaaaatttacatttttctccgtacaagaaggatattcaaattcgaagtgcaaacactattgtagccatctcagatcatacatgaggtaacttttctcatgcttccagagaaaagcgtcctcacatttccgcttactcatggtaccgccgaatattagagttagtacgtagtttggccagtgaagcaaaatctcctacaaaactcctataataacctggattctagaaaaaattccgaacttccaagatatttgagagccaaggccagtcctaaacggttgcaaaattatatggctttggcgctgaaaagttacatcacataacgtcataacctatgcatcaaatctctttcttcctgactttaagcttatgaacttttgtggatagttttcgctcatgtcaaccgttccagcgctttaggaaatgagtcacatgaccctagaactggtataactctaatgggaacatatatgtctaatacataattgagtaagcatgatatccctttagatcttaatcgacttcgacctgcattcgagaaacggctagtggcattgagttggtgagaccaaaaaagattttgaaatgctaaggattttttttctctcttaacagaaactcactatttaagacccaccttggacataatttattcttgagttttctatagcaaaaaaaatccaaacgagttgattttgtttgtcgaataaaccacacacacacatatatatatatatatatcttataaattcgtccaaaaacattttttatctatctaaaacatatatgacattgataaaaatcagaatttttaaattattttattgagaaataaaaaatcttcccttttttatgttatcactgatactaatacaaatcattatttaattagtcaacatgaatagctttgtatatcatcatgaattagtttccgaaacatctaagtactactacgctagatatatcatatatctatcatttattggttcatttgggtcagcattttggaatcacacgcttcaaatctttttaatattcatgaccaaaaaaatttatcatatgataatgataatgcaatctcaatgcgtgcatatgttgcggcgcgcatgagagccgccccaacttgtagatgggaaaggaacgccgccaattacaaattcaatgtttaagcaagagacttaggtttctctatatagctttatatttacatatttatcagatcaggccatatatatctaactttataaaatcatcttaagttctaagttagcgcaaacctatttctatttcaaatcatcacgtattcaagttttctaattcaacctatgtatattataactatttgatgcaatttttaaagttcaacaactgtatcaacttgggatgaaacactcttaaacgagatcattgctcctagagacatttgattaagagtgcaacttgagatgaaacctttaaccaaaaataatacagtgggataaaatataatactatttttttagaggaaaaaatatgatactgcatttggaacccatgcttcattgcccctccattccgataatggcaaatatattttttgtcggattgttactcatttcaaatataatacttctaaaagtgaaagttgaaatattaaaatataagtttatcttattatccaaccgtatttgtatcgtagccaaaatccaatactaaaaaatgaaaagaatactaataaaccggacagaaccaagaaaaaaagtgatgaaaatcaactagcacgatccagtgatcagtttttccttccaaaatcgtttgcatcattgcatgacttcttttttttttttttttgcatgacttctttcttttccttttaaaataaaactaaaaatcataaggggtttttattactatttttgttttttttgtgagaacacaaaatccattaatttggggagtttgcttgatgaataactgtttttggaaatttctttttctttcttgttttcaacaacttattgggagatatatgaacagaaaaataattatattagacagttgaatatttttttcaagaatggttctaggatttaaatattattgcgtcatttgttcttaacaaaaattaaggatttattgcatcactgaaagaaatattctagctaaaaaagttaaatattgttgaattggaaattaattatacgtacacgtatcttggactttccgtatgatctttgttcatactgatatcaacggtccaaacaatggaataggccaggataaaaaaaaatcaacaacaatgaaagggagatttaatcgcaagtggaataaaaaggttttctcaattaagttagaaagtggaaatcatcgattatctcttaagtggagcttttaattattacatacacagcacaccagtctatttttatatattttatgtaatgttattgcaacggaaaatcgagaattgctgaatttaatctgtcttaatctacaattatatattgtgcgtataatattttgttttacgttttattaccattccatatagctaaatttagaaatgtattactaataattactagttaaccaccgaaaacctactacgtactccccaaaataagcattagataaatttgatatgtgacgtgaagatattttgcatctcatcgcatcaattattatcttcataaacaattgcatgcagtaagaatagtggccatcgatctccaatgggctactattttttggcattctaaaaattacaagggaaaaaaaaaagaacttgagctatgaattatgccttgactggtcatggcattctaaaaattaatagtatgaaacgaatccattgtaccactggaccgtacgtgagtgttcccaaaaccaatagttgcaatgaaaattttgcgttcggaataatttaacatttttaaactcaccacgaccgagaaacttctaaatacatttgattggaccatgattgcatttgaacgcaaatgttatactaccctaaatcctagggtcactagtaaatatagctagatcttatctctttattttttaagtgaaatcgtgatatgtaaacattagttgcaatatgtgagcacataaagatgggaaagttgttcttccaaagatcacggcgcaagtaatgtaaactatagcatcaccataataggagtcaacttgcaatttgctctcatttttcagttagacataactaactccgaaacttttctttataaatacccttctctccatcttcacttcttcatcacaacacaacacaaacaaaccatttacataaaacaaaaacaatttaatacttcttagtgtgtaaatgtgtgattctttcatcaataacaaaatgacatcgatattattcatgctcgtgagtctaacaattctttccatgaatctaaaagtctctcaagccacatctcgtgtcaccttccacgagccgatcgttgctgaacaccatcagcaatggatgactcggttctctcgagtttacagtgacgagctcgagaaacaaatgagattcgatgtgttcaagaaaaacttgaagttcattgagaaatttaataagaaaggggatagaacctacaagcttggtgtcaacgagtttgcggattggaccagagaggaattcattgccactcacaccggcctcaagggggttaacgggattccatcctctgaatttgtcgatgaaatgataccttcttggaattggaatgtcagtgatgtcgctggccgtgagaccaaagattggagatacgaaggagctgtaacacctgttaaataccaaggccaatgtggtacgtaagcttgtcggaattatacatacaaaagatgattcccacacgtatctcaattatataaaaaattcgattcaatatttgaaagaattgtaataatcattcaacatacaaaacgtaaaccccaagttaggtttagtgttaggtttagttactaagagattcgataattatcaaaatataactaatcaatatatcgatgcatttatgggcaggatgttgttgggcattctcaagcgtcgcagcggtggaaggtttgacaaagattgttggaaacaacctagtatcattgtctgaacaacaacttctagattgcgacagagagcgtgacaacggttgcaacggtggaataatgtcagacgctttcagctatataatcaaaaaccgaggcattgcctcagaggcatcatacccttaccaagcggcagaggggacatgccggtacaatgggaaaccctccgcatggatcagagggttccagaccgttccaagcaacaacgagcgtgcattgctcgaggctgtatccaagcagcctgtctcagtgtccattgacgcggatgggcccggtttcatgcattactcagggggagtgtacgatgagccgtactgtgggaccaacgtgaaccatgcagtgacgttcgttggatacggaacgagcccagaggggatcaagtactggctggctaagaactcgtggggtgagacttggggagagaatggttacattaggatccgtagagatgtggcatggcctcaaggcatgtgtggtgtggctcagtatgctttttatccggttgcctaactaaacggcagacgacttttgttatataaaagtgatattattgttttaaacattttaaacaacaaaatggtgatatatcttgttatatagtttggtttatgaactctttagatgtggtctaaatctgcatcgcaaagattgaccaatacactatgtaagtgtgtataaatgatcgttatattacatatagttgttgtaacttctaagaaaagtatatagaaagaaaaacttctaaaatgtaatggggtatttatatttcgtctcgttagcactgttaccatatataatttcatatgtttgaagtcaccatttataaatcgtgagatatgtatgagcttctaatttccgtagtctagagacggtggcagtggtataaccactagagatgagaaggcgatcaataacgcgtttgggacaccatcaccgaaagtagttgagttgcttctagattattatttccgtagatgttgaataagatgaatatgatcaaactaaacaggagaatattacgtagttcaaggaataaaataaatgagatgtacaaaaaaaatatacaataaacaaatttaatccactaaataaaattgaacaagttgaaaaattattcctctctaattaaagagcaatgatgttttgctaagttctgtcatagatacgagagcgtaatatttacgtaactccaaagatttggattcgttattgtttgatgatcaatgcaaaatcacatccgaattatatgtgagacaaaaaacaattataagaaaatttctagtaatatatatgattcattttttattttggggaaaagtgaaaaagctgtatactatttagataaaaatggctatacaccatataatactgaaagtaacgtgaaaaaaggttatatactaaaaaaaaacaaagttagtatctattttttatttttcatttttatttaatttagtgttaagaaataagagtttattatctaaaccgagaatttaattagattcattctaaatttatgttgtattcatatttttaacatcaatgaaatttgcaatttgagaacttattaaaactaccaaaaacaaacaaaaacatcgaatgctttgaccgtttcacatatggctgctattgattcaaatcactttattaggctacataatcctttagcatttaccctcaccagaaaaaaaaaaaaaatcttttagcacttacggcaacaattacataaaatctgttagcatttaaatttgaaaatatgtttcagccaatttatatatgaactagattttaacccgcggtatctttcagaaaaaatcaaaattaatttgtttaatagattaactatatatataacctacttatacatattttaaaaatgtacaactcttatatctatatatcatttagtgtacaattactatatttaaggtttataggaacgttaatataaaattcattcagttttgatttagtgaagaaataaattatttttcttttttgaatttagaggtcacaaatagtttgtaaccaacgtaacaatatatagctcgctaccaaaaaaataaaaattaacaactcttaagtatagtgttctttgatacaaaaataaaaatcattacattttagattatactcttaaagaaagaaaagtgagtaggaaaaaatcgcaacaaaaaaagaatgtgttaaagcaaagaatgtagttttgtgtttagtgatggtaaaccacttttaggtgcagtgtatttataaggaaaactaattagggtcatatttgatagccaaaaaatattccgtttagaaagatattagtgacaaaatcttataaactattagtttcttttttggaatatgccatgattatgccttatttagagtaattaatatggataatcgaaattgttagtttgattagcaagtaaatgacgacgcaaatcttggatttgatatttgaatacacgtgtagttaattttgagagaatttatggcaatattgttaagagtaatattcttttgaaatttttgaaaaaaaaaagatttaatgtcagtggcattgagttgtaaataagtctcaacttcatgatttattttacaaagtgactgcaaaaatgtatatgtagatctcacataagttctcaaacatttagattttggatcaaacaaaaatggttgtatacgtcaaaaacaacttcttttcagttcctatactaattttacatcttttttgtttgtctcaatcgtatgcaagatttagtacgaacgttacaaaaagtgaaatcagcgacatttgcacacataaaggaaccaatgcatcattttgttttgaattcctgaaatcgtatcctgaaattgtaacattgaattcctgaggttattaatcaatacccaaacctataataataaaatgtttttttttattcactttagttctatatatgtttgcactttaatttttaaattttgcatttaaaaaaactcattaagttaaaaatacgttttttaatttatataatacatggacataccttttttccaagaatgaactttctccaagaatgaactttctccaaagatgagctttcagcactgtcagagaggatagtttctctacaagttattaattcttgtatcgcattaagttattcgggcatctccaataggactcttcattttgacggtagataatcttaaaaatgcaggtttaagtagggatgggcatacggtttttcagtttggtttttgtttggttttatggtttttcggttttctaaaaactaaaccatatagaaaccgtataaaatttggtttggttacggtttagcttttattatggttttacaggtttttggttttatgaagattgaaaccatataaaataattaaaaacatatgtatctcggttttgttcaaattggtttctgtttggttttgggtttttcggttatttcatacttttacaaaaaaaaatatatgtttgatgatgcataaataaaattagaataaaaaataatatgtgaactaataagttaaaatacaattttaaaattataatccaaatctagtttcataaacccaaatcctaaattaaaatttaaacttataaaagttagaaagctataggaaacaaaattcagaaaataacttgtatcattgttatctctaatcagccacgattatatatatatacatagttaatttttaattttaatagaaaaccaaaagtatctatgcatgtaatccttgataaaaataaaatattaactagaatttaatccgcggtacatcgcgcggctaaatttgtttttaaaatgtatttttttaaaaatgtaatattatttgttaaagattaattgaagatatatcatattaatttgtattttaaatgtatatatctatttctgtattatttagtatatgattactattgtttaggtttcaattttgaagtataaatacaaaaacaaatattttttatacatttaaaattttgaatattttatccgcagtatatactgtggaccgtttttttatagctaattttttgaaattttaagttatatttgttttgttaatattgaaagttttttgtgtttaaagttgtataattgtattttgattgttaattttaggatttcatccgtgatatacctttctttattaatatcgatcaaaacccgtcattccatataaattcgtctatattatattgttagctaaattattaatgttataaaatccaagaaaaataaattattattattataaatccaataattttaggatctcacatgtggtataccgtcccttgaatgattttaaatttatactactaatatagattttaaatttatcatataaagtatatgatttcaagtttttgtgtttttttatttaaataaagtaacggcttaaatgatgattgatttagttctttttcttgtatgtgtatataacttttgtgatctttaatttattataaattagtatttttattgctatacaaaatgttaatataaatatttgttataaatcggatttatgcatattttgtggagtaaaattcacaaatttgttttttgattgtgtagagatttttagaaacaaattaggcaagatattgtttggttattatctttttaaaattttgtaaaactatataataaatgctagtagcaactatagaaaaatgaatatgtagatggataaagggtgttcctccgaagattagaagtaatgcaaagtataacatcaccattcaccacaatagacaacttgcatttgcttccaacgtaacaactctcattcctcactctatataatatcataccccccattctcacttcttcgccacaccacaccacaacacaaactctttacgtataaaaaaaaaaagttcatatctttgtgtaaacgatttttttttcatataccgaaacaaaaatggacttcgtagagtttgtgtgtgttgttctaaccatatttttcatggatctaaagatctctgaagctacatctcgtgtcgctttgtacaagccatcatccattgttgattaccaccagcaatggatgattcaattttctcgagtttatgacgatgaatttgagaaacagttgaggcttcaagtgctcacggaaaatttgaaattcattgagagcttcaataatatggggaatcaaagctacaaacttggtgttaacgagttcacagattggactaaagaggagttccttgccacctacaccggtctcagaggcgttaatgtaacttcaccattcgaagtggttaatgaaacgaagccagcttggaattggaccgtcagtgatgtccttggcacgaacaaagattggagaaacgaaggagccgtaacacctgtgaaatcccaaggagaatgtggtaagcttgtcatctttatatataaactgtctctacatgtatgaaatttggaagcaatgtaatgtatgaaacggctggataattacactccgtatttagaaaacttattcctcacgtaacctataaatatatatgagcaggaggttgttgggcattctcagcgatagcagcggtggaaggtctgacaaagattgcccgtggaaacctcatatcactatccgaacaacaacttctagattgcaccagagagcagaacaatggttgcaagggaggaacatttgtaaatgctttcaactacataattaaacaccgaggcatttcttcagaaaacgaatacccttaccaagtgaaagagggcccatgccggtccaacgctagacccgccatactaatcagagggttcgaaaacgttccaagcaacaacgagcgtgcgttactcgaagccgtgtcaagacaacctgtcgcagtggccattgatgccagtgaggccggtttcgttcattactctgggggagtgtacaatgcgcggaactgtgggactagtgtaaatcatgcagtgacgctcgttggctacggcacgagcccggaagggatgaagtactggttggctaagaactcttggggtaagacttggggagagaatggttacattagaattcgtagagatgtggagtggcctcaaggcatgtgtggtgtagctcagtatgcttcttatccggttgcgtaactaattcggttagattatttgaattgaagtgatcatcatgtgtttggtttttatgaattgtttagatgaggtctaaatcttcatcgcaacttaagcttgaccttttgaaactgtaatgtccatttatcgtaatgaagacagtagaataaataagttaagacaatatgtaacagaatttcaatctctcttcttgctttgattgttgtagcaaattcccagtcgattagtatttatcatgtcactatttacaaaaaaaattacagatgtcatgaatcttatggttaatggatccgattggtaatacaaaatgataacaattttttttgccgtacacaaaacagtaatcaatatataactagttaaaagggataaggtatacgagataacgataccaaaaagctgaaagtgtttttttgtatcgattttagtactacatcggtacaggttaccaatcataaccaatgtagctttgatcgatgtttcatcatgtattctatgttttgctagttagttaataattctgttgtgggactggtcatcatcatcgtcagttcaaagcgaagctgagctctttttatacgtgtactctgtttttgtctgcattaataataatttttgtttttttctgttgatacaaaactcaaaagtactagaataacataaacggtttctcctaagtagtaactaacatcaattttttttaaagaaaatttcaccgttaacacctttctcagtttttttttcacgaagaggcaaagtggattgggccaaccagcttttaaccatttgggcttaattggacgaatctgccctgaaacaagaaatgaaagaaaactgttcagtttcgttcctttgtattctcgttactgaaataattttaaatctttaaaattaaattaaaaaaaacgtaaataattttaaaacttaaaataaaatcaaaaactgtcttcgagaaacgcaaaacagtttcgacgaagtccgtattcgaagacgcaaaaaattccgacaaaacttaaacccaattccgattgaggctctgttcgagtttgagtctttgcttgagtggaggaaatttcgatcgagttcgttttaaagtgtctaacaaaaagaggattttctggtttctcgaattactgttcatactaaaatggcagagatgaagaagagtagtcggcggcgaggagttttggaagttaatgtatcatcgtcggcgacgacaattgtgggtaagggtaagaggttgaagaagagtgcaaaattaaagttgcagaggttgaagaagagtgcaaaattaaagttgcagaggttgaagacgaatgcaaaattataattatacccttcaataaatttcttttgtgtacgtatatgtaatttacgatgtacgtacatgtggacatgtaaatataatagattatgttttattgttaaagcgatatacacaattatatattgagtttgtacattagaaatctttggttattttgattagatgagatattttcggagttttctccataaaatctatgcatatataataattaagtaaaaatatatagtcaaagtatagatattcttaatacttttgaaaaatgatgtacgtacatcttttcatgagttaaaattgttgagatatatttattgatacaataataaaccaatattgaccatggtgagggtatattttactatagtcctactagagatgaagacattgttatttacaatattgacgaatttttgtaatttttggtatctacgatggtgcatacggcgagttagccaaatgttatgtatttagtacgatatatatgatattttttgttttgatgttgttgtttctatttaattgttattttgacattctttagtaagcattatgttatacgatattatttgttgagaataggtaagatttaaaactaaacccgtagacgtacacgataatattgagatacacgtacacgtgtatgacctcttcaaatatttatatcctaaaaatgcctaaatcacataagtcttatactatgtacgtacacaaaaatatttattggagcgtacatggtacaccattaatctaattttttgacatcaaaattaagttatttgtatggctataaatctcaatataaattatgcaaatatgatattcaacgaatcgtagtctgattcaggtaaaacctattttccaatactaaactgcaggtctttcataactatatgtattcatgtacgtaaaatatttacctttcaatactataccgaatacatagttagtagtgtgcttatattattccaaaaatcatgtcttatctcccgtttaggactcacaaatgatcgaatgacttaatttttttctaaatgatcgatgctttttcaatcaagaacatgttcattagtgacactcaaatgcagaaaaagatactcaggttaaagatgactgaaaaattacagttatacctttcatcggatttcttcatgtatatatatttaatttataatgtacgtacacaaaattatttagtggaacgtatatgtacgattcctaataaatatctaaccaaccacaacaacaaatttgatatatatgttagtttcatgtacttttttcatgtgttgttcatacatgatttgaatgttttgattttatggtcaaaaaaaatttgaaccgtaaatatacaaattatttagatatttacgtacatatatacacacacattactcccgtatacgtacacattactccggtgtacgtacacattactaccatgtacgtacacattactatagtgtacgtatatattattacggtcagagtaaaatgaagcaaggcgacgattattggtagtctctatgcgggaacgcattccctacaacaaatcatcatgattagtgacatgtacggtatgtgaaagtaaaaaacgttataaacacattggcaaaatattactcgattatctgccaagatgagacccaggtcgaactcatttattcccacgcatttttgaaacacccagaccacaaaagcgcgtatactccatccgactataccatcatctccagttacgttctcagctatatcatctgtgtgctcaactaattcaccttcgcatcttgtctactctgcacagactctagtgtacgtacattggtacaaaccatgttgacacatcggggatggagcagaggtgggtgtactgtcaaccaaaacaccagtgggttctacgtgaggtacatgtgtactcgtcgacgtacacgatgccaatagacgagtgaattcccctgggggttccacggtttgttgagtgtcattcacgacgtcctccttaacatgaccatttccatattgttccacaatcatgtcaccccatttattgtaatcgtaatcttcgccactaccttcactaccgtctactgtagggtcgagggtacttccacggctttcaccatcggtgtcatcgtcatgtacatccatatcttcgtcctttacattatcctcgtcctcatattcatcctcatcaccttcatctatgtcatcctcctcatctacatttatatcttcgtaaaaattatgagctgcatcaacatttgtaaccctgtttctgtatggcctcccttgccgataaggtaaaaagacaaaaacaagttaacagaaagatcgccattacgaatcaacataaatgtatccaggctgatttgattctcaatatatactggagggcgattacttgctatcatatcagacatctttccaggcatccagtaacttattatagggttccattcactaaacttatagctgaaaacatcacatattgtacttgccaaatccgtgtacgtcgttgtgtctgtaatacgtacacagcgtccgaaacttcctttttcagcttcaaatttccaaccttcttctttgtatatccactcaccaaccataattaatacaggtaactccatacctgcaacataaattcctcaggtcagaacaacattaaatacaaaagatatttttgaaggctttcatttatatcaacgaagacaaaaagaatctctaacaaaacaatttatgtacttataaatttaacaaaacagatcatagagctttcatttatatctacaaatacaaaaagaatctccaacaaaacaatttatgaacccagaaatttttaaaaacgtatcattactttcatatcacgttctcaagtgtaattaataggattaacacgaatttcttacccagaacacagattgtctctccttcaatccttcaaactttgtaaaacagcaactgaaaacttcagattcttcaccgtaacacaatttcgattttcgtttttttctcagaattctaatctcaattatgtaaatatcttacaatataatctctattataataggtaatcatgagttttagttttgtcaaaactttttagcatgaaaaacttctgagcccaaccaatttttaaaatttttaatttcaatctcaagtgtcaaattcgccgaaacctagaaaacatttaatgcatttctcgtcgatgaacagtgtacgtacaaatccggttctcttggattccaacgacgcggtccgtacgtacaaaccgggttcagtttcgtcaggggcattttgatcagtttttggctgaatggctaagaaatgaaaggcccagcccacaatgtcaaaatctaaaattaaaagtgagtcaacggctactgtgcgcaatttacccttttttttaaacatctttttaggtgactttcacatcatgtgtcagataactcttatttataatgtaaatttgaaataataatattattatatattagaaactatcatatgaatatatagactatatataatttccaacggttatgagaaaccgttttctcttaaaatgcaatccccaaggacaagtttgttggcgtgtcgggataaccaacaatctgttggatttgatcacttttggataatctgtttttggtgggttttcttttctcttcattcgatggaatgtgtgtcactagtctggttgcacttttcatcagttttaaagtgcattttggtggttggataagtttggaaaaattacagatattttccatgtaatatgatggatagaattcactatataaaaaaaaaaaaaatcgcgtgtttggactttagctgagtttagttgtgttttgctcaatgtaaacatatatcaaccatttcacgaacatcaatatgcaatagaaatggaattctcatgccatctcgtcctaagatcctactcacggcttttactagctactagctagtccatcacatcatacaccttttaaacataataacgtatgtgaattatgttatgaccggagactttccttcctatgaagagtttgatgagtagaggagtgacacggatcgaatatttgataaatagctcattcatctagataggtttaaaactttagactattacattgtagacaaaaaaaaaaaaaaaaaaaaaaaaggatacagaggccttttatcggcccaccttaaaaaaagagagctacagaggccttttatagacccactttaaaaaacaaagatatatgaatttgagataagaaaccttatttcaaacaagagaatagtttattttgtcccacatcgtttaggtagagatagtgatggtagtaacatgcctataaaaaagaaagagctaattacgtaaaaggcatgatccttcaggcaagttaaaggggatatgatgaatggtaaaaactcgcttatattgcgagaagagcgttccgcccaaagcctgttacgactattgggcgctctcttttttacacaatctgatccctccctaatttccaataagaaggaacttttcttttttagttttggtttcatttttcttaactagtttgtttttggtgcagttttctttttaaggggaatataatttagggttagtacttaaaagtaattgttaggttgaaataaaactagtaaatgaaagtaaaatccttcagggattgaaccccaaactatatacatcaactttcagcaaccattaacactacttggaatctgaacaattcttacacaccagaattatcctggtggccagaagagatctttaagtaattatggctttgaagttgagacttcgagtagtaacaaattcaatgaagcaagtagtatagtagtacatgtgatgaattccaagaacattgatttataaacgaatcaaggatgcaagagagttaaaacgcagaaaagagctcaacgaaccatgtttctcattgtatcttctggtggaaaaaaagcacatgaaacaagattacagatagagtgaagagagaaacaaacttcaagcccgtttgccgctgctagggttggacttgggacagaggttccaacgtcccttggcacgtcgacgctttatggttgctctaccgctagtggtcctcatccttctacggaaaccatgagtcctagctagagattttcttgatctgcttctcttagtttgacacagagcagcttttccagctctaaccacaaggcctctgcgtctctggccattcagtccactagtttgactgctgagatcaaacgcaatggacaaacctgaaaagacagcaacaccattttgatcaatgtgacattataggtttgatagtgtatcaagctgataatattggaaccggtaaactccttcctttaattacccaaagaactcaccatacaataccaaactctcaacacactgctcagaatcaagacccagacaaatccaaaatgactttaatgcattctcctaggttacccttttaactcttgagctataaccataacgtctgttgctaaattggcaaagcttataattcactgctcaaatcttagcctagctacaatggtcgtacaatatactttacaagaaaattatgatcaaaggaggaggaacaagttcatgtgacatattgaagcaaatctataaccattgtacctaaataatcgacatgagctaaaagatttttgtactaaaaatcaaacaacatttacttgcggctacaaatacatgagctaagatatcagaaattgaggcttaagttgcaaaatgttatcttcacttgttgttataaacttaacaagaaatatcagaaacaaacaaaatggcttctttcactcacactcccaaatcgaattcaccattgacaactatgtttcacaattcccaaattcttctaaaaaagcttcgaatatatgtgtttgcaaagtaagctagagcctaacacacgagaatagtgataaatcaaccaaacccaaagaaccagaaaaaaaaatcaaaattgggtaaaagaacttgatacattacatcaccagaagctaaacacaaacaataattcgaaccaatttaagatgtaccagaaaatggagacgctagggaaacaggcgacgagagaaacgagcaatgaagcaattgcgaagaagcggaagaagtgagagaggacgaactccgtctacaacccgtacgcagagaaagcgaagcagaaggaacgcaaatcttgccgttggaggcagcaggattccataaacgcgacgaagccgaagctacaacggaagtggataaggaagccattcaagttcccacttcttatctccaaacccagttcctttgtttctccggtctcctttacatagtgtggaacctctatcgtctacggacgataccaccataaacttacgcataagaaccaaccataataatacacgtatcacgacacttcagcccataagactataaaagcccaatactgaattggaccggacgggtaattaatcaagttaaggccagatttgaactggtctaaaatatctcatgctgttgttctgtgatacaattttgcttcatgtaaactgttaaaaacaggcactctatataacaggtaacgagaagaaccacaaaatgtttgtaatctagaggatattttctacaacttatccaacattcatcaagggtttttttttggggggtaacacaagtatgccatgagtctctctatctatcttttgaacatcttggaccacatgtagaggataaagaagaggaggagcgcgaaaagaactacgtgcattatgtggttgttaccactacggattatgcttaggttcagtttccttatgttgttcttcacccctgcttgcgctctgatcaatgtcatttgctgtcacaaacaaaaacaaaataccattgaagcgttttatgtttcagacaagaacaacatttcgtctacttattttattttgcttataacagcactaaatgcttgtttctgcagtctcactaccaaatctagttgtttgtcattatcttctctaggatgttcttctaggtaacaaaagaaaaaactagaacgaactaaaagcaatgaacacattcaacaccaacattctcattgacaaagtggcaggaactcaatgataagctgtaaccatttcctgctgcatttcaccaaactaggtgagattgaagatatctaatcctacccaccaccagcgttcagaccagatcctaagtaaacataatctacactttggatttatcaagattcattggttttgtaagctacggttaaagttatctaacatatgttaggatgaaactatattttcccaactaataatgaacagagacatctgaaacaagttataggaaaccgatattcggatatactatatataatcagtgattcatcttaaaggtaaagaagagtaaatgaatgcatgttactgatgttaagtgcttacattgcaatttactatgatggataaagaaaaaactaaagggacatcaacaacataccagttcatctaagaagtccctctgagactttgcttctgacccaatttcttgagcaatctgcatcaaaataagcgatcaacgatataacaaaaaatcatgagggataaataatgcgcaaaagtgcaaggtaaaacacaaggaattgtagagaatgtcgactgattccttcaagaagggtggtgatataaaacaataaccacagatgtatacaaaagacatcagacaagtggattcaactaattaatcgtggactgactgataagtattgtgaacaataacattatcatagtaccctgaacaaaaaaacacctacacaactaattaaccaagctctaaccactgtcaaaaccgaaaagaagacaaatttccaaattcatatgatcaacttaaagcttaaagagaacaatgatccttcagaaccacaagaagacaatacaaatggcactatagataaaaagtagaaagatcgaaatgggatttagagggtttcttacatttttcaattgcctgacttggccatggagacctagaatctcatcatccaggtcagagtgcataggatcaatcctcagctgaatttcctctgaacctgaagcatttctagtgcttagcccttctctacaaatcacacaccaaagataaatacttgtactttacgcagaattcaccaaatctaggacccgttttctctatccagaatcgatttcagaaaaggagaaactgataatattagaaatatacctagatctatacggatcagctccgccgtatagagaaccacccgcaccgcgattggacgccatcgacgcgaaatctaatgggtgtaagaaaccctaaattcgaatctgctggggtttgagaaattaagttttgtattctctcagaaaattcgagatcgagaaattgcaaccaaaagaagagaacaaatttcaggcaaatcaaagagaaaaacgacgacgattgaaacaagctgggcgggtgctcttcgattcaatgataaatgaccgcgagggaacacgtggcgttttaatattggttgattatcgtcatgtttttgagttatgtaaacaaataaagaatggcagttttgaaatattcgtcagccaatattttttggtttatgggcttttttaacgggccgatcccaactttagtggaccacaaattcattcgttcataatgatgtcattgaaaaagagaggtatttactctgttcgttctacattcgttgtattgtaagcatcaacgatacccaattacacaagaaaaatgttgttttttcatgatggtgttgttattttctaattgttgttaacgaagagtaaagataatagaatcgtgtttgcattgtagtcgttagtttatccatcggtatttatttttaattttttagtctttttttaatatattaatttttagtgattgttaaccaactgttttataaacgttaacgatatgtaggctaaattttctgaattagcaacaatgtaacaagcatgattttatcgctgaaaggtattgttgaaccaacaaactacaaaacaaacataatttcatcatttgtcactgttgtgtatcactgatgaaagccaaacaaacatatcctagttttggttacaatatctcagtgttgatatgatagatgatggtaagcggtaactcaattttcacataaagtagtggtcttgacttgttgtttctagttggttggggctaggtgtcattgcaatcgttttgacattttagtaggatcaaagaggtccagtccaacgaatttgaggtctagtacagaaaatgaaaattttgagctttaattaacatttttattgaaaataaatattaattggaaaatttctatttttttcaaaaacttggacttttattctgttttattgaaatattgtctgaatttttaaaaagaaatgagcgtttgtcttttgtacttatctaacaaatggtttatgtcttgtgtcattcatacttttgtcctctctattttgatctggtatgacgttaaagtgttatccattattcatacggtccatgttgcattggactatatatctactagtcaaattcaaacatttgaccttccaccagatcctatcgtaatttttacgtgagttgtagtccttttttgtttcctgaaagcagaattattgtacccatctttttaacaatggtaagaagatttacgaaaaatggttcaatgaaacgttcaaaaactgtgaacagaaattgatttgctaatgtagttcggaaaaggagaaaatggaaagttggagaatttatatattaaaaaaaaaaaaaaaagttggagaatgttattaaatcatcgcaaaaacttgttaaatcactgatacaaatattggagaattttacattttcctttctgcattataagcttatggttatggctatctttgtgagtaaataaacatctttttaattattatttttttcatttatatattcgaaattaactagatgagggatttagtaaacagaaagaagagttgacatcatgtaaaatcgaccgacaggttcataatgatgtcattgaaaaagagaggtattgtcatatatggtgtcaccgctaggtaacagagacgtacattagcttatgttgatgtattgtcagttggttaataaagcccaccactacttcacaacttggttgacttttcgttttagtattcgatttgtcatcattaattatctcccaagaatttagtccaccgagtcgtatgctatatagaatccaaaagatatcaaaaatttacaaacaaacattataataatactttgtacaattcctttagtttagttcaagtgcaaaatagaaacttattcatgaactgtatagatttcatatttcgtactttgtctcaactaacaaaatgtatgtacttttggaattaaaaacatatttaagattaactaaatttcatcacgagtgtattttgtatatgatcgtactacgttaaccaaaaagtttcactatccccaatacccgagtttcttaaaatatcgtatactctatatatagttttattttcaatatatattatccttgaattatcattaaattcatggatttaactacccaaatattatttataaagatttcatatcttttggattcctaacaatttattgtatttaaaaagaaaagaaaaaactagatctgacgttagatagttagtccataacagatatagttgatatcctatcaattgtgaagtgggatagttatataattgaccgttttgcggagccgagcttgttccacgcatattcgttgattaatattatgttttttcactcaaaaaagtcacatttgaatagcataaattgcataattatctatatcatctatctataatgataattatgaaatttattgtatgaaggaaaacatatcttatctaaaggacatgtttaggctttatcacacagccagccaatctggaatgacaaagaatctcttctacgtgactatccttctacaatttcttgtctaataacatctcgtatattatctagttctgttagcacacttattgatttttttatacaaaactactagttataaattttatttatatccttgaagttttctttatttttatttttttaacacgaatttcatttttattacttaggtacgtagtttgaaaacaaagcatttgagatacacaatgggataaaactatgaactatgtatgaagacagagcatgtctctggtttttcgctaaaatatcagcaggttgatttattgatctgtgtgaccacgtgaacttgattgcgtcaaacttatttctccaaacttggatttcatggatccaattgatagcatcaaatcttcagcctcttccattcagaacattgactaggagcttgcagtcgccttcaagtattacttttctaaaacctcttatccataattgttgcatggcaagaattaggctttgacattctgcttcaaaggctgaggaaatggtcgcacctgtcgcttgagcagcccctttgaacacgccgttatcatctctgattatccaagctgccgtagagccacggactcgattcataaagctgccatcgtaattacacttaatccatctcatatctggtaattacactttatttatattatcattttagctatttttaaatatttttcaaattattttatgagtattttcttttatatagttcttcagtttatggtataggcctctagggttaatatttctaacatccttaattttatagtttttatgaaattattatttattaataatatgatttatatatacatatatatatatatatgttcttttggtaagttatatatatattgtgttttctgtatttaatttacatcaaaataactgaaattgtcgctatcacatctatttgcatttgttgtacgaaagcataaatcatttagcattcatcttttaatcattttttggtgatcaaaatccgaagctgaaatctaaactaatttcgagtatgtgtacactatataaattaaattttgtagtggctcagaaaaagttagtctaatgaaaatggaactatgacctaaacatccaacaataaaatttaacgcgcatgaacaaaactttagttgaatccaccttgacatctccattggattctcaaactctaaccacataataaaatcttataaacaacaaaaagaaaaaaccaaacaccttcatccaattttatgattggaattctatacaagaaaagaaattagaagacgtgaaatgattgatccaatgcaatttccaaatatataaaaaatagatgttttagtggatacggaacttgggtaagccttgcctagaagcaacattggccaccaaacaaaacccactcattggagcaacgtgtgtggacccaataaacgagcctcatgggacccaaacggcccatctatttcatatgtattttagttgaccaatatggttcagaacttggagttggaatgagatgtttctttgttttttccaacatgtatatatatttatgttagctaagtgatacttaaataactaggttagtgaaaccggagaagccggatgtagaaaaaaaaacaaaaaaaaaacagaagaactagatctgtactttcaccatgtttggttttaaaatatattttcaccatgtttaaaaaaggaaaattttgtgagatttctccacttcatcataataagttaataacgactcaaaactttcaacaattgacaatacacgatggttcaaaacaacatgtttgaatatcaatgtgtgtaatgcatcaatgataattctcatgcttatatattaagaccatatatagttattttttgtccgttatataaactatataaagttttgacgagagccgcccgtccgtgacagatagagaggcaaacaatcgtacgaactctaattcttataaaagtttttcgagaactaaatattccaagtattttgcaataaataacgtagacaaaatagatgaattacccaaattccctacgtgtcaacttttgcaaaaacgtccttaaaatattccttcacaatctctcgttcacaaaaccgataacgatgtttgtttaaactcaaaatgacgatgatttaactagtggcgttccaaaaatatgactttttctatattttcttgacaaccatgaaccatacaacagagattttacacagaaagttgaatttatctaatcagatagttaaagcgagttaaatttgtaggaattgctctttagaaaacacggatgctagattactaaagaacgcgactaggtgatatatattaatcacactgaggaacgaacctaactaatcttcattcagtattcaaatttatttactagctaggtttaattttcagttcgaaaacttctaaaaaacaaaagcatagccatggccaggaagacaaatttgtttttgtcattccaaagattctccaacattcaaattagaatgatataacttgattagttcgagagacaaaattttatgaaagaaaaagtgtgagtttagctctaggttttgccaaaatgtgagcctaaactcagtctgatgtttagcgtgagtttagaaattttttgaataagatcgaaaacgatttctaagtggtactacaattcttcgaatgggggacggtggtcgaaaattgttacgtccagaaatttataacattttttttttgtagcaggagattttgtattatttgtggcaaatataaagtacttaaatcatcattcttaatgaaacattgaatttaaactcgaatcttgtaacacgaatacaatattttttttaacatgttcgctctatcattgtgagttgcttaaatatgtgtatagtcgaaatcttaaatgaatttcttttatataaaagtgagtcccggagtttggaaatgaaaagaaataaaaaagcgaaaatcctatcgaaaatgtcacacaattatagcgaagaaatcaaagctgaaaacattgcttgaggacgacagtcgaaatgattcggcaatatataatatgattgttagcaatggaatgattggttggtacaatttttatgtttgcttgacagcaaagaaattattaggtcttcttaatagaaaacaaacacattttatattataaacctaggaaaggaagaatgtttattttggaacaaaatcaatcagaatatcatatgactgattaataatattttctgatatcacctcttaaataatagaaccctccataataggtctaggaaaaggtatatattcagtttacatttctaataagtatcatttctttctgtcgacagtaagattatttctacatgtaatagtactataataaaaaacgaaattttaaatagtgatatgaaatttgttcccgtatataaggtgatttcttttgagtaataatatgcgaaatctagtgcaatattcctaaacaaccataccaaaaacactaaaataaaataagcaggatcctaaacaactaaattatactaagaaacagccaatattacatgtctggtactgtccaaaatcttgtattttgacataaaataaagtaatatatatgatctcacagagtcacagcagatggcgtaaaagcatgtgaagattgatgcaaatgatttaagttgtttcccgtgacctgcagacgaaacggaatgtccatggtccatataaaccttttcgtcgttcgtggaaccgtcctccaagaaaacactactcttttagataaatatgtacttgttttatcgtcagagaaatatagatttttctagaaaactttgtttcaacaatttatggaggaattatgatatgaaatagacgttatacccctattttaaaggaaatgggcaaacactatatgaattttctaaaaaaacaattttgcttagtgagtataaaaccgaaattaatatggattaaccttataatactgccatgcatgtctacatttttcctaacattgatacaaaaaaaaatgactgaaatttttcacatatttttatattattttatctgaaaactatgaacttggtaaagtttgacatcataactatgattacgcctcaatttcacaagattggggtttaattattatcagttacatctaatatatcttacattctaaactttctttttgaataattgatgttaattaaaaaacattattctactattgaactcagatatatcatgcgacatttataaggtctcgtatgaaacatctaccaactaataattcatggtagagaaggtttttaaatcttttgacaactaagacctattttaaatttatttaattcccacagaaagaaaattgaggtaagtcttaaaatatgataagtgaataatgttttgaggttgacgaagttttagagtccgatctctcacgttatgttaagaaaacaattttaaacaaagagttctttttattcatcttttaaattgttgaaatttattcatttaagtacttaaagttttaaatggatgatgtggagctaagtagactaaactgttaacgaattagaccactctatttttattaaataaacaactatttattatagattaaatttatttatatgtaaaatttagtctatagttggtacaagcggatttttttgtaattttctcaatcgacattactacattaaaactatataatttatgaatgataaaaaaccggtataatccgtaaacaaatttgtttgctttaaccgcaacaatttaaactcttaaaagaaataagttgtttaaaaacatttttagatacttgctacaaaatagaaaaacaaaagagttttagattccctaggaagacaaagcctgcactactttccactcatgagtctttcccatatccttccatgatctttctctgtgccatagacaaacccatacacatgtattatgcataatgtacataatccactactcaacatacgtgttttcttcatgtgatctgtgtacccacgacggtgaaaactcatatttgtcttctactctaaaatgtgattctgtctttttaaaacagttgaacccaaagttttacatgaactgtctatgccgtttataaaaatagactgtcgatgccgactattatcagatccggaatgtcttttcctataacattttaatatgattatttgtcttttcctataacattttgatatgattattcatccctagccgaaagaaagttagcacttgtttaagttggtaattagtattagaagcttgacatatacttgcatgattagtcttttaatttaatattaccacatatagatgcattatatgtacctaattagcttatattaattactttgctttcgtctcatataaagtaacatttatagtgctgatttaagactaaaactaatcattgagatggacttaacatctttcggatgtcaatttaatgtcattctctacaaggaaaaagattagattttgttgcgtaacaagaccagcgacataatgcaagtttgtgaagctttctaggaacatactttcacacctaaaaaacgaacaaaaaaagctaattaagcagttattttcttaataattcttattatcatgtgttatattcgtcgtcaaaataatcttgtaatagacatgtattaagactttaagaggtataattttccatttttgattcaaaactcaaaattgattagttagaaatagatatatttaaacaaattttgattttactggaacatcaagtttttaatgtacacggtaaaatcggacccaaaactacaacaaaatactattgtacgtccgtggcattagagttgagatcacctaaccgtgccactagcttgggtttcataattgacataattgtgtacattaaaatataagtattatttaatcacattaagaaatatgcacagaaactttttatcataattatatgtatgtacatgcattagtgcatatatacatacacaaatgagtgtataaaagcttgaacccatcgaacaagcttcatcacaaaaacccaaaacctttgatatttgtctaattttacaaagatgggtttcaaactcatctctctcctccttctttttcttccacttctaacagtcacaatcttgtcgggagtcgagcaggcctttgcttccgacaaggcactcctcgtgaccggccgcaacatcacggctgacggtggaaggtcgtcactgagagggaagaagcagaggagagcatcaggatgtaacttgttccaaggccgatgggtgttcgatgcttcttaccctttctatgactcgtccaagtgtcctttcatcgacggcgagtttgactgtctcaagttcggccgaccagacaaacagttcctcaagtactcttggcaacctgaatcttgcaccatcccaaggttttttcaacttttttttttttcaacttaatttacttaaaacttcactctttacataattcaaaatgttttgtttaactaaaacaatcactttagttaacaagaattttggttggagaatatttcgagatctcatgatctttgcatgagttagcacaattattactattttaaaatatattttttcatatatatatatatatatatatacagtatatattgtataataactagaagttggtgatgatatgtttttcatgcactttgttttaaagaaacgtggattgtagagcatttcatttatattatttttacaaatgaaatggaggggtttaaatcagtatattaatatcaaaagtgattaagtggattattatgtgatatcaagaatagtaaaaaaaaggagaagataccatcaagttgtatttaaattaaataatagtatatgcaaatgcaataatgcatgatgatggattgttaattacgtaattaggttcgacggtggggcatttctgaggaaatacagaggaaaacgagtcatgttcgtcggagactcactgagtttaaacatgtgggaatcgttggcctgtatgatccatgcgtcggtaccaaacgccaagaccacttttctcaagcgtaccccactctctactctcactttccaggtctctctttcttttttttcttaaaaatatttttataaaatctgtgttgctctttggataaaaacaaaaatctaattatcaatcttcacgaggattagttgtcatcaacgaaaactgaattggctgtcattaatattgaagaatggtcgtattattagtcacggactataaaatttattggtcatttagaaaaagaattgaaaaaagctgtttggttggtgctaataatgcttattaacatatggttgttgttagtgttcgatcacatccacttgcttgatatcttttgaaaaagagtaagctattattattgaaaagacttatttgattcttcatctacatataccggaagtattattaagtatagaagattcgatagaaacatataaaatttccttatttcgtgccatttttctttttgttttcttcactcgaaagctattgtcatctttaccataattgtgcaaagttgtttatcatacatcaattacgaaactgaaaacattatgaaatgacttgtctacttcacttgatatgtaagaaaagctatggacctccaaactctttttctttttatttatttataaatcaaaatatataaatcctacagtaattgagattctatttaccactatgagattctgtctctttttaaattcatggaattagttttaataattaaaaaatgttctaccagaaataacaataaaaacaaatgaatacgtaaaggaagtacactaacaactccaacagtccaacttgttatctcttgttccctctgcctactttttactactattctcattgttctatgacactttttctttcatttaattattctcttccttgaatattcttataaaatcttgaatctgatgttatgaaaaaacaggaatatggagtaacgttatatctatatagaacaccatacatagtagatatatccaaagagagagttgggcgtgtgcttaaccttggagctattgaaggaggtgctgatgcttggaaaaacatggacgttcttgtcttcaactcttggcattggtggactcacaaaggccaatctcaagggtccgtaccattaatataaacaatatatacccaaaatatatcactcataacttaaatttttgaatttaggtgggattatattagagatgggtcgtctttggtgagagacatgaaccgtcttgacgctttctacaaaggactcagtacttgggctcgatgggttgatcaaaacgtcgatacggccaaaactcgagttttcttccaaggcatttctcccactcattacgagtaagtccatttccgtttcgattgtttcaaacacagacaaacaattgagaactaattacgtcattcaaacacaaacctatatcgactaatgtcttcctttcgggtaacaggggaagggaatggaacgagccgaggaagacttgtagtgggcaaatgcagccgttgggtggatcaagttacccaagtggtcagcctccatcctcaggagtagtgtcgaaagtgttgagttcgatgaaaaagccagtgaccttgctcgatatcacaactttgtctcagttgagaaaagatgctcatccttcttcttatggtggcgatggaggaacagattgcagccattggtgcctcccagggttgcctgatacatggaaccaacttctctacgcagctcttacgatgtgaagtgttaagatactaaaaagaaagtgcataacacctttattctgtaaatgacattcgtaaatcttctagtgttgtgtgatgctatagaaaacagatttataacaaaagagacattctcagtataaaataacacattggtttggtaactctttgcttaacttgatttaagagcaaaagctgttctgtatcacctatgaaacaagcattttgacacactcataaacaacaatttctctgatttgatattcaaattgtactaataacaacaccatttacaatcccatattcgtctactatcacagaaaatttgaccttgaagaaccctagataaaacacaaaaagccaacatgaagaaccaaaaatcatgaaaatttcaagtgaaatcaccttaaaatttgaatcccttttgcaagaggatttgcacacagctcatcttctcaatctctttgtcttcttcttcctctgtgtttctcgaattcataactatggctttcacaacttcccttaaaggaatcttaagtttctttcctccaccttccttcttcgctgcagattccagaggaacatcactctgcttctccgccgaaacctcaaccgtcggatctgcaacatcttcctctaaatcaacggtgtccacgctttcctccggagtgacgcatcgaatcgcctgactctccaccgcatcgttacccgagccgattacactatccttatccgtatccgaatcaccggatgaacgctgatatggaattccgtcgtttaacggtggcggtgagactccgacggagggatcggaatctggaggtggttgacctggtacggcaaaaccgcatcgctgtagataaatctcctgagacgcagatacattgcaatcttcgaaaatcgaaccaatgtttttctttttccctttcattttcctctgcattttttttttttgtttcacatgtatgttttgcttatgcttaagagctatttctaggtttaaggagggaaaactttcccgcggactttagagatttgaggcaaacgtgattatttctagaccgcaccaaacgctgcacgcctacaaaccaaaatggttctgaaatcaaaatatacaactaaaagtgactgcatttgtttttgtttttctcttctatcgacgagggtgacattgttaaacccggcgtcgagtcgaccatacaagaacgatagactagtaaccgacatagactgcgacattcactatgtagcaatcttcatttgtatcacccatttcttcgactagaacaccgcttgagcaaatcagtcctccatccaccacctctacattcacaatcttcccacttcaaacaaaaaaggaacgaatgattgtgaaaacatggtagataaagctgactcaagagatgttgtccaagactaagtaacaaaatgagagatgttttcccacaaacactatacatgatcaaataagtaaacggtaatggttgtttctttctactttttcacaacaccaatcttaatccaacttcaaaacaacttatatctagtaccaagccaaatttaaactctatgatagaggttacttgaggaacttactatgggaagatagacttaaccttgtccaaatccagctgctggtgaagagaatgaggcactccaagcttaatctgcaacttcatttctccaaatgaaactccaggaatcgaaccttcaccaacacattcaacgccactaagtatcaagttaaaagttcgaaattgctagataattacttgcattgttgagccaagatgatgatattcaatttggtacccctcctaaaagcaggaatcgaattcgaagaaattgcattcttacaagccttcatcgccgcagatgtcacatcttgcctgtttcaattttttcaacattttcaagattcgatctcaattctcacatcggtatgatcgatgaagacgcaaattttgagagtaagaaaactaaagatctgacgtacccgtgctgatcgtaaccgacacccatctcaacgaacaataacttcatcgtgttgttgggaacaccgccggtaattgtctccgccgtcgtctccatggcgcttctcgcgatgactttgatcggacgtgagatctgaggaaaatggtcgagagagaactgcttactacgggaagagagaaattttggccgcgaagaagagattgttaaacacgacggagattgacggagacgaagctcagcgcagatatgaatcgaaccagaaatcaacgaaagagacattgaactagtgtttgattggttcgctctataataaatttttgggacaaagttgagagaaatgataaataagggtgttgttttcaaaactcaaatttgacacaaaacgacaatgtttaaagtcagggcataaaggttgctctttctccttcgataaacccagaaacccttggagtcttggactgctctgcgagagaacatatcaaccttctacactcttccaaaatcgccatgtacggtctcatcttctttttctccttctttcacttcttcgtctttctcccgaagtttttttcattattgtgtacagagacgtgaatacatgtgtatagattctgtttcctgcaacctaaactgtgtatattagtataaatactcattttcttagattttctccgtctcagctttatctaaagctccccgaaatgtcagaacagtattccgaagatgctaaacatatcgagaagctttatgagttcgacgagcgcttgagcgagtccacggacaagtctcaggttcgtctctatttcacctagggtttcgtttttgtcctggatttgaaattaggcattctctgtttgatttagctgttgattgtgttcccgaatcgtctctttggtctcttatgcttcgaatttgtgtataatcggtctgaaaatggatactggcgattaagttttggctcttcctaggcttgcttggtttgtttcttgtgtttgacagtgttttctatgatattctcatggtttgcagaatgttcaagactatgaagggattattgagttgtctaagacgaacatcaagacaaagcagcttggagctcaactgattccacgctacttcaagttcttcacaagtctcgcaacagaagcttttgatgcgtacttggatatattcgacgaagttgaagtcggggtatgtaactagtcttcttactcatacgatttatccagaagcaaaagtgtgctagtgtattatagatgaccttcgttttgtttgtaaggctcaaacttggtgtcacgtttcatttgcttcttatttgtaggtacgagttcaagccatccgcgggcttccattgttctgcaaggatactcctgattttatatctaagataattgatgttcttgtacaatgtctaaatactggtaattctgtttttttttatcatttaaccttgatctgaatactttgttttcaccatttgactatgaaatttgatccaaatagaggaatttgtggagcgtgatgctgtgcacaaggctcttatgtcattatttcggcaagatactaagggtaattcaatttcttctgcattcatcttcattgtctgaagatgacaattcatcttacagccgcaatgctactttgagaaaattagttaaattggtctttcagtcttatggtagatagtttgctatctgtactgttactcagtccatcttataaagcataaaaataagtgtagaaattacagactacaggttgtggcgtgctctaaatctaagatatattagtatgttgttagtgacagtaattttagtttttaaactgttcttatgttcaatattttcgtctttttttgtgtagcatctttgactgcattgtttaagcacactgaggccactcttagtactgatgagcaaatccgtgaaaaggtcttacactttattagagataaggtcagagtcctttctacattttttaatcttttttttgaggttctgctatatcttagcttgacttgacttaaatgaaatttatactctcatgttagacctatatgatcttttgattcttttcgccaaatcaacttgagtaggtactgccatactggtgctgatagctagcgtatatttagtggagtcattcttattttggaatttggaaagtttgtttatcaccgaaaaatatttcttatagaacaatatgtaaaatgaaaattttctgataatgcaagttaatggtatgctaggaattccttggaaaggttttgtatatcttatcctattttaattgattttgtatttccatgtaggtgttccctcttaaaggggaactgttaaagcctcaacaggaaatggaaagacatataaccgatttaatcaaaaaggttagaacatatctttggctgcatggagtttttctttgtacctatttatctggatttgtttttagcccttttatgatgttaacagagcctaggggatgtaactggagaagagttcaatatgtttatggatttcctgaaaagtttgagtatatttggagggaaagctcctcaagaaagaatgcaagaacttgtagaaattattgaaggacaggctgatttggattcagagtttaatgtgagtttctcggtcacattcttttgggcatgaacttaatttcttactttaatacaatggcagtaaaatgatttcattcctcgtagatgtttattgatttttaaatcacccaagtggtcgtcgttatctcggaatgaagtatgctagttttttgggtgtttgtgagattaaaaggatacttctcctggcacaggctttcaccctctcaacaaaaagcttataaaggatagataatctttagatctgcgattcttgcatgtgttgatctctgttgtttaccttgcgtattttttgttgtgaacttgtgatatctcattggtagtatgtgagaaagttgcctctaaattttcatgaagtcaggattttttccgaagtccagtatactgtccactgcccagtctaggattgaacatagggaaggggttaacagttttcttgatgcaaatccataggaagtgagtcataaaatttgataacatctgttttagtcaccatgggaatatctactaaggttttacattagtaaataaaattaatcttattatggtgattgtaaaggttgaaatttaaaattctgaaggtttcattttgatgattcaaaattatgccacaactactgatgttcaaatattattttcccaggtttcagatacagatcatattgacaggtttatatcatgcctgcaaacggcccttccattctttgcagtatggaatcatagctattactgcatagcacttggatatttcaaagttgagatgttttgaatcatatatatatactaatttcgtcctcttctgaacagagaggtgctccaggtagcaagtttcttaactacttgaacaagaatatcatgcctgcttttgaccaggtatattgtaactttctcaccttttcgtttaggtgtttgaccgtagttttgtatgtgcatgatctctttgtattcccttgggcatattaagaatagactagttaatggtatcgagggcatgaagtcacatctgaattactgaacgtggagcaactctttttgttcatacatgatattgccacttgtctgtcttgttgtttcattttggtaaaatctatattactccatgggtgagcataatattttgccaaatccacttttactagctgccagaggagaggaagcttaatttactcagagctcttgctgagatgtccccatacacaacagctcaggtagcacgtcagatacttccatcaatagttcagctcttaaaggtacctcttacgaaccaaattctcatcttgtcttcatatcttatattaagaatttatggacatacatattatttactgttatcatttctctggtgtatattcttattttgaacgtaaacactgtaactgttacgatttgctctcagaagtacatgcctgctaggaaaactggggaagaaatgaacttcacatatgtcgagtgcctgttatacgtgctacatcatttggcgcacaaggttgtctaactatttttagttgcttggcaaggtctcttattcttccttattacttatctatttctgttgaacatataggctccaaatgcaacaaacagcttgtgcggctacaagatagtgactgggcagccatcagatagactcggggaggacttctcagagttcaacaaggaattcactgagaggtactgtgaataaacagtagtagaatgagattcagttttcttcttgtaagacataaattttggtaaactgttttgaaaatattgttctgatgaaaatggacgttgcagattgaccagtgttgaggatctaacgaaggcaacaatgaaaaaacttactcaaggaatgtctgagcacagcaaagccatgtcgactgctaagacagatgaagagaagtcaatcgtggtaagaactttaagttctcactccttctgtatccatttcatctcatctttctttgctggtttaatattaccaaagctgctttcagaaaacgaagaagcagagtacaacaactggactcaggacctgcaataacatattggcaatgacaaaggtgaaaaacagagccatattttcttacctctttatgtcccttgctttctaggtaacttgtatatatctgtttaataaatcaagggtgttagccaatatgactgtttggtatgttacagggattgcatgcaaaagcgccttcatttatcggaaacaccagtgttactctttcttggaaagaacccacgaaagtgacgaaaccgttagcctctacaacgactgggtacaagccaaatcaactttgttagttttgcaggtttcttttcttgttttgcaaatgtggaaaaactaatgtttgtacgtttcatgtggctctaccacagaggaaaacggcctgcaaatggagccggtaataacgtgggtgcaaaaaaggctcgtgtgcagaatcaacaacaggttgtgaacaaaagatctgagggaatctcacacggtggtggtagaggcagtcacagaggccgaggccggggccaaggtcagggaagacacagtggtggtggtggcggccgtggccgtggaagaagaggcttctggtaatttcaaaggattctccatgacactcttttttgtctgttcttgtataacagagtatgtttatccttcttgttttggctcttttaggctcctaacattcgacaaacaaattaatctcttttgcgatttctttggcttctcctttatatgacaaattctttgttttcttttctctttaactaccctttctgggaagtcaactgtcctaaactcataatgcaatagtcagaaatgattaatgccaaagtaacagtaaaaaatattaatttataaataaccccttcaaccttctctgtatttatcaacttaatgtcactccatgttatatattcgacaatgtaactctgtgtttcaacgcccatgcatccttccaatggcacaacttgttctgtccctgacttctctctttctagcctctaatctttaaatgatctcatgaaactggtgtgtaacttcctacagaatccaacgaagccaagcccagagctattaaagagacttggtgagtacgtaacatgatggtgattctgttttgtggtttctgcagatatatgaccttcttcggattatttttcaatctgcagaagcaagtgtggaaacagatcatgcttctcacattaattcctttcctcattgtgaaactttcagagctattcgattcacgatcttggagacactattgttctaatgacgctgatggctgatagtttccacttctgcaactcttttgcttttggctctttcggtatacatatgtacataactttatagctttactgaattaagttcaagattttgtgtctaatctttgacatattatgaatctctgaagcttttggatacgagtggactaaagaatagcttggataagcgaggatttagctcatgtccgaagtgaaaaagaaactgcagagagatattcgcttgaacgcattctgcaagatggacaactcactagggaaagcttgaaaaagtaaaccactgatcgattgttttgctctggttcttgctttggtttttaatagaaaactaactgactttttacaggctaagggaatcacttgcgctgtaagtttttaaaagaagaacattctttctgttccattgctcttactggttctcggtttttaactttcaagagactaaaaactgctgtgtaggcggcagctgttgctccgagtctgaaggtgggaaagcagaacaaaagtgttggttagaaacataaataacgctttgtctagaaacctaaagaacgctttgtctcttcacttctgtgccaaaaaaagaaaagcaagaaacagcatctctcacattttcacaggtacacataatcattgattcaatcttggttctttagattttttctttctttctttcttgttgctgaatcttgaagttttcgggttcagatctacagggatgttacattcaacaatttgatggggatgtcgagaatcttagtgatagtgtacgccaaaagattgacatggaattgttcaacagagaaaatcttgattttgtttccctgcttcttcctttgtatcatatcccttcaatcattgtctttactacatttcaatgtctcacattgtaaaaggaaaaatgtacagagaagataaaatcttttgacatcgatacatagttatctttctatgcaagtaactctggtacagtccttgttctactaaacaagtatacaagttgtattttctagttccataactctgataaaacaaaattggccttggtgtctacattgacgtttaaagttgtataatgaacattattgatacacatattaaactagaaaattagaagtttgttcaaacgattttaaaagtcaatataatagtcaccaaccaatcatagatgcataattaaagaggtgtcaattcacgttcttctaaaatccagcctcagcttcatcaattttataattttaccaacctcaacaagtatttatttattctaatatatgataataaacctcgagggatattatgataaaactatataataatcaccggcttataataattagaaaggtggaccatttccgttttttaaaatcagactcaataaatgtgaaagtccagtgtttcaatattttaacctcagtttcatcaattttatataccttattgtctttcattattcttttacgtaaaacccttccaaaaatcatgttacattgcttaatttatgtgtgtgtgtgtcagtgtattgcttaatttatgtgtgtgtcagtgtatataaatatatgcagcgtaagaagagaaggatcagaccaaaactattgacttaaaacactgtttcaagtttacttccatggcacgtcttactctgtttctgtcttttctttctctagctttagtctctgttgtaaactgtcgtgttttaagttctgtgtctgaagataacaactcctccatcttggtctccgatggagtccaagacagatccagcaacgactttctcagtcttaatccgccaaatctttccgagagtgcttgtgttcatgtctacgggtttcttccatgtgcagacaatattgaaggatatgtcttccaagttttctcctttggttgtctattgataatcggtgaatactttttgtctaaaggaaggtctaagctctttgtcatcttcgaggtcggtttctttggcggaattatcttccctctacttacaatgttcccaagaattgcccttattctatgtaagtcatctcttcttttggagaaataacctagacagaatttgagtactacaaaatatcttaccattacgttgggttttgatctcagccactggactgataggaagccgtgaaatagcaaactcgatgacgggtaataatgttgcagttactgttggatactctgtctttgctttgacaatgcaatggggagcttgtgttgtctttggcttgtctggtttgagatcagatgatcagtccataacttgtgtaagatcttcttgtccttcttctctttttgagtgtatagaatcatcaagtgatttttataatttgatacaggacataagtagtccaagaagacaagttaagaagagcattaatctattgaagaacctagctggtatttttaaatcttacaggtttcttgatttttcgagaatcttctacgcgagactaatttgtcttttgtgccgtttctctatgcaggagctagcattagagcagatcctaagaacaagaaagcggcagggattatgctcctgactttattgcctttcgtcttagtcacattttcagagacatttcacataaaatcttgggatgacaatatggttttggtcacactcatattctctggttctgcaactgttctctactttgtttatttggtaatgattcacaccttcaaaaaaatgatgtaaagcttcaagattcatatctttttgtgcctaatcttttttttttcaaaacccgcagtattttgataaagcggaccaagtgaagagcctagaatacgcgaagtttgagctcatgtcagaagttcataagcacttgcagaatttttcgcctcaaagccttataagaaatggacaactatgtcaagagagcttgaaaaggtttgtttctacattttttcctttgttattctaattttaagaaacgctctttttatttgattctgtttctgtattcttactggttatttttattcagtttgttcaaaaagtttgatgtcaacaaagacggaaagatccaagtatcagagttaaaagatctgacagtggactttggggtattagggagagtgaagtgtgatataaatgagcttgccactactttgcttgctgatttcgacagtaatagagatggtgagatagatgagactgaattcgccattggtatcgaaaaatggctgaaacagtacaaatttagcttcaatggcaccgagtcacaaggagaggacatagccgtaagtgcagcacaatcttctcataacattttttacatgtttgatcagattaagaaattgggaagtgttaactgcaggaggatgatggagttttgaaggtggaacaattactaaagggatgtctttttactaagttgcttacaaagagaaccttgaaagctgtcattgaagtcattatagggattactattgtcagctttcttgcaatgcctttcatgatgaatatcgaacttttgtcggtatcagctggagtgccttccttctatgttgtctttgcagtgatccctttggcaagaaacctaaagaacgctttgtctgctcacttctgtcgcaagaaagagaaagcaaaaattacatctgacacattttctgaggttagttttcttgaaactcacgtttattaactcggtatcaatattacccttatgatctttatcagagctcaaaggtgaatgagttttgtggttcttttcttttgtagatttatagagatgttacattgaacaatctgctggggataacaattatattggcgattgtgtacatcagaggattgacttgggattattcaacagaagttctcattattgtgatcgttggtctcataataggtgtaccggcctatgtgagatcgacttatccattttggatatgtgtcttggcctttgctctctacttcttctctcttatcctaatctatctccattccaagtctacctttaatgaataatcagtgaatatttccaaattgtttttttttttgctttcaagatttcatagttactattccgatttcgatacgctatgtattttgaaagttccgtcgacgttttatgtatatgagctctttgatgattgttaagcatccggagctagataagaattttaaatctttgatgttatgaatatctatgaaagtttgcagaaattgtgaaaatggacgttcaatgttgacactaagtaaggaaactactatacaagtttgcattctcacttggagacatttcaacgttttcagataatacttttctcaaaatcactattcagaaatgaatgttgaattcatatctgttagctataccaaaagaatatgaatccaaaaaaaatcaagttctaccatataattgacacacatgtgttgaactagttgattctgtatttctttattttttccaacaaatgcatttttgtttttatcagcgaaagaatgtgaagtacagtaaaacctctataatcttatgatcgtgaaattttattaatttatcgataaattagtatttattaatttatagagatatttgactaattttgtaatatttcaagatttttctttgagaaacaaagttttttcattataatcaaatatcattttataaccaattacaagtaaaaaaaatcattattctgtttagaaaacatcataaaaagttttcgatgtagtaaaatattatagacgaattccaccaaaattaaatgtaatttttttaaaaaataaataatactagagaatagagtcctattaatttatgatattgatgataccatatatttacatagaattttcggaaaaactattatcttattattttattaaattacattaaattttacagtgatatgattcaagagtgaagaaatttaattaatttataaatgattattaaattatcaaagttttgtatttagatttttactgtagatcatcaatcgtcaaacattccatgcctaaaaattaattttccaaatattttcacgaaatgttaatggtagacatcacatcgggtgcttatgtaaacaaagtcctccccattggctctatgagcctttctaataatataagttgttgacaaaaaaagaatgacatcggctgcttttcacgcaagtaagggcattgaatacgcgttgtggtctattgtgcaactgtattttgacgtcagttcctatctaatatttggggttaaggtgatgtactggagattccacacctttaaactaagcacactagttcttatttaaaccaaaattcaaaagtcaatagtccttaacaaatctatctatattctaccccactgacccggccaatcataattagagaggtgtaactcacgttctaacatttaacaataattcagaaaacaaagtctttctttatttactaagagctagtcgtaataacttgttcaactctagaaagtctttcttaattctattacgtaaaaactaaacagtaagaaattgctatagtaagattatgtttctgttggtttctgtgtatatatatatatgttggagtcagaagagacaaatacaacaaaagtgctcattataaacactgtttcgagtttacttccatggcacgtctttctctgtttctgtcttttctctctttgatagctttgatctctgttgtgaactgtcgtgttttaagttctttatctgagaaagactcaatcttggtctccgatggagttcaagacgggtccagctacgagtttctgagtcttgatccgccaaatgacattaccaagaatatgtgcgtacatgtctacgattttcttccatgtgcagacaatgttgcaggatatgtcttccaagttttctcgtttggttgcatcttgatcatcggtgaatacttcttgactaaaggaaggactaagctctttctcatattcgaggtcggtttttatggcggaatcatctttcctctccttactatgttcccacgaatcgcgcttattctctgtaagaagtctcttcttttggtttttgaatctatatatgttgttgtattaagaatgtgagattataagctctattctggatttgttctcagcgactggactggtgggaagccgcgaaatggcaagctcgagggttggtaatatcattggagttactgtgggatactctgtctttgctttgacaatacaatggggagcttgtattctctttggcttgtctggtactaaaccagaacagcccatagatttatctggtactaaaccagaacagcccacagaatcatctggagaaaattcagtaagttttcttcttcttctttgagtttatgaattatgaagtgatttcgattataatttgatacaggacgtaaagtgtccaagaatacaattttactggaaaaaactatcagattacgttttcggtatgtttagaactcttacagatttctgtttctttggagaatgttaattatgtgctcgagcctaatttgtatctttgttgttgttgtgtgcttattatggagcagctagtgtagaagcagatataacgaacaagaaatcggcagggattatgctcttgactatactacctttcatattggtcacattttcagagatatctagttcacaatattggaatgacataatcgttttgatcacactcataatctctgcttctgcaacttttgcctactttttttattcggtatgagtctccccaaagattattcatatctttttttgtttgtagtaatcttgaaggttttctttgtgaaaaactcgcagtattttgatagagacgaccaagcgaagagtttagatcacgcgaggtttgagctcatgtcagaagttcataagcatttacagattttttcacccaaaagccttataagagatggacaactaaatcaagagagcttgaaaaggtttgaaataatccattttattgcaaattaagcactaattgttctgtttagttatgtgttcttgattactgttattatatattatacagattgtttcaaaaaatcgatgcaaacggagatggaaagatccaagttgcagagttgaaagatcttacggtggagtttgggatgatagggagagtcaagtgtcacatagataagcttgtccatacattggttgatgatttcgacagggatggagatcgtgagatcgatgaggctgaattcgagattgggatcaaaaaatggctgaatcagtacaaattcagcttcgataccaccgtgccaccaagagaggaccaagctgtaagtgcataacaatcttctcaattcattttttcttacatgtttgatcagattaataaatatcaaaaacatgttgattaattgcaggagggagtaccaattctgaaggtagaaaagccagagcagagtcttgttaagaagctgctctcatggagaaccttgagagcttcccttgaagtcattttagggatgctagttgtcatctatcttgcaagacctttcatgatgaacatccaacttttgtcggaatcagctggagttccttctttctatgttgtctttgtagtcattcctttggcaagaaacctaaagaacaccttgtcagctcacttctgtcgcaagaaagacaaagcgaaaatcacatctgacacattttctgaggttagttaggtttcttgaaactccattaaatcggtattgatgatactcaaaaaactaaattcttttttcttaaaattcttttcttcttatgtagatctacaaggatgttacaatgaacaatctcatgggaatttcaattatattggcaattgtgtacgcaagagaactagtttgggattacacaacagaagttctcattatagtgatcgttggtctcttaataggcttaccggcttatgtgagaacgacttatccattttggatatgtctcttggcctttgctctctacttcatctctcttgtcgtagtgtatttccatttcatgtctctcgaaaagggcacaactgtcacctttaacaaataatcagtgaaactgtccaagagttttttttcctttttttttctcaagatttcctagtttttcccatatcgatccactatgtattttcatatatttcgtctgtggtgtatgttttacaagctgtttggtccataaatatagctctaaagtctcaatctttgaggttatgaattatctcttaaagtttgcagatattgtgcaaatgcttgacaacttaactcttgacactaattacgaaatctaaaaaaagaacatagagatatttcttcaaaattgctattttgctgctcttagaaatccacagtgcgctgcagccatatgcgatctgtctgatagtgaaaagaaaacacgtcaagcttcaaacttgatttccatataattcaatgaaatgctaatagtacacatcgattgctttgcatgcaagtaatggttttgatcatccgttttcgccctttttgtgcaactttgttttgaccaaaagtgagattgattcctcttattggcattaataaggtgatgtagtggagatttcacggcattaactaaaaacactagtaattacttaaaacaagttcaaaagtcaataggtttaaacaaatcataattagagaggtgtaactctaaaacaagttcaaaagtcaataggtttaaacaaatcataattagagaggtgtaactctaaaacaagttcaaaagtcaataggtttcaacaaatcataattagagaggtgtaactcacgttctgaagttttaacaataattgtcgaaaacatagactttctttaaatattgatcttttttatttgtcatatttcttgcaaaacctttcatgatgatccatcgagtttgtcagtatcagctggagtgccttccttttatgtcgtgtttgtagtgatcccaatggttagaaacttaaataatgctttgtctgccccctttctggcaagaaagacaaggccagaaacacatatgatacattctctgaggttagttttatttaagcccaatttcaatttttttctttaggtaaaagggcccattttttgtttgttttaaaatttattaagaggtttttatagtttttggttttgctaaggggctttcaatacctcgacttaccctttttggatatgtctctcttccccttatctatctgactatcttcatttctcaagtctctagatatgaaatgagaaactcaatgaaacccttatcaatattctacaagtttcaatacgttttcatatgttactttatgatcttggtgtaaaacattattgtaacataatgtttgtatttttgaagttaagttttgtctccatttatacagtcttttgattattaatcttaaaggcgaaatagccatgattaagtatgtttctttcactcgcattatggttttggttttttataagaaacgaagaaaatccaagtctttggcatatcttttgttacatatttatccaaaactacaaactcatggtgtaaagattcgaagttttgaaaactgcttagaacaaaacttattataacttaaggcgaagatcaatgccatgatcagggactgtgtcatatctctcggttctcaagctgaatgatcgatcttggtcgcgaataatctggtcattcgcgggtaagaagctgtagaatggttttttgtttaaaggaaaatttgtaccgctctttcgttgtataatttcatgatcatcctcttctttctgtccatactaaaaagattaggaggatgaaaatggatttgatctgatagaaacataaagaaacttcaatacctgtaaaaagcgcgggaaaccgagtgacggatttgcaaatatcgttgtaggaggactggctgaagaaggagaatcaatagtgattggatttcttattgtggttcctgaatcttggacatgatttttcaatcttaggtctagtgatctggtttgtttagcatctctgaaccaattccaaaataaaaaaatgtcaaacaaagaaactatgatcttagattttctatacatatatataactcaagaaacttaaccctaaaaacaaaccttgagatagttgtgctcggtccaacactacatttcgcggtatctgccataaaatgccatggccttttcgcagacgagatctatcaaagaataatcaaaatagattattaagaattaaactcaaattgattactttgattttgtttcaaaaggaataaactcaaaacattaccttttcttcatctagaaatttagtgacattgtcaagagaagatgtttggcttgaaggaggctctataaactgataaaatcctccagatccttgttttggtagattcatctataaacaacaaacataaacacaaatcagtctcacaaaaaaaatatgtaatttatcaatctttgaatatgttttttttttgtgtatataccggagggaggtagtgaagagacgaatcatgtttcctctgaaacactggagccggaggaatcaaatcactagggaaagatccggcagagaaataagacgaaaacgggtaaactagaccggttctgtcagtgatggttggagacttctccagggaaggaggatgatgaagagtaaatggtgcggccgtagagatgtgttgttctccgagacggatcttctcgagttcagcaacaccaggtcctctacgtgggactcttttttttcctccattattatgtttctgtttcttcggacacaaggacgagtaattatcatcatcttctctgtttccataacttacactactcgtcttactacacattgtgatgtgttctctctattacttaagtgtgttttttttgtctcttggtgtctagtttatgaatatacaaaagagaaatgattgagagcaatttataatggtgaaggaaaaaaaggtggtggagaaaaatatgttgcaaaaggagaaagaaataaaagtcattaaaaataggagagattaaaggaaagtaaatctgagacaaaatcggctcttctggcgtagtgctaaaaaaagttctgagattttaggaattttcaaactccatgtttttagctttctaaagatctctatcatttttttttaatgatttaaattttaaaccacctggagagagatatcatgaatccacatttatttccgtgattttttctttgaaaagttgtgcttaaaacaaaaatgttgtgtgcttttcttcaattctattggaggaaataaaaatataatttagatattttaattttgcttttatttcaagaaagaacttagaaattacttgataaccccaatttttttgttttgctgtaacaatatatttattacattattggtaaggcatatatgatttgtcattgttgtactcatcacttgtaatagtataattaagaaaaatattcttaccaaaggaaaatagatttcatatttatttatttattgttaataataaaagattactatctttcggtcttcttagttttactaatccacttgttgtccacggttgtgatttgtgaattggctggatggggtaaaattattttggttccctttatttggaataatatctaatttaaaaaacaaaaaaaagaaacacaaaaatttggtcaaacgtaagaacttaagaaaagtaattatgtaatttctatgtttaaaaggttgaaggaaaaatgcagcgaacagatagatgttgaatttgtacaaatagaaaagaaaaactaaatatgggaagtagacaaactagaaaagttttcatgtggattacaaacgaggaataaaagatagaaacaaatcttccaacttgttaattagtacttatatatgtcatacaatattgaccaactttttgtttgtcttaagcaattaattatttcatcaaaattacgaaagaatatatatctacggggaagctaaaagattacacatcaatttagtcagtatttagtcttgggcgtatctactaagtaagatgaagaatataagacaaagatctttttaaattggagaaaatatataagaaaatatagcgcatttactcttagatatgggataatcagacaaaaatcacatctttaagttaatggactgtttccagcttttgtaaactcgaaatatatctttctttctataccttattttctgtaaatctatttgagctcgcataaaatcttcgtttcaattataattttaatgattcaaactaatttttttataccagttatagagtatataaattaatgtgttaaggatgttattgtaattacctttgccctcatctatcttgtgtatacattgctcatctaataaatcaattcactctacaacaaaaatttaaaataataattaaattttagaatgaattgctttattagatgagtaatgtacaagagagattagaaaaggctaaatacaaaattacgattaacacattaactatttatcctctatatcacgtaaaaaaccttctttttaatgaatgttcaatctattcacaaaaaaccggtattacatcaaatgcaactgatttttgagttgtttttaacatacgctactagatagagtttagaaattatctcctagtagaaagccaaaatatgaacaattatcgatgttttccccaaggcttgaagttgtttgaggttcttcaccatgtcttatattatttctctttctcaatatggtgtggactgtattttggaacatatactgcaatagtaattagtagagctttcatttcgattgttgcatccgttaggagtagagtgatttgatcccaaactgaggtgttacttttcttgacgtagcccttttactagctagcttctcacatacttgtcttgtgaacgagcattgaaagaagaggtggtgcttattgtcttgtctcaaccggttcctggaaaaatgtacaagtgtagtcattaaagtattacacttctccattcgttcacatgtagtcaatctgtcatccattgcaagccatgttatgaaagcgtagttaggtgcagtgcagaagatactaaaaagtaaaaacttcacatcaatgcttgtaatagatactaaaacttcacattttagtatatatatatatatatattgattcgatttatataaagtggtttatgtttcctgaacttaagaaaatccgaaactcgaaattgttaaaacaaaaaaaaaatccaaagttattggttaatacaatttaggcaaatatggaaaaaaatatcggtacaactgtaaaattagtcttatttaagaataatcattcaacattttattctaaaaagatatttgatatagcgttcattctaccgacaaaattactgtctgatgatacccggcataaaaaaataaattatagaaattaatgttacacttagaatataggaatatagaatatttcttattcacgatgatgtcaaaatatgtacatacataatttggataatattcctcttctacctatataaacattagggttttgagcaaaaaaaaccctcaaagtcgcccaattttgctactttaccctctacataaaaaaaaatgcaaaataattatatgaagtcaagaataatacgcagtatatccatttttataactttacatatattttaaacgttttcacgatcacatacattttattttaaaaattttaaagatatagttgaattcatcatctcgaaaggttcaatttgatatattatttatcaaattttaaaacttgacaataacggaaaagagctatattacttattgtcttagtatgattattttgcattttttatacgttaaaggtaaaattgcaaaaatatacgattttaaggtttgttttgcattaaaccttaaatattacctcattgattgcggctaaaggtaaaatgtttagaagaagaactatgatgtaaagtttcgaccaaatatctgagaggcatatgagcttggaccagcaatatatatatccgtattgttgtgtctttatatgcatcatctgcaaaattattaatccatattaataggtgattctttctaatacaatatcacctcatcatcatcatcatcatcatcattggtttaagtataactgatattgatagttatactgtataatttcatatgtagtgtatatatgaacaatattacaaacatatacaactcatgtaactagacaatgcgacaagcattagggttttcatcactgaacaattgtggagcgtatacgtagtggacaaagtaaggtatgtttccatctttatctttttggccctcaacttttactatctctttatactccacaacttgagtaatcgttttggttgttacttctacttttacttcttctttctttttttctccttccttcttcttattctcctcttctttcttcttctcttcctctttcttcttctcatcttccttcttcttcttatcctcttcttccttcttcttcttatcctcttcttccttcttcttctcttcttcggtctttgagcttatgatctctgcatgtttgtgaactttcttctttatataggctaagagttttgcggattctatcgtcccttgtaccgttagagtttgcgcctttgtatcggttttgacaatgtggatagctgccaaaataaccaagttagaatccaagccctgaactaatgagtcaaaataagattctgaaatttattgcgaattccccacttaattattttgaatatttctaacgactcaatcttacctttatgtttcaagagtttgtgctgaagatctttgtcacactgtgcgcaatgaatgtgtacctttagtactgtcgtacgaataacgtcctgtggatgattaaaagtaaactcacaaatgctttcacacacgtataggtacatatatatatggtatgcgattatggaagcaaaattttacctttttaatctcggtggtcttcttttctaccacagaagtagttgttgttgtagtggtggttttcttaacctcagaaggtttgggagagatgagctcaacttttttcttgctccatttctcgatttgtttgtgaatcttcacgacttctattttcccttttactttgatctcgttcttctccaaatcaaagtccacattttgaacccctacaatattgtattattctttaatcaaattaatgctactacatcactatatattaattctccacataatagttaaacaccgcgcttgtgaagaaatttattagaaaaaactctataggacatgcgggagaaaccaaatgtaaataactctcatgagatcaacagtagatcgacccatctctgaaactactttctatatgggaagacttgtaatatcttaaggccatcgtctagacaatgaagcctaaccttggaatcgaaggagaggctttttgatgtcgcatgcacatttccggcagtgaaggtgaaccttgtaaacggccgtgatgatttcatcgcctttctctttcttttcttcttcctctcccattttttttgttctacaactctaaattttagttttgactgatacgattattattatgttgtatagtttttctttggtctgtacaactgcacgtagaaaacgccaaggagaaaggaaattaggacttcaatataatcacgacaagaaacaatctgatatgatcatataaactaatgtaatgtaatttgaaaaatgacaaattgtttgacacgttaaataggtttggtttgagtttatagattcagttcatttacttggttactaaaaaaaaacattcatgggtgtgcggcgtgtgctgcacaaacggaaaaacttagaacagcaagatatatgttccaatgcatggcatggtatagggattcacgttctatatttaacgaagtacaaataaccacgtctataagctattttaaaccaccgatgcatatgtttatgagccacgaacaagaggactaagatatgtactttctcagaatttagatcactgtcatgcttaatatataacagaatacaagaaaaatctcaacggtcatggttttatatatgaaaaagtccatttgatcgtgccaacccttcaattacttggttgaattttgtaaaaggtggtttaccagttccaatgctatatattcgtattttagtttaaataagctagctaacaaattatatatgtgaaaatgattacctaagacacataactcatatatgatatttaaactgaactagagccacaagctccaaaaagaaaaaaaagaaaatccaactaattgaagtttgatcattgatgatccaaattccaaaccatttgaaaatggtcaattatttgtttcgtatgcaaaccttcaattttgaaagtatttatgataattaacaaatgaaagaaaacacaaaatcgtttacatcaaatttattacaatcgcaaagatttggatttgtagcttttaaagattgaaatccaagcgattttttttgtccacatgtttttacaaatcgcatacaataaattacatcgatgagtacacaaaacggtaaaattcttttcgcaaatttaaaataaaataaaaataaaatataagatacaaaaaacagtatcaacatctaaaaaatacggattttgtgattcaattacaaaaacgataaaaaatagtatataccaatacccacagctgcaataatacgtgtttactaaaaaaaataaaaaaaataaaaaaaaaataaaaaataaagccaataataaagcttttcacatgagcgaaagaaaagccaaaaaaaaaaaagtcacaaaaaaggagaaacacgtggacactcacacgaggaggtgtctgattttgtctaattaaatttgagttttttttttcttctttgaaatcatatgattgatctacacagaatccatttccgcaaatcggattcatgtttttgctttatcgtaggcttccttcatttgcacgaacaacaacaacaacccttctctgcaaatctatggagcctgcgataacagcgacttcttcttcttctttcggtggtggctcttctcgtctcgccgctttagcccagcaacttcgccaatacaagcccccaccttcttcatcgttcgatgactccgaggagatgcagacagatcaggagaccgctgggaaagtcgtttctcaggttgggtttcaggaatctattgctcctctttcgaaagaccctgataggtttaaacccaagagagccgctgtgttgatctgtctctttgaaggagatgatggtgatttgcgtgttattcttactaagagatcttccaaattgtctactcactctggttcgtatggtttgcgatttaaagttttcgtctttttactttgaaatcattggcttctttgattttggtcaatgagtatggtttagtgttgaatttgaggtggttgtttttttttgtggttgcaggagaagtttcattgccaggtggtaaagcggaggaggatgataaagatgatgggatgactgctaccagagaggctgaggaagagattggattggacccttctcttgttgatgttgttacttctcttgaaccatttctgtctaaggtattaataaatggtgttaattctccatgtcttattggtggtgatgcatgctcttagtgagatcagaatttgggattggcattaaagttgaggttatatagactatcttgttgatctgtgcttgaacatcgaggttatagtatgagttactagtggttctatagaactttggttattgaacttccatgtcagctgtattatatcatagtagcagagatctggtagctaaagtgacgttcttgatcgctatctagttttgattctggatgttcttaagtaggactaggtgttaattcggaagaataatgttatctggattatgtcaacatttctgatagatatttttcttacatgtgcgtcattgtcttacagcatcttcttagagtaattcctgtgataggcatcttgagggacaaaaataaattcaatccgataccaaatcctggggaagtggaagctgtgtttgatgcacccttggaaatgttccttaaggttgctcttgttttcttaccaagttactttagctgtagttgtgttttttcccttctcaagcatcattacttgaacctttttttttttgtttcaggatgagaatcgaagatctgaagagagagagtggatgggtgaaaagtatttgatccattactttgactacagaacaggagataaggattatatgatatggggtttaactgctgggattttgatcagagctgcatctgtgacttatgaaagaccacctgcttttatcgagcagtgcccgaagtttaagtaccctaaaatggtagaaaaacatacttgtatgccttaatgaacataatttttcgaatgatgctttcctagactagtcttcttccactatttgataacttgtaccagacaacaagacaataacattccatacaactgattctctgtaccagtgaatggctgaatgcagaacttggctacttgcttatatatatgcagacgcagtagctgaagctccaattcatttcctgctggggcatctcataacaggtttccatgactcttctgtttgtcattagataattggaggggcttctatttcattatgatctaggtcagtctgtattcttgaatttgatataattgtattgtaactttttctaggcttcatttctgagttgttcccacaggatgctcaatggtgattcagagaaaagttggcttgttatgattctaggcaaacatcaccctcaattgtgaatttggaggaatatttgtactcagtatttaccttcaaacgctcatttttcattgtatacttgttatcttctatttgtatactgaaccaatttcaaagcaaacttgtcttatgaggcttatgatttttattaatcgttgtagattcaagctgcagttacgttattatctctggactagattttttgtgtttcaatgataaattcagttaggttttcttattgctttgtagttaaccccaggaccaccatttcttcgtattgagacatttgttttcctgttattgcatggctttggttttatctagttctgctttggcagttttttatttgtgaatggcttcagttctgcattggcagttttttatttgtgaatggcttcagttctgcatgtatgaatttctggtgaatctatccaaacaagtgccactttagacttgttctagaggcaggaatttgcactggctacccattctaatggcaggaacttgatccttttcctaatgttgctacttattcatggagaatcccgcagtgtacaacaattgtaagtgtcctctatttgatagcttgtggatattgtttccttatttaagaaagctaactgaattgtggatcctttcaattgagttattttggtccttaagtcttaacagaatgtttcaagatttgaagttgatgtgcaagccttttccagttttccttttgatgtgtatacttttgcgttgcgtcaagcacttaataatggtacgttttatttttctttgcatatgcacttattaacgaaactttaaggcggttgtcattttttattttctcttgctgaaatggaagggggacttgtggtccatagttgttgaagaagatatgtgaataatctataactaaatcaatattagttacctgagcaattttcagatgtttgacaaaaagtcaaaggggcattgcgagaatcgaactcgggacctctcgcacccaaagcgagaatcataccactagaccaaatgccctgttattgatttagcaagcaatgtgttgttgagaattc

SEQ ID NO: 998 - DNA, 127462 bp, Arabidopsis thaliana
gaattcaattttctaattccacaacgaaaactcatcacatcaaaaaaaatttcattccaattttatcaccatgtatatacgaaatcaaacatatatgctggttttggaaagttagtacgaaaaaggtatcatctaacgtaagtgaattatgctggttgtattaatcttttatcaaatttattatttacgttttttttcatgttactttttggagccataaatatatgtggatttcaaagtggaaaatgcgttgttactcgaatgtttcaaaggtaaattatgcttttaacaaaatagattttttttttaaaaggggaaacaaaatgaatctttccagtgactttgagcaaagacaggtttttttcttcttctaattgccctacaaaatctgttcaaagactactaatcactcactccactcatataaatatgatattagcaaaaacgagttaatttaaatagtatacatgcataattgacaaaaaccattaacattgctgaattcttcttcttcttaaattttgttctatcgtctttatatattctttgcccatatgtaaatataataaacaagtagtcgttggttaaactccgttaaatattcagatattgtctaatattttttggaactattaagtcttaatgaaaacagtgtataatatttcgacaaacaataaaatccattaaaaaaaaaactctataaatgattgtttacattttttttgtatatataaatgctgtagaagagtccatgtatttaggattacatgtctataaaatcggatttctattatttttaccgctgcacgacaaaagtaaaattaagtgcataaataaaaattaagtgaaaagtccaactctccaaatccgtctctaaataaaaatcttgagaaaggtccatgcatcatgttaaagaataaaacatgtctaaattataaatgaaatctagttttatccggtttggtttgattgaattgatgtgtttattattctctctatctcatatcaattgatgtttaaggttgttacacataaactatttttttttgtttttaaaattaaaacatcatttataatttattttaaaacattttaactagtagaaaaacaatctaccaaatgcaaatgatcaattttttggaaatgcaaatgatcaattttttggaaatgcaaatgatcaatctaccaaatgcaaatgatcaatgtaagttccttcttcttcttttcatctaatatcatcaaatacttaaaaacctattaaaactcaagtaatataaaaatatacaattaaacacatctccctgaagtccaattagtgtcagtaaaaaactttcaaagttagttgttttgcttatagacccattaaacaactttctgtttctatttgggggtataaaacaagtttaagtgtaagccctagtaaaaaggaagatccaccaaaaatggaggaaccaaagaacaagcccttgcctttggggttgaatattatcttacttcccaaaatctgaaatttatttggtcacatttcttgatcttttgatgagataactacatctactacaaagaagtttccttttgtgtgtttctcaaagttagacataagaaaacgtgtagatcaagcaagtgactatgagtcacaaagtctccaaaaagttagacgaggagcaaatcaatgagctccgggagattttccggtcatttgatcggaacaaagacggaagcttaactcagctcgagctcggatcacttctccgagcactaggggttaaaccaagtccagaccaattcgaaacgctaatagacaaagccgacactaaaagcaacggactcgtagagttcccggagttcgtagctttggtctctccggagcttctttcgccggcgaagaggacaactccttacacggaggagcagcttctccgattgtttaggatattcgacacggatggcaacgggtttatcactgcggcggaattggctcactctatggctaagcttggccacgccttgacggtggcggaattgacggggatgataaaggaggcggatagcgatggcgatggccggattaacttccaggagttcgcaaaggctattaactctgctgcatttgatgatatatggggttgagtctttttcactggactcttccttaattttcccttaacttttttttagttactatgtttagttttcactattctacaagaaattatgtactcaaattcaaaataattacttctcaagtcgaaattcgggttctttttgttcattttagattcttgataacagttttggttattgatctcttacttgtggcgatttcatatgttatactagtaatgataatgatgtatagtaatgatctctcaaagtatatgaaactttattcaagcgttagaaagaaaaagacattgtcatgtttactacatagttgcttcaggatctatcaacaatcacattaatttctgcaattaaaagttaaaaaaagaaaagagagaggctcaattatgtcagagaaagatgggacttagctgcatcatctttcatctttgtgccatccactgcaaaatgtctttcctgactacaccattgaacccgccacctgtaacatagctcggttgaatcagacttgctgctagaccgccactgtagtaatgtctgtactgagtcgtagttccattgggtctcggcggttggatcatcatagagacagacgggaatggcttgtgccggaagtgtttcaacgaggtaaacaaatgcctatcggattcacggttttgtggagtctgcgtcgtgttcgtgtgcgatttgggacgggacaattccgttagtctctttgccttgtccatgttggaattgctgttgtgtggtagttctggccgagtacggatctgagctgctggtttcatcttatcgagccaacgaagaatccaatttccgagattcctaccaacttctatgtctctttcttgtatgttcttgtgaaccgaaatcgccacatcgaagattttacgagtcctcctgaaaacaaatcaaaaagaatgcacaagagaaagagaagcatagtcaatgcataaccctaaatgaatgaatctaagcttctgtcaaatctcacaaaacacaatcatgatactaattttctaatcacaacgattcgaaatcatcaaacacaacactagaatcaacataagcttttgttcttgattctaattcctaaaaatcaatcacatcaaaactgctacaatttctaaagatgaatcgatttcaagtctcattgattggtttgagtaaacgattcgaaaacctaaaccgaatcagcaatttcaacaacagagcgacgcaatttcacattctggaaaaaccaaatttctcaaatgcgatttcgtatccaacgacatatttatcagaatcgaaacgatctcgattagaaatctaaccgatgaagaaattgacggattttgggatgtttcggagtaacaagccgacgctggatcttcagagcgagcctataagtccgtctcagtcccaagaagtaagctgttcctagagttatctcccaaaacaccatcttctttcttcttcttcttcttcttcttcggctacacgattatcgcatgatcgccattttcgtcagtcactgaccttttggctggttaacggtgatgcgatcctcaccgtctatttccttgttcgaagaagtcattgtgggccgtctgttggcccactttaacggagtagatatatgggccgtctgttttttcataattttgtaaagtttcccaaacaatatctttgttttgatgatacaactttattttgtgaagaaaaatgtagaaaatcataaactaataacataataattaaatttattaataatcacagattttttctataaattaactcaaatttaaatttacataataaattaacataataattaaatttatttaaatgtttctaatattctaataacaaagcttatgaaagtctcattaaaaagatagtccagagttaaaatttacatggattgttggaactaataaggagataactacggaaactaatgaaacataacctaaataaaagatcaacacttataatctaggagaataatttttcaaaacataagattaattaactaaatcaaaccgttcgtttgattttttttttcacttgaaaaaagcagaggccaacgagtgttataattttttttataaattactagtgattgttacttcgttttcacaaatcattctcttaacatgacagacaaatctagccttggatactatttatgttggccttgtacttgtctgataaatttctgtgtatcactgttatttctcatctgctttgcgtcattcattgcttggatcatggttagatccaacgatgtgaaattccaagtctacgacgctgagctgacacatttcgatctcgaaagcaacaataacctccagtacagtctctctttgaatctctccatccgaaactcgaagagtagtatcggaatccattacgataggtttgaagcaaccgtttactacatgaatcagcggttaggagctgttcccatgccgttgttctaccttggaagcaagaacacgatgcttctcagagcattgtttgaaggccaaactctagttttactaaagggtaatgaacgcaaaaagtttgaagatgatcagaagactggtgtttatagaattgacgtgaagctgagtattaattttagggttatggttttgcatttagtcacgtggccgatgaaaccagttgttcgttgtcatcttaagataccattagcattaggttcctctaactcaaccggagggtttgatttccagtcaaccagatgccacgttggcttctgaagttttaaatatttttaagtatttaatctacttttgagtaaatttgagtaaaagatattcaaaatatttagatattttgtgtattttcgagtagtttggataaatttggttataaaaattgattttggggaatttcgggtaattcgaatccgaaatatccgacccgaatccgatttgaacccaaaattttgcaatacccaactatggcgacataaattttgcaatacccaactatggcgacagaaagatttttgccttttcttcaaaatgcctaaagtaagtgctattctatgttggtgtaattatctattgattgatcaggcacaagaaaatgttacttattggtcaactggtaaaagatacttctgcaaatcttagggaagctagtgaaaccgatcatcgtcgagatgttgctgtaagtgtgtgtttctcaataggaataacttagaaagatgtgagatttgttttcatgaaaacatcacattctgtgaaatttatttactattgatggttctcttttatgaattggtatttgctgatgcagcaaagtaagaagattgcagatgctaaacttgcaaaggattttgaagcagcgttgaaagagtttcagaaagcacagcatattacagttgaaagagaaacttcttatattccttttgatccaaaaggtagcttttcttcaaggtatgaaaaacctagttacggttacttcatcagtagagataaccactatgttctttgttacatgattgctatacttgtgtggttggaaacaaactggttcaagcacataagttgttgactttgagtccaattaaactatagttttatcttgacttgattttactttgatgcctcttttttcttatataccagtgaggtagacattggctatgatagatcacaagagcagcgtgtcctcatggaatctagaaggtaagtaagttctatatatgccgcatatctcggtaaataactaccaccttcatactggtgaactctctctttcttcatttgtaggcaagaaattgtgttgcttgacaacgaaatttccttaaacgaagcacggatagaggcaagggaacaggggatacaggaagttaagcatcaaatcagtgaagtaatggagatgttcaaagatctggcggtgatggtagaccatcaaggaacgatcggtaaatctctgaaacgaaaaaagcaacagtcaagacctagaataaaaaaaacagtcaagacctagaatgctttgagtccaattctcaatcctctttactttttatttttttattttttatttttttatttttttattattattattcttttaatactagtaggttcatgaccgaattctataatccctcttaggcccgaaagtacagcatgtaatattagtttcgtcctaacgtcgaaccgacgacctctaagcttcacctaatatctttatcaattgagctaacgacacttgagttaaattttattttattgcagatgatatagatgagaagatcgacaatttacgttcagcagcagctcagggaaagtcccatctcgtgaaagcatccaatacacaaggatcaaactcatccctggtaagaaaataaaaagaataatctgttatttggttagttgttttcatgttccttacttctctttttctttctttctggtgatttatgcagatgtgtttgtgttggaagtgagaatcctagattaaatcctacaagaagaaaagcttggtgtgaagaagaagatgaagaacaaaggaagaagcaacagaagaagaagacgatgtcggagaagagacgtcgtgaagagaagaaagtcaacaaaccaaatgggtttgtgttttgtgtgttgggccataagtgatgagataaggcccatacgaataagtgttttgttgttgtctagttaaggtccaacaagatgagtgttgtgttgttagtctaagatagagtcatgttgtgtaagagtgaattaaggagttgagagttccaacatagtagagtggctgatgtaagtcttaggacaatgatgtggtctagactctaagtgtgtagtgtagcaagtggagcaaaaccactatatgtatgagtgtctttatgttgtgtaagaacatccaagtaattaacaatgtagtctttggaggaaaacgcttttgtgtctctctagaacaaagaacaaaatctgtgtgagagacaagagagcaagagatctaactaaagtggttagatatgtgagaattacaacagtttgctaatggtgatatttgggattattctcctcgtcattctcgtagtaatcgcagagattgtgatggcaagaaacacaagacattgaagagaagttcggtttttggacatagaagtctgagtgtgcgaagccatacttgttgtgtctgtatattcacttctatcataatcggccttccgtcgccgactctttgttggtacggtttggtttggttttgaccaaaattgtattcgtttacgttaggtccagagaaaaataaccaaagactagtgacaagaattctcaaaaattgacaaggcactttttaagatttaaggttttggatttattgaaggttcaaagtttcgctttagttttgttgtctttcggaaaaatgatattttaatggtatttttggaaatagtgatggtatttttgagaaaagagcttgtttttgtggtattattgagaatctcattatattaaaatatatacatcatctaacatagtagtatattctttatatatttttgtggtattaatgttttaaaaagtatgtttatgatttaaattataaagtcaacaaaaatcatgtaaaatgtaaaagttccattttaattatatttgaaatattaatgtccctataaatttatagacatattctttatatattttcttgttgttttctataaataaggattcctatcctaatattcatacaatagatatccataaataagactttatctattttaattgatgtactaccaaaataagcaaaaggtaataatctcatttatttattactatatataagatatctttacatatacatatgtatgtgtaagatctagatagtgagagatcagaacaagagagagattaaaaaaaaaaatggagaagcaaatattttgtcaattcttagtcgtaatgatgttattgtcatcatctcaaattcagggagatttgaggaaaggatgttatgatttagggatcacagttttgatgggttgtccagattctattgacaagaagcttccagctcctccgacaccatccgaaggttgttgcactcttgtccgaaccatcggaatgaaatgtgtatgtgaaatcgtcaacaagaaaatcgaagacaccattgatatgcaaaagctcgtcaatgtcgccgcagcttgtggtcgtccccttgctcctggttcacaatgcggaagtgagtcttgtttattttattttttcatttatccattaattaggaatctaagacattttaaccatgcaaaagatactttttaaccctttagaagtatatttataagtatgtaattcaatcaatagttcatcatagtttctttttgtttagggttactaaatagttacataatataaacattcctacgaacgttcaagtttaattttttattcgttcatagagatgtttatgctctacttgtgattcttctatttccaggttaccgagttcctggtgcatgatgggatcaatgcgaatatgcaataacttagatgtcaatttctttgttcacaaaataagagcatatagatgcaagagtaatatgataaccgtcctattttctacatgattgttggcgttgcttagtcaattagtcattttttttttgaccggcaaatcaattatattaatatcatattcaaagttacaatatcatagtcaattagtcattaattgttaaaatatgttgccaaaaacatatgttcgcaaatcaaaagaaattttattattttttttaaaaaccatacgttacaaacttacaattggcgatgcagtaacggttataaaatctgaaataaattggcaatatcccacaagttgcatttaatttttagttctacttactagaccttcgtaaaccgagttatggagtaggaatggataggaattatctcgtgatcctccctatacggttcgtttgagacaccgttacttttggttaaaaagactttgattgtaaaagatgtgaccgttactttaaatattaataacagtctgatatgctgtagaactctcacaatgttactaaaactttgatatgctatagaactctgactgttttttaatgttagaatatttattttttacgaataatgagtatgatcaaattcaaaatcaacttgtagtataatgacgaaaaatcactgaaaatactaaactgcatctttgattaaacttgagtttattaataattattcaaataatacgaaaacatataataaattgttcataaagaactgaatatataaaattatcttaaaatgaatatatatatatatatagatagatatatacatatagttttccctccatctaggctatccatataaacatccacattagcgtccacctaagcgtccatttatgtattaaaatatatttaaagaacaaaaaagtaaccttcaaaagaaaattaaattaaatttatatacaactatgaaatctctcccaccatattatatagagcaatgtttatggctaatatttttttatgtctaagtttgttacaaatacaatataaattaggtagtaatagcaacacattcatataatacaaatattatatatataaaagttggtcatctctcttcatatgaatgacacattatcacacaagaaaataacatgtgtcattttatattaattaaataaaaaaattaacaaaactatttgaagaaaaatcaaaagtcttttgttgtgttaaatcctctattaatctcattcttatataatttttctaaaaatatttaataaataaaaaaacataataatatatcaagtacaactttcattctactcaatttgttttattaaattttgtttatcaatagtcattacaccagaatgactaataatttacttatgttgtagatttacttttgttgttgtttataatgtttgctacctaacctcataataatttcgtaattttacttgaatattttttaattattacgttttgtaaatttgatttatcatatgaccttctttctttttatttttgtgcgttttaataatttggtaacattgacatataatttgtttaacgtaatggtctttcgagaagttaaaaataccaaaaaacaaacaaacacgagactctatatggctatatgtaagggatgagatctaaagtgttgacttaaattactagtatattaggatagtgtacaagatgacgaaaaaatatatgaaataaagaattgtttgttacaattaagttagacaagtttgaaataacataagtaacataactacatacattgtatcaatatatcatatattgttatcgtatgtgtttatgataatgaaaacttaagataatagcctaataggtatataaatattcatattatagtaaaagtgtaaaactgatatttcgagttataaaaaaatttcatcataaacaattataattatataaaatagatatgaatttattaattacacaataacacaaacataaaataaacatcaaaatcaacaaaaaaaactatagtcataatttttccgacaattttaaaaacaaaaactcatgcgtagcatgggtgttgatatagtaaagttaaaaattaattacagatcaaggctaggatgcaacacttcacctctttgctatatatcgatttgatactctcacttatatcttgctttggttagttttccaaacaatcatctattgaaaaatacaaaataatagaagacataacgctatataacatctaactagttatctcatacgtaatattgaaaaattgatactggtttttattatttttgtataaaaacatattattcttatccatcaatttagcatttcatataattattgaatttaaaaaataattaaaaatcattcatatatactcatgtttattagaaacataatagaaaaagtaagaatttaaaatcttattatataaagtacggttttgaaagttactaactcacgagatcatgacacgtgtcaggtctatcattgagatgttgacatatgtcaaaaaaaattctttaaaaagaaaaaataaacatatttacatatattaatttatatttctatatctaaaaaatttaacttataattttcttcattaaaaaagaaaactaacaataagatggagtatatagaattaaattgtatttatattgcaaaattggattgtatttgaattgtatacaatcaaattaaattgtattatattatgataaatagatatttaaattgtattgtaatatcgaatttgtaagattgaaatttagtttaaggaaatactaaattaaatactgaaaaaatatgagttactatttaaaattcaaatatcatcaataagttggagtgtatagatttaaaaggcagtttattatgatgaaagagatacttaaaatgtatagtaaaattgaatatgtatgattaaaattttatttaattcaaaaattactaaattaaatattagaaaaatgtgtaaatcactatttaccattcaaattttaaatattatcgataaatatttgaataaatttatattttatacctacctatttaggcggaccttatctagtattgtatacaaatagagaacaagtagaagtgaaagagagataaggttttcgtagaagaaacctttagaagcgtttctcaacaagtagtgacagttgtcataacactattgattcagttaccaataacaattaatattttttataattaaaatattacttttttttttttgaaaacttcccttgtttttgtcaatggactattaaaacactgggaaatttgcaaacaaaaaaactataatcattaacttactattctgacttgaaatataatattctttgtattatatgtaatattaccaaatttgtccttattgtctcaataccaccacctgccacactaccgccggccaccatcgactctggtcatcaccgccaccggccaccaccaacaccggccaccaacaccggccaccaccaccaccaactccactcaccaccaacatcggtaatcaccaacaccggccaccaccaccaattccggccaccaccgactccggccaccaccaccaccaccggccaccaccgactccgaccattatcaactccggccactaccaccgccggacaccaccaacaccgaccatcactaccgtcggccgtcaccgattccgaccaccaccgactccggccaccaccactgccggtcaccaccatctccagcctcttccactctatcaaatagatcaatttagtcaatttactaccctctattattagtttctacattttaaaaatgatagtgttagtttcttaattagtttatcaaaaacaattcaccaaacattattgtcacattttgtttttcgaaaagtagccaaacaaaagtttattgtgagcatgagatgtttatatggtgtgtttcaattttataatattgtagccaaacaaaaaaccatcttattatcttacccataaaaccccggaaattaatggaggtctacacacctaaatttcgaaaaataaatttgcatttttaaggcgcatatgagatgtttatggcaaaagttcaatttcagaagataatagccagacgagaaaccgtgttagagaatttcctctttatttaaccaatgagaaccccgaacaattaatactggtctacaaaaggctcctagtttttttattaactcgtacttttaaatgcttagacgagatatttatggcaactcaaatctcatcgtatcattttgtaaagagtaactatgctatgtaaagttacccctaaaaagctaggtccagcgtccacagaagttctctgaattttatttaatgatttgatttcttttgatttgtaaaattatttgaaaatgtgatgttatcgttcttaattgtatttaatattacatgtggtgaacctataagtaatatataaacgagagtacgaggaaacatttcccttgcaatttgttttgaaaagtttcttacaaaatggcattttggttaagtttgatatttttctgcttttgcacatttgcatcctcaactccaccggatgatccggtcaagtgtgagtcaggaaacaacatgtgcactgtgacgaactcgtacggagccttccccgaccgttctatatgtgaagcggcaaaggtggagtaccccaagaccgaggctgagttagtctctatagtggctgcagccactagagccggccaaaaagtgcgggttgtgactcggtacgttcacagcatcccaaagctcgtttgtactgatggaaaggacggtgttctcataagcaccaagtttttaaacaacgtggtgggaaccaatcccgaagccaagactttgacagttgagagcggtgtgacgttaaggcagcttatcggagaagcggctgaattggagctggctttgccacacgcaccatattggtggggactcacggttggaggattgatggggacaggtgctcatggaagttcgttgtggggtaaaggaagtgcggttcatgattatgtgagtgagataagaatggtgagtcccggtttggcttctgatgggtatgttaaggttcgggttcttagcgagacaatagatcctgatgaatttcgtgcagccaaagtttctctaggcgttctaggtgttatctctcaagtaactttccagttgcaaccaatgttcaagagatcgttaacctttgttatgcaaaacgattcggatttcggagatcaagccgtgactttcggggaaaaacatgagtttgcagatttcttatggttaccaagccaaggcaaagtggtgtatcgaatggacgaccgagttccggtcaacacttcaggcaatggcttgttcgactttttcccattccgtccacaactctctgtagcgttagccatcattagatccttaggtaaatttattctttgtttctcaagataactaatacaaaatatatttgatcatttgcatagtttttttggtaaaaaatatttgatttgcatagttataatgtttcttataaacaactgcttcatgatatgaagaggagagtgaagagtcatccggagatgcaaacgacaagtgtgcgagagcagagcaaataacgtcgtttttgttttccatctcctacggtgtgactaacaatggtaaaaatattcgttcacttacttatgcatctttctattgtttccatatgtatgagactttacaactttctatcacatattcatttgtaatttccacgggcaggtatggaattcacaggctatccggtgatcggaaagcaaaaccatatgatgtcgtcgggtacatgtctagacagccatcaggacggactgatcacgtcttgtccttgggatccacggataaaaggccaattctttcaccaaacagcattcagtatccctctcacacgtgtcaaaggtttcatcaacgacatcaaagcactcgtaaagattgaaccgaaatctctctgcgcccttgaacgcagcaatggtatcctcatccgttatgtgacatcctctcctgcttttcttgggaaagaagaaaaagctttagattttgacctaacttactaccgaagcaaagatgatcccttagcaccacgtctctacgaggatttcatcgaagagatcgaacaaatggcgatatttaaatacaatgcattgccacattgggggaagaataggaacctagcgtttgatggcgtgattagaaagtacaagaacgcaaacacgtttttgaaagtaaaagagagatttgatcctttagggttgttttcgacggaatggaccaaccaaattctaggtttaaaaggaaacgtgacgattgtgaaagaaggatgtgccttggaaggactttgtgtttgttcggatgatgctcattgtgctcccaagaaaggttatttgtgtcgaccaggtaaagtttatacaaaggctagagtttgtactcatgtaaaatcagtaaatggctatgacgatcataccaaatttaatttgatgtttaatcgtatatgagaaaagtgaaaacagaacattttacagaacaacgtcttttgttcattatgacaagcttaacaagttttatggtcggtcacacgggcctttgttgttgggctttagccggtttatttggttcaattcggtttacatggttagtcctcgaataaaataatttcggtttaagatttgttacggctcctccgtcaatgtatcgtcgttgatcccaaatttcttctgaacaatttcgattttgaattcgcgctgagtgatgaacggcgcttctccggctcattcattggtttcgacgaccgccgtagctggtggaggtggaagcagtggcgccgccgctggtctagacgatttccattttccaccggatattccctcaatgcaagagcgaaaagacgaagctatgcgtggtcagttcttactcttttcccttttcgtttcatgatttcgaatcttagggtttcaaattagaggttttctataagattcggtaatcaaatttctcagtgatcagagatttgagtatcacatctccaaatttagggtttttgatactatctgaaaatcccaattttgtttccctgagttttttttatttggttgattgatttgttgatttaacagtaacttctttagataattagtattgctaattaattactaataaatgattaaggacatgagtagattaagaaaaagcttgcttcagtttcaagtgtttgtttgagatatgttatgtaataggtttggtttttgttttgatggtgtagttttgaaagctgatttgatgactgaacttgacaaagaggttaagtctttggaagaagatagttggatgttcgaaggtcctcgttctcgaatccatcttatatccagaagaggttagttttcttcttcttcaatcctatttttctgtatgtcacaaagctgttttcatgtgtacgtttatatcaatcttgaataagttttaacagcagtaatgatcccaatggttcaaaatttcatgtatttgccattctctagattaggcaagtcggtatggtgagaacatttgatcgaatctgcgggtttgtgtgtgtgttttcggtgtttcgtcatcactaagacactctactgaagtatatttgtttctgattaggtaattttctaaagaaaggaggtgaagtgaagctatggtgaaattaagctttgttcagcttcctagatgatcggattcattcaagtaagaaatatcagaaatggtcgtatacgctttgtttcgtgttcttcacaaatgtcactaaaacgttaactttatattttcccattgtaagggacaaaatagtatttctatggtgttaatatacaagtgaggaaatcattattcggctaatgagtctattactcgaaaatgaaatttcaatattctcaagaatatagataatcaactttcatcaaagacaatttttaagtttgaataattaatttaaaatccagatatttttcttgattttttgtctaacttggtactttttattagttcctttaaaaaaattaggttattatcatcttcccaaaacaaagattctactatatgtacggaaaaagaagtaccaaaaggtcattattaaatcccaaaacttgtttacctatttttatcaggaatcaattgatcaccactacctaaaaaccacaaattgcttaagtttgttaacactgattgacaagtgtcatacaagtaatcccatttgccacgtgtcatgtcctttttatgtaacctaggacttgaaaaccacaagtgcaagcaaataacctagatgacacttgttagagaacgacgtcaccaagaacctctcacactctctattccaccacttatttaccacggcaccgccttctccgtggcatcttcttcatcgtcaagccctgaaacatcgccgattcaaaccttaaacgatctcgagaaactctccgttttaggacaaggaagcggtgggacagtctacaaaacccgtcaccggagaaccaaaacgctttacgccttaaaagtcctccggccaaatctcaacaccacggtcaccgtcgaagccgacatcctcaagcgaatcgaatcgagttttatcattaaatgctatgccgtttttgttagtttatacgatctctgtttcgtgatggagcttatggagaaaggatctctccatgacgcgttacttgctcaacaagttttctccgagccaatggtatcgagtctcgctaacagaatcctccaagggttacgttatctgcaaaaaatgggaatagttcatggagacataaagccttcaaatctccttattaataagaaaggagaggtcaagattgcggattttggagcaagtaggatagtagccggaggagactatggatcgaatgggacatgtgcttatatgagtcctgaacgtgtagatctagagaaatggggttttggaggagaagttggatttgcaggagatgtgtggtcattaggagttgtggttcttgagtgttacattggaagatatccattgaccaaagttggggataaaccggattgggcgacattattttgtgcaatttgctgcaatgagaaggtggatattccagtgagttgttcgttggagtttagagattttgttgggagatgtttggagaaggattggaggaagagagacactgtggaagagcttcttcgtcattcttttgtgaaaaacagatagcattagtctcggtttggttttcagggttgagaaaagcaagtcataaactaaggaaccgaactttagtttcagtttgatccggtttaatttgaatttttgggttcggttttcctttgaaattctttggttcggtttagtttgaactttttggtttgattcgagttcagttttgaaatttttattacttttgactaggcttaaaaatttaataacttttttaaaaatacttgatttattttttcttacaaattttctgtttacagtaaaacctatataaattaataatattgggacaaaaaaaatttattactttgaaaggtattaattaataaaattgtataaattttgttaattctaacaaaaaatttgatataaaaagtttttttttctttataatcaatagtatttctgaaacacaattacaagtagaaaacaattattaaatttaaaaaataaaaatagaaatttgatgttgtaaaatattagaattcaacactacaaaaaattaataaaaactgaagaaaaacataactagtcattttttacatatgatatttataatattatatatagatatatattggtaaatttatacaattattaatttatattattgatgagaccatttatttatataagattttcataaaaaaaatattattttactaatttatccgagttgtatcaatttttacattggtttcaaatcgggaccgaaataatttactaatttataaagattattaatttattgaatattaatttatagaggttttacggtatttgaaatagttcggtttagtttacactaaacatagactcggttcaatatgttttgtatgaaatttttggtattgtgaagttatgaattttagtttagtttggatttattcggcattcatgaaggattaataatgtcaaaaaaagagaacagatgaatagttatgttgacttaataagttcgcattgctcttcttcaagcaaaataagcgaaaagttcaaacaagagactgaaacatgacacagattctcatattgatagagaatttgtgtaaaattgagagttgtatgaagcagtaatgttaaaccactttgatacaagaaagaagaaataaaagatcagcgtatgaaaaatgaatatgctgctctcagggactgtgttacctcaaaagactttaaaaactcccaaaatcaaggattttgcctgagtgaaataaacataatataaataactaagcaattaaacttgaatagttagagtttgatagacaactactaaagttgatctttagttaccttgagagatctaaggtttcaggagagaggagacccatctgttgagtcagattatccatatgcttagttttgtcccatccattttgttcctgctctgtttcattgtccactggtgttgaatccatattatctggaaccgggcttgacatgagtaagcgttcgagtaaaccgtaatcaacagggtctatatcagaatccattggaaagtcgtcaatgtcgaaggacaaagaatcatcgatcaacagatctggatctagtaatggactagaacctcccaggtttggttccatgaaactctctggaggcttctctgaattattttccggtagcatatgagtgaagtcgggaagagttagatcatcaggtgaaggaatacagttctcggttgcttctgatgctgccgaaacattttcaggagttgtttcaattggtgatgatgactgtatctcagaagctgtaggcatttccttaagagttatacccgatacttggtttgatgaagtctccatctctgttccctcggtagtagacgtaccattacctagaaggaaaccatcatcgccggttttgtaaggttccatcttcataagctgtttaaacattgctttggcttgctcgtgcattggaggttgatacttcactatctgtccatcaggagtagcagaatcattattacggacaatgccgtctcgcttgaatctccgcttcttactggtatcactgatgcgcctattactctcgttttgctgattctgctgctgtaagaattgagatagaaaatgagggctttgtactgcctttgcaaggaatgacattaattgttgttgccgattctccatgccctggagacgctgaaccatcgtttgaagttggttatcagtggactgttgctgctgtcttaatctgacgagttcttgcataaggacgttcttatctcttttaagcctttcaacttcttcttcgagaccaaatttgccaacttcaacacatgcgctaacagatgagttctgtccattcgagtgctgagatcgctgatgtccctgtccctgtccatgggcaggttttcgcctagttattgattgtagcaagtgcttctgacctcttaaaaaaccttcattcgcaaattcccatctatctgggtcaaccttcctgaaaccctgtatcaagaaaagacacgcaaaatggaatgaaaatggattccaccaagaccaatgagaaagaattcatccgacagctttagaagtgcaaatctaaaaccttcaacacatagtcttttaactgccaactatccacagattgaaacagccatatacaggacgtaactgatcagttggcacatgcatcaagagcaattttaattcagaagtcaagtaaatgaccaatcatggtcaatttaatatatgaatcatgaaaactactttatttatgttcctattatgggtcttacctaccacccaaaccgaggaaaaaccaaaatatctaatagggataactgaaaactaagagggtgaaaagtatctatgatctaccagtgtaatctttatgtcaaagtctgcatggtataaactcataaagattgaattttgcttcaaatagtgcccaacatgtaagacatcatgtaccacacagacagtaactaaggaataactggcaaacaagaactgtcagcagaaaattcaagctcctttaagtgcattcaccatcttgcagcatcacgagcatcctgctctaaatattatgcagtacaagctccattcaccatgacctttagagcaaagcttatatagttatctacttatatacacaataaaatctccatccagcctatatgaataaaaagtatttaatctaagtgcaaccgtacagagcaaacctatggttcccgtaactgacatgccagataaagatttaaagtcacactaataacaatatagatattccaacactaaacacccatatatctacttaagatctagtttctattccaggcactcctgatcacattggccttttaaggttttcaaagacgtgagatatctccactaaaccttgactcatctacaacaaaatgatagattagtaaaacagaaagttgataaccttgcactcaggtcatgatcaacatgagacttgctctcttattccaaatttcttctttcttctcctttataatgaatgctgagaaaattcaggaaggtttattactatcttacgactattactaaacctgattacagagagtcaaacagacaacaaagacaaaaaaaaaagggtatacatctctattctcatccccctaagtttgtatgtacagtcagcttcatcaacgctctcacatatctatcatttcaaagccgtgaggttctaaactaaacaatcacaagatatcaagtattgcaaataaagtagtctctaaaaagcatactcatgaaactaactatcgattctaatggatacaaaactcctctgctcagaaacataaagcaaccatgggaacaacattaatggaacaaaatccataaaatcgagaaatgatgaagtaaaaaaaaaaggcgaagggaaagggaagaagattacataggtattaagctgtctaacgaagctggagaaattattatgcttaaagttcttaggaagaagatcgcgagcgaactccggtggtttccaaacgataaaactgttgttattagcactccaagagacaatcgaatctgtattgtgatcatcaaccatatcataggtcttgctcagaaacggaggaggcgcgtttgaacttagaatcgccgcaggctgaggttgaggagatggcttagtctccattgaatctcctccgccgtcgcttgtggttactttgctcacatccattcggatttttgattccaagtcaatatttgggaattttgagaaaattagggttttatatacgaaactggtgatttttacaataggtgagagagagagataacttttgattgaagatctagagaattctcagagaacattcacgagagatatgggcggagagagatatagatcagaagagagattttgaaatcgatggagaggacgaaagagagacgacgggagactcatgaacacttacgaaattacggaattagacatttcgctttttctcttaaaagcggatgatttattacgtgtcactatattattcgctattacgctctgttttttctttttgggctgactagcctgacacgagtatcgattttaattcgttaaaataataaattgaaattttattttgtcttacaatcttttcaaattccatcagagatttatgtattagtaactaacaaagttttttcaaatcttttaaaaataataataattaaatctacaaactattttgaataataataaaagtagatttttaaatcattagtttaataacactaaattttattaaaaaattttaacttcataattaaataatatatgatttgtaaattttacacaaatcacttaaaatactatattaaatacatcgtctaaaaaataaagtcatggttttatttcctctatgtggatctctactttcatatctgtattttatttcaattcatatttagattttgtactttatttatgagttctttagttatgaggttgagaagtttttgtttagttttaatgttttcctttattctaggttttttccatttgtatctatttttgtttacggaaaatatgtttgtttgtcggtttagcttatagaaatgtatttttttttgccggcatatgtattgtaataggaaaacggtctattttcccatgataactatgacatcatgccagatagagcccgaacaatgaccacaatccagatgtccacgaaaagatacttctcgatctatatctcccaaaatcgatagtttcatctatttccccatatatttgggtttaatcggtttgctgaccagaccctataaaatccactcaaaccgataccaaaccactttatatgtcaaaccttcttaaaaaaaaataaaaaaaataaaaaaaaacaaaattgttgtcggtcaaacggtctatttctccatgataactatgacatcatgccagatagagccctaagtatgaccacaatccagatgtccccgaaaagatacttctcgatttatatttcccaaaatcgatagttttcatctatttccccatatatttgggtttaatcggttttctgaccaaacccgataaaaatccattcaaactgataccaaatcactttatatgtcataccttcttaaaaaaaaaaaaaaaaaaaaaaaaaaaaaaacaaaattgctgtcggtcttgtcttctccattcttcccatagaattccagattatgtttatttgaaaaaatagtttatctctctctttgattgttacgatgggtgttagatttactttgaatccacatacaaatttgtcgtaactaatgaagagatattcaacaaagcattttaaacgcattctaattgctaataacgttaacatcgacattgacctgaaaactggaatcgttgctaagaatatggctaagaaagagaagatcaaggtgagcttccgcatgaattttacaattcacaaaagaacaacccaattaaacaaaatcaacatctcaattattaaataagttttatccaattctattactgttctttcaattgctcatcttaaaatcaatctgggaattataaacaccagaaaacaatcaacacaatccatcaagtcgacaatggctgattcagtgttatcaatcttctacaaaatgaatcaagtgatttcaatgggtggaataatgtgggaaggtctcaattcgagtttaatcaaaatcgatgaagctttgcttaagcagcagatccgagcggagatgaggaataaaaagagagaaaaaaaaaagatataggaagaagaagtaaaaaaaggttatatttatgattaaaaaaaaaagaagaggaagaaaagtaatactgcatatgtaattagtaatttactttgtaatttcctaaattagagctaaatagctttacccgaaaaggaaacaacaaaatacaggaagtgttccttttttgtgtgttaccgtaacattataaaataacctcccattattttctcacaattactctactacacatcgaagagtttacaattctcagatcgaataatcaaaatctctctttgaagatgtcgataatgataacacaccgttacatggtcagaaacgtttatgccgttccgtttcatacaaaatacggatttggtttccattacttctcttgtctctttggtttacatgatgtaaagttggttcctttcttcggcttgaaacgtttttattacccacaaaaagttctgtataactcgaaaccttcaaattctaaaccggttaatgagaagccgattcaagaaccgagtcaagaaggagaattgtttggtggttcggttacaatgggtgctgctccgtcaccgagacacttgccaattccaactttttgcatgtcttctaagctaataaagacttgaatgagacagaactgtggacttttgtagtagttgctaattgtaatagatcctggccacaattagataattgtttcgttttttatttatttttctgctagtgttttatgctattgttacctttcgagtcgtttgttatcatcacttacgaaaactttaaagagtcaaaataaaatctaaagtatacgatgtatattggtaaacatgacagtttatataatacaacactaccactgctttgaatctccatcactctctgtggttgctgacatctcaatcctatctggacaagacttgtggttcaagtagtggatgagataatcaaaaatcaagatacgaagagaatctaggaaacctaagaacatttaggttacctttctttccgaaaaatgaaccaaacccatcaatgtttttatacctcaagcaaatgagaagacacgataatgaccaagtataataaatattgaaacctgaatcgaagaatgtatcaaacttatcaatgtttctttggactttaaaacaaacgacaacaacctctatgttgatctttgcagacatgcctttacccatctgtgtgctgcttgcagccctttggtccataatgctgagcagatttcttcaccactttcttacaaagataacagaaatgtgcttgacatgcccaacaaaacaagtgattgttgtttcccgcctacacaataacaaactccagaatcatctcatgaacctcaaaaacctataattctctgcctttgttaaaaccaaatttttttattttcttacctttccattgaactggcggcaattaggacataactgaccgcgctgtggaaactgaccgccttgtgcaaacagttgcgcttgaatctgtccaatgacttgtctctcattcatcatctcattccattcttggatcgcctcttgtgggaacagttcacattttccctcactttttcccaaaaaaaagacggagcttacttagttccaagatttatatacatatgtatctgttcttttatatatgtaacatcactaacctgaaatgttcataaccagtgatagcttcgttgcaacggtaacaaaagtattgaccacagttattgcataccattttgttacaacctccggttcttgagatggctattttgcacgacggacattgtttagcgcttttcattatcaccttcacactcataatctcattgatcatttctttctctttccgcctttgttcctctccaagacgagaagaatcttgacgctcctgtatagagatttacatgtaagaaagagtcaacggtttaacaaagagaagatcaaaggcacaataatgatacctgcaagatttgaagcctaagttccgggctcatgcaagccacacccacatgtctcttttccttacaaagtgtacagaaactgaagtagcatttgaagcataaagcaagctgttcctcgtcctctatgcaaggggtttcacatctaggacagtaagcaacgtcagtcatggattccagtgttttctgtaacataagagtttcccaccgttcatacgcttcatcgcccaacaatctcttcaatatccctggcggaacagtttctccacatttcgagtccggacacttgagcttgttaactgtgccttcagtgacatgtatgtctgtataggtcttcatacatttcaaacaaaagaaatgctggcatggtaacttaacaaagtcgatacctgtagagggtgtaaaacaactgtaaaccaacccacattactaaagaaaacagctatgaagaagaacaagatatacctgcagattcagagaagcatatgcagcactcatgcaagctctgaaggaagctatcatgacgtttctcatcgtcataactcctaatataaggaatatctgaatccggagaacgacttccagacacagcacgcttatctctggaacatgtaacaccataaggaccaagaacaatctcattatcaaaaccaagatgagaaatcgacgagttctgtagccaatctgtccactggtacaagacttcttgccctggctgttcactccataacgagtccagcttagagcagagacttgaaatcttatcaggattcatccactgaacacttattaagaaataaggcggtaagtggctcggataagcttttggtaataaacatttcaacacaatcggtggaaggtgttgcgccttgaaagagtacaagaaatcctctgactctttgcttgaatcagcttgtaagttaagctttgtagagatagtatattcactagtagcttcaacgtttacatgaacctgcacaaatcaatactattagaatatattgttatgtcacattaccgatacgaaacatgtcagtactaagcagcttatttctgacctgaaagtatcgcatatcgttataccgatcaaagatgaacatgtttcctccatatatgtaccccaatgccaaaagctgttgaaacatcacaaaggtcaaaacttgatatgaataaatgtcctaaagctattgaaacatcacaaaggtcaaaactttatagctcagtttacctcatcttcctgtaattgatcattcatctttagttgctcctctgttagctctggctcactgacactagatcgcaaatctttcagaattgtcaacataatatcttccttcgtctcatattcatcaacaccatcagcaatttcttcactttcagctctctttaactccgattcctcacaattcgaatgatcactagaactgtgatgaaacttctcctccatattcaccgaatgcgaattctgtttcacctttaacctactcaattcatcagccaagcaatcaacaacatcggattcagcaaaattcacctccggtttctccacgggacgaggttttgaatttgatccacggctgcgtcgattccggtgagactttgaaggttttgtagaatgatcgaggttttggattggctgagaagtagacggaaaagctgctgcagatgataaatccgtcgaagtcgtgtcttctttctgatgctctgattttggatgatcgttgactggattcacaatcccagcgtcacggcggatgtagcggcggtcgtgatttcttccactgcctccgtgtgttcctctcatggcggtcttgcagccaagtttgggtccagagagacaaacaaactctgttaaatgttaatgcactttctctacttgacgaaaacaaaaaaaaatgtacttttttctacttatgttttttgggtttttatggattgtgtccgaaaaattccaagtttggtttatttaccggttcgatagaggaaaccgaatcttaaataccatgattgaaccggagaagacttggtcaaagagaaaagaataattacgtttcatgttcacatttgcataattatggttccatatttttagtatcattgatcgattgctggacaaaatattcgttcgatccactttgactcggtattcgatttgattcgatttgaaaaatccgaacatccgtaagattttggagcaaagcaaataagaaaatatggtattcataaaaatcgaagcaaataacaaatattgttttttaaaaaatcgaatatccgcttcgatccgtatttatatatatatatatatatatatatatatatatatatatatatattagaatatataattatgtctatatataaatatcataaatagtttgtgtattgttgttatcttctgtttttatgttaagatgtttgtttgatcatttttcttttatgttatgttttgattaatggcatcttaaactatcggtttttgtttttgttttaattaatttgataacattttgttgactggtgataacaacaacagttatgtttggtatttagaacttattttgaaaggatgttaaataaaaacattgaatatttgatatgcttgtatagtttacagattttttttattatttatatgtatcaaagcagatatccgcaaatatcacaaaaaaaatcggatattcgaatttccggatatccggaaattttcgaatcgaagcaaatcacaaaatcaagtattcggttaaaacgaatcaaaaaacaaatattataatttttccggatatccgcttcgtgtccaggcagtatgatcttttacacacacatgagtagtactatgttcataaatcgtaacaaaataatatggtttaaatatccatattgagctaataaaaacgaataacagttttaaataaatcgaaaacataaaataaaaatatcatggagatccacaacaacatatgttcatagatgtatacacagctttgtgactttgtcacataatctttaatgatatccaataggagccggagcttccttgagttcatgtcctttgaattgtatatcctgcacacataaaattccatattgtaacgaaatttacattttataccaatatcacattgttttatcattttgacaaataaactatacaactccttaccgaagcatagtggttaatatcacggtggtgagcttcgtcagctcgtataacataaaccacatccctaagcgttgcatctttaggcaaccgccagtaatcgattgcgatggctggagctggcgagttttcgaattttccggcatcaatgtctttgagaaattcagtgtaagaatttacagcctcttcttctaagtatccagtgatacgatgagcaagtttgggtgaaattacataagccaggaaatatgcgttgaagaaaacgccttggaccgtgaacacaatcgctcgttcgtaccttcaaacaccggttcaaatgataaatgaattacacaattccaaaagttttaggttagaactgtttctattagataaccgatctaggtcaaaccaaacttgattagaaatgtaatacaagttacgtgttatttagaaaaggtaataaactaaaaaggtacatgcatgcatatatacataccatttgggttgtgaaagttcgatgaaagtcatgagatgcatacgctcgttctcagcctcttcgagcaaagctttgatccatcccccgctatgttcgaacctccggagagatttcaagtgcaaaagcatccccccgaccattcccggcaccgcagccaccgtctctagcaacatcgcatggcacatgtgcttcctctatactcaaaaatcaaattattcaatttttgaaaaaacaaaatcatgttaaaaataaaagaacaaatgaagaagatttaaaatttctgattaaattacctgaaaaaatagttgaaccggtattttcagagtttgaacggtccaatatgcgaatttgtcagtgaaattggagggtttatgatgtttagttacatcaatggacacatccggtttgtatgaatcccatggctgaaaacaattccacttccaagctgaaccgtccggtttagtgatcttagtaggaggtataccccaataagtggatataactttaccatcggccgttcggataggattttctggctggttattcccacttaccggagatgacgtgtcagagctcaatagccgaacattgggcaagtggctaatgagatgtcccctgaatcctccaattcctaaaccggaggattgtaccgaagatgatagtaccggtcgaagagtgcggtaaatcgatctgtaggacatgagtaacaacagttggggtgtgatgtatcaacgagttttggtggtgagaatagaaatactaaaattatgagagatggtttaaggttatgattgatcttcagattgggttatgttcatatgtggcagataaattatgaagagatgaatttatatacacgagtgattattactaatctcggtcaagttcaaagtttcttggaggatgaataagaatggaggaaatgtttgacacgttttgttacattttatgtttgtggaaaagtaaaagaacatgtgaaattacttaaggattgtgtttgtcaccatcatattatattattatcttattgttcaataattcatatattcaaaaaagtactacagtttatcacgagatagacacaccaactatattattacacatcatgaaattacaaactcagatcatgttactatcataatatacaaagacgcttaaatttttcctatatttcgtatataccttgttatattttcttaaacaaatgttaatttagaatctatactatatttgataaatagaaaaattaagaagagtttataatatagaaaaaaatgtggttctctcgaatcagaatgaattgctacttttaccactcaaacacacacacacacacacaaaaaaaaaaaaaaaagaaagatagaaagaaagaatgaattgctactgtgttaaaaaatgataagttgttttaagtttgttttggttttgatccaaaaaagatgttgagatagaaaaggactattgtatatttttctgaaattatgttgtactagattttatcccgcggtataccgcggtgacaatttaactttttaaagttagtataattttttttttgcaaattgaatctatatataatatatttttattttatagtttacaattgttattaagtaacgtcctgccaaacccgtcccgccaaacccgtcccgtaaaaaaactatttatttatattaatgttgatcttatttatgatatgtttataaatcattgtctaaatatttttgtcgatgcgggacgttgaacccacacattttttgctaatttgttaatatatgtttatttttaaaattttgaattataaaatatgacggaaaaaattaagatttttttaaaattctatatattatataatgatgttaaaaaattgtaatatatcgaactttttataagtttaaatattaataatgttttataaattttaaatatataaataataatatttaaaaaaattaatatttttgcttataaggtaatgacataataactctaaaagcaaggatttagaagatttaaatctttaattaaatattttcattaataaataattaatgtcagtgacatgacatattaaataagttcaaatacaaaatttatttatttaaacaaaaaacgttcagtaaaaataatatttatttaacaaaaaaatttgttttaaaatattgttagcaaatatgtttatgctaattttaaaggattgatttgaagtttggtgggattaaatttgattgataatgtgattgacaatttaaatcaaaaatttaaaataaaattaattatttttaaaaaaagatttaatgctaatgacattagattgtaaataagtccaagttcatgatttatttgctaaaatagctgtaaaaatgtatatatagatttgttcatctatttctttaatatttttgtaaagataagtgactcataaatcgcactagtagattacgttaattgagcaaatacaaatatttggcgatgtccatatactagcacctaagaagtaaagtccttgtattcgtattacgttaatatttcaatttttaatgttaatttgaaatcatcccgaagaatccagagatcttgaacgttgagtatgtggtttttaatttttaatcagtggtaaatatttgtgaaccacaaaaagtaaaaagtccatgtctagtttttgaattgttaactgttcatattacgaagttgtttatataaaataccaaaaaaaggagatattttagaatatctcatatggtttttgttcacatacattttctttgtttttgcttgttctatctctctgtctttaatgccgttctcgactctcgaaccgatcaagcgttgcactaacatgtgccttcgctgaccgatagagctacaagagttaggcaccacaatctcatcttttaacactaaactaacaatacaagataaagtaacatatatctgaataaagacaatttatatgtataataaactagtgtactggaaagaaacgtttaacataagtacataacatatgattatatttaatgatgctgagaacaaaagatacttaggaataaatctaatgttcatcgttataagttataacacaaagcattaaaaaaaaacgttatacttaagtcccaaattttggatctaaccattaaggttgctcttagaacacataatattctctgttgttaccttgttctctatctgctttgatcaagcttcgtcatcacgttgcgcactaatgtgcaatcgtagaccaacgggctacaaaagccaggtgcctcaattgctaaattagatgaatctgaacatttttgtcaaggaatttaggaaaagtgacaagaaaagcaatattaaatcctatccatatccattgaattgaatgcatttaaaaatttagaagttttaagatttcaattctccaatgacgaatctataaactatctcctttctttatatgtaatgtttataaactatcttctttattttattactttgtttttgttaaagatatattaccaattttagttattattgtctgcttctcagctacaaaattgttttcctaataaagaattaaagatcttatccaatgtccacacgtttagtatttttctccatctacacaaaaaaaagaaaagaaaagaaaaagatattttagaatatctcacatgtgaaatgatcatgatcaacttctctctctgtctcttccatgccttgctcgagcatcgaacctaccaagcgttgcacattaatgtgccttcgctggccaggagagctacaagagcttggcgctgtctctgcagcacatagctaatttaaagttgattcgtcaaatccagcaaacttagttatagaataaaacattttttggcgttttgccaaggaaaaaaaaggggattagttggcttcaaataaaccaaaattagctaaatgttcatagagtaaataagtgaatgatcaacagataatatcattatgcatggagtatgatcaagaatacagactgaaaatttatatttactcaaaatgaaacaataaataatactgtcgaaatgaaatttgatgctaaactaagaagtatataatgaagaaaacaagtattatcgctagttaatttttatatgattatggtgttaaaaaataaaaataaaagtatataaacacaaatattgtatattttcgtgaaaattttaaaagaaaaatgttctaaattctagatttcttaggttgtctgctaaaataatgttagcaggtttcttaaaaccaaaaaaaaattcataaaatttacttgaaagcatgatgatagctactaaaaaaaattcataaaaagatatttaaaaataccttaaatgtttatctttatataacaacaagacctctgctgctgctatgctttcactggctctctcttttctcttttcgcccagctcgagcttcgaactaatcacacgttgcacattaatgtaccatcgcagaccagtgcgctacaagagccgggcgccaaagttacaactttttactaacttaaaaacctttggtcacctatataataacttcaataattcttttctatttttgagtcaaaaacataattcactccaacagtagtagtaattactagagtttctttgagttttttttaataatacaacaattaactttaccattttatctttttgaaaaaaggtttaccattttttacttcttgtagagttgtagtagtattatcatagtatggtgcatgtgtgttactgtgttaggtgtgtattgttttgtatatacgaaataaatgtttggaggcttggaaaatttttcaaggaaaaaaaaatcacatccatatgaccatatctattaatgagcaacactcatttcatcatatagatgccgagtgatcatttaatacactgtaagaaaatttaaagctttctgattccaaaattctcaaatctttttattacagtgtctttcatattcactttcttacaaagattattattaccaaatttagttacatgtctgctgctgagtttcaaataaattattgtcttaataaagatcttatcctatctccacacacgtttcctcctttttatttctcactttcaagcttagaaagaatattcttgttcgattttttttctcccgaacatgatctttcaatctcaacgacgatttctcagtgactaatactacatttgtatacattcttcatcatcatcatcatcatcatctgtgtttttgttcatattcatttttcagttatcgttttcaatttttaaaactttttttcttgggtttcacaaaatttgtcgttaatcgatgaatttgattgttttcaagatcacccatctctcgaattcacgaaatctctcagcttttccgtgattcttggtaaaaattcacaaaatcgaaattggagaaagaaagaaaaaattagggtttgaggaaaagcttcgatttttcacacgatgagtcatcaccggcgagattccggcggagatgtagttcacgtgattcccacaaacaatcctccgccggataattggtttccgaatctcggcgatagtgctgtttgggcgacggaagatgattacaatagagcttgggctatgaatcccgataacacctccggcgacaacaatggtccaccgaacaagaagactcgaggctctccgtcgtcttcatcagccacgactacttctgctgcgagcaatcgtactaaagcgattgggaaaatgttcttcaagacgaagctttgttgcaagtttcgtgctgggacttgtccgtatataacgaattgtaactttgctcatacggtggaggagcttcgtcgtccaccgccgaattggcaggagattgtggcggctcatgaggaggagagatctggtggtatgggaactcctacagtttctgtggttgagattccacgggaggagtttcagatcccgtctttggtgtcatcgacggctgagagtgggagatcttttaaaggaagacattgtaagaagttttatactgaagaaggatgtccttatggagaaagttgtacgtttctgcatgatgaggcttcgaggaatagagagagtgttgctattagcttaggacctggtggttatggaagtggtggtggtggtggaagtggcggtggttctgttggtggtggtggtagtagtagcaatgtagtagtgcttggtggtggtggtggaagtggaagtggaagtgggattcagattttgaagccttcaaattggaagacaaggatttgcaacaaatgggagattactgggtattgtccatttggtgctaagtgtcattttgctcatggagctgcaggtaaagattctgccttttgttcgatttcgtttgctttatgaatggaatggttaggcctgaagataaggacgggattgagttcataggtctctagtggttagccaagtttttagtgacttctcgtatgttagtttaaactttaaaccaatgttgcttgatgaatgggttaaaggtgactagagattggacgctgaagctccaagctgagtaaaatggttattcgcttattcgctgaccctgtcgggttctgtatcttatgacaccgctatctttgggtttttgttggtctgtggttaccatttagtctgttaggttatttgttagaagttttagtcaacggtgcttcatggttagactagtgagaatggtactaaaggttatataggagactaactaatggattgagtgcttatatcagttgagctcgccgcaggagtactgataaacattcatttttggtctggtattgtaatgaatctgacgagttgttgaatcttaggatagagttataggtttctcgaattctcaaaattttgatagataatctgtcttacatttgtgaaaaatgttgaatctttgatagtttcttatgggaaacaatttcttagaattgttgaacgatatgaccttagaaagttccgtagtcgtgtagctttaaagttttgagtctttatgatttgcagagttacatagatttggcggaggactcgtggaagaagaaggcaaagatggagtatcacccaatccggacacaaagcaaacagtacaaaaccccaaaggactatcagacacaacaacacttctatctccaggagtacctcataatgcagatgccagttaccacactggagttgcattgcaacgagcgtctagtgcggttacacaaaagcctggaattagaactcatcagaagtggaaaggaccggcgaaaatcagtcggatatacggtgattggatcgacgatattgaatgatgttacctctttcttttttctacacatttagataactgctaagaaaattacaatctccctttttttgcatggtacattttgtagagtttgtatatgtgtaatccttgtatctgttgttgttgttgtttgttgttgtagattatgacttatgttatattatcatctttcttttgtatcttttccatatttgattttttaaaaatttcataatttgattataaagccacaattttttttaatcataactagaagatcgatcaccgtaaaactagaatgtagaattagattagagcaaattaattggccacgaagataacacgtagcttttgtcaccaaagactcgctcaaaactctaaaagctttggcatatgtatgaccttacctttctcctcatttctctcttccccattgacattacccttcccacacggcaacctcagaataaaccctttcttcttcctcaagctacctatgaaaccagtcacaatatttctgatccggccgtttcactgcacggtctcaaaatgtctatatccacgaccgagacagacaatttcaaaccagtccataccctcgtttcctccccggtcaccatagtcttgaccggtagtcttctcttcatcattttcacggggttcttctccttcttcttctgtggatgtttatttaggaaactcatgaggatttggaataaccatcgaaaccgaaaccgtcctagtaacctaatccaaccgtctaatccacctgaaaacctcggtctcgactccaagatcattgaatcattccctgagtatccttattcggtgaaagatcatgggacggatcaatgttccatttgtttaacagagtttatggatgatgacactattaggctcatttctacttgtaatcactccttccacacgatttgcattgatctttggtttgaaggacacaagacttgccctgtatgcaggcgtgagcttgatgtagaagaccggacatcgctagaaaagccgctagaagttcctgaaatcgatctagttagatctgaaatccacgacgagcctttgccccgtgacacagtgacaatcatcgttcacgaggagcatcctagtactactattggtagtttagagcatacagatgaaatcgaaagctatgaaagacgaatgaaagcatcgaatttgcggttttggaggtcacattctactggacactctatagtagttaagaccgaaaacgaacaagaagaagaagaagaagaagaaaaagatgagattaagatacgtattgagatctctggagaatgtcagtttgaagatcacaagatgactttaccaaacagaaagttgtattgcgttaggggaacttactctgtaggatagagcctgagaatgtgaattgtcttggttgatatatcatctataatagatccaagaccggaattagattctaggttttgatatattctttgtttcggccgttccatttttgtaattttttgacactataggttatagttatacatatagaagatgttgaagattgttgtaatgtttgtacttaaattctcattattcagtaccaatcatactttccttttttcatttgtggacttcataaaattctaaaaatatttttaaatatatgtcttatatatataacataaaaaattaagttgcattttatcgttccggtttgatatgggaggtgtcaatttgatagaaatagaaatattgggaataacgtgatataaatcaatagaataggggaacgactaagagtttataatattacaatgtaagacctatattttaccatttgttaaaaaaagagaaccaaccaaacttggagagagaaatggcgacggcatcggaaaattcaagaggaatcagcggcggtgatcgaacggcgaaagctgtcgtcgccgatcagatttcacaagccgtaaattccactgctaaccttcttcatctgatgcgtcaatcgtcttcttctcaggtatatcttcttcaaacccttttaacgcgtgctcatttagtcaccgttggattaaataggatctaggttgaataattagggtttggtttgattctgatgatagaaaatgtggatttggtgaattgtttcaaacataggtgcaacagtttcgtagttgtcctatttcattggaaactagttatctcctcctgtttcatgtaataagaccacaatgaaacacaatgtgaggttattaggatgagctttagatgttttttttttaatctctaattatgagtattcgctgtgtgtaggctcagttggcaaagctcccgaagaatctgttggcgaaagcttcactgactaaggccactggacaggtatgtatgttatggtgtagaatgtatgatgacataagtaagtactgtgtgtcttaagcatttttttttacattttgttaaggcgttggcgcagcttcctcaagtgatttcatctctagatgctcatatagaaagcggattgcacaggtttgatcttctttgacatgcactcatcatcaaatcttgtatcacttagagttgaattttaatagatagctttaagaacaatgaatgagaaatgtgataagagaatactactccctttgatgatgaagaatgtttgtagctgttgtgttctctaaccctaagtttcgttttctcgatacagcggtgttcatctaaacacagtaacccagttacttgaaaacatggaaagcacacagcttcgtgctcttcgacaatctaatatttcccctgtggtgtaaactctgatctcttattagcaattagatgtttctttcttctgttacatttttctagcaagcaattgagattatcataattgatttttgtccataggacaattgatctccagctcatttgaaaatttcagacaaatgacaagtagtgatctccaaagatagacacatacggcgttcatcttcttccaaggaacacgcttccctaatctcctccaccaaagagtcgtttccacaacagagagaaatatatggttgtgacttagtttttgatttccgtctgcgtacccattgtgcggaatctgattccataatagctctggttggttgctagctagatatctccgctggtcacttttgggatcagatttagttggcttgattcttcatgatgactgcatattcacgattaagaatgaatatgtgaatcttttctgcaattattgaaatagaaaggtttttcttttgtgttcaacttttgggaactcgtctttgagctatgtgaatctccactcttattcggccatgttttctttgctgtcataaaatttaacaatgtcataaccaccagtttagcaggcttattttgatgtggttttggttgaaaacacgatttatgggttattattttatttctagttgactttcaaaatcaagagaatccataacaattacaaaaaaaaatacattaacttggttctaagaggcttgttcgtttggcagcgactgtcaaacgaacaacagaacaagtcgctgatcgcagttgatggtcgctggtcgcagtcgctagtcactggcgactagtacacgaacagggcctaccaagcttgtgaacatcagtaggatttaaatttccaccaattcttctttttcacgaactttttaatatttgttttgggtaaaataaaagaagcgggaacgccacttattgaggtgactccaatggtcacatactcacatttcagtactctctctctttctgaatcaattagggttcctcttctccgttgagtgaaaaattccggtggggtttcaggtctttcattttttcttcctgtgaaattcttttggttcgtcttgcttatttgatttcgaagaagcgatttcatgaacaatctcgatgagtttggatatcgtttgcttctcttttgtatctctctagggttttgatttgaccttccatagttgcttgttggtgttttttttaaacttacttcacactgagaattttgcattccttgctgttttcaggcttatctgtttagttttaggttctgacctaaacctgtggaagctgttagctagtatggataagttaagtcagttgcctgaagcgctactagtgagaattttgtctttactgtctgctaaagatgttgtttcgacaatggttttgtcgaaacggtggcagtttctttggatgttggtgccaaagcttatatatgatgatagctatcaagctattgagtatggaagcttttcgcggtttgttgacaggtcattcactctgcacgatgcgcaagttctagatactttgcatttcaaactcggtaaaacctcatgtggtactggagatattagagtttggattaaaacagcagagaagagctgtttgcgtgagctgataattgagattgataagtctaatagtgataattcttcagtggtacttccaaggagcctgtatacgtgctgtagaatgctcgtgactttgaagcttaataacgcggttcttgtggatgctacgtcctcgttttcatttccatctctcaagactttgagtcttgtgtccatgaagtttccaggtgatgagctgatcaagatgcttttatcgaattgtcctgttcttgaagacttggttgtgaaacgctgtccctatgacaatgtgactactttcactgttagagtgtcttctctaaagtgtttagtcttgcatgaaacggaattagccagtataaatgctgattgcgggtttgtgatagatactccttctttggagtgcttagacattgaagatggtaggggtggtttttgtgtcattgagaataatatgactaaggttgtgaaggcaaatgtttgcaattcttatgtacatacgcagcagctcatgggttctatttcttccgtcaagcgtctctatgtatgtataccatcctctaaggtaatatgtttctatagttctgttatctacatatattattggtttctttgtgatcaaattacttatgtagtgtctcttatgcaggatgcttatcctgttggtagtgtcttccactgtcttgtacgtttaacgatatgcacatgtgagacagagtggctaaatctacttatgtgtgtactcagagattcccctaaattacgagaactcaaacttgttaaggtctgcagatctaaacctgaattattcagtctctatgatatatcagcatatattttcagtagaataacagtgtgatgatatcttacttttatcttagaaccatgtctatcgatctcatcaaccgcggccgtgctggaatgaaccgagtgcagttcctgaatgtctgttgacaagtcttgaaactctcgaatgggtaaaatatgaaggaacagaagaagagaaagaagtagcggcattcatcttaagaagtggaagctgtttaaagaaggtgactatctcctctaaatccactgacatcaacaagaaatttgagatgctcaaggagttgtcattgttgttcaggcgttcacctacatgtcagattgcattcgactgaagtttagttcagtcttcttcattagtcaagttggtctgtgtttgatccaatcttatagacttgtgttttctcttcttaaagaaactagttttccctagaaacttatgttgctcaagtttttattcttttgacgttgtgtattcttatgtcttataacccttttgagtttttatcttatttagctctgcttctcactgcatattcttcgacaagcgaagaatgacgttctaaaatggtcaatgaacttagagacattttggtctttttgtttagtgtaatccgttatgagcttggatttaggtagatggaaatatgaattgaccacgtgtaatcatttagagcaaaatgatattgcaaatggtctaatggactcggatacgcaagaggtcgtggcaatggctaatcacatctccttatatctttaatgtgttaaatatgacattgtggcttcttattattataacccgtttgccttttcagtttcacacaaatggcaacaaatccttatggctgcatatgttttcaatttggatctctttaaactcaaaacaagtattaaggcaatctctatgatgttttgtaagtaccttgaagaggtcttttgtaagttgtaaccttttttatgtaggagaagaatcacatcttcaccttttgagtttttgacttgttctttccaaaatttgcacttttcaattgttgcaatggccaatattaatgatgtgacccaatctatttgtatagccgaaagaacccaaaatacaaatggttttttttttaaaaaaagtttttttgctgaaaatatattctttttttagaaaatttatgttcataattagttattggaatcctaaagtggcatgaaaaatgcttagaaacaagtgggcattaggaatcagtatgagattctttagaatttgtgtttgaaaacaatttctcttttcgactccttcaatgttaagtcctacatgacacgtaagctgtgaaagctacgagcagagacgattttagccatcaaccaaacgacaccgtttctaaacaatatttatttttgtatgtttttagtgtaacaaaattacaattgaaaattccaaatttcgagaaagagagaagacccatcgccgcaccgcttgagtcactcttcttcccggagaagaaagaaacaacaacaaacatattcaccattaccttcttcttctcctccttctccttcgtttctcactccaaatttggaaccctaaatcctaatatccttcgattagttctcttctctatcggaattcttaacgttgagaggagtctgatatttgccgtgactcaagagattccaggtgtttccgacgtatatatttacatatggcgtcgttggctctgacttctcctccctccgttaagattccttcgtatctctcctcgtcgtcttcgtctctcttctcccgttcctcgatttctttcaggaccactgagtctcgctctcgaatctgcgtttctggttacgcggtgagcattgagcattttttttccttcatgttaatgaatgaattcgatattcacattgcgtttcatgtatttgttataagaaaattcaaattgtttttggatgaatctatgctttgatgatctgtgagatttttctggatttagtagatgctattagcagttcgtttacaggctaattttgtgagaatttgtgtgttgtcgtcgctcttggcttgactttgtccatgtatgtgactgtagaatttggaatttggaactttcagctttggaatcttgtgtgttgaatactgttcatgaatgtttggttattcttatgtttgtagagagatgtaagagagatcgtgtgttggttaaattttgtgtctaacattttgaatttggtttcacaattccttgtcattgtgtttgatagaaatgcaatttgcctaaggcactaaacgggaacgctcgtgttccaattattaatgagacgacaattcctaagttctttgattcttcacggttggagaaatcggttagtagaaacaatactaagctcaagttgttctctggtactgctaatccagctttatctcaggtagttttctcgagacctttggttgtcttttttaatcaagttttcttctggtgaagtatatgctaaactcttggaattttgtgaaggaaattgcttggtatatgggtctggagcttgggaaggttagcataaagagatttgctgatggagagatctatgttcagctcaaagaaagtgttagaggttgcgatgtctttttggtgcagcctacttgcactccaactaatgagaatctcatggagctattgatcatggtggatgcttgccgaagagcatcagctaagaaagtcacagctgtgattccgtattttggatacgcaagagctgatagaaaggtaggttctttttgtcttcttcaatggtagatacagtatgtcaagtaatttcatctgatgtatctattgatgttttcagacacaagggcgtgaatctattgctgccaaattggtagcaaaccttataacagaagccggtgcagatagggttctggcttgtgatcttcattcaggacaatccatgggttattttgacataccagtggatcatgtctattgccaggtatcttaagtttcaacctttttgatagacaagcctctactttttatgcaacctttaaaatcttacacaattgtgattacatttcagcctgtgatacttgattatcttgctagcaagtcaatttcctctgaggatttggtagtggtttctcctgatgttggtggagtagccagggcacgtgcatttgctaagaaattatctgatgcaccacttgccattgtcgataaaaggcgtcacggccacaatgtcgctgaggtaaaaatttaaatttaccttcattttatcctttctacacgcaagttctcatgtgttgataatactctttcccacaggtcatgaacctaatcggtgatgttaaagggaaggtggcagtaatggtggatgatattattgatacagctggttagtaaaaattgccagaaactcctctttccgttgatatgtttgttataaacaaaagcttccaaactctaggccataatcgagatattactaaatagagattattctgtgatttgcaggccatacattactaagaaccagttttttatcttcttatttacaggaaccattgtgaaaggagcagctcttttacacgaggagggtgcacgtgaggtttacgcttgctgtacacacgctgttttcaggtaaacccattagcttgagttttaccagttcttctccattttcgtttatgaaactaagagaccgttttcttgaatgaatcaatgtcacagtcctcctgcgatagagcggttatcaagcggtttgctgcaagaagtgatagtgacgaatactttaccagtagcggagaagaattacttcccgcagttaacgatattatcggtggctaatcttctgggtgagaccatttggcgtgtccatgatgatagctccgttagtagtattttcctttgatacttgttggtttttgttaatcggtttaggatcggtctaagttcctcttttttgttctacttcttctcgacagtttctagtctaaccatgtcttgcttctcttactcacctaaagtatgtcacagttctatcttttcttctttttagcataatagagttatgagatatcaatgacaataaaattttaatattttggtttattgaaaataattacattatggtgtaaacattatttctcaggatttattgagaatttctaaattaacaatttccccaacttgcatatttctggcaataaatagttttggcattttatgaaataagtgactaatttttatggtttagtgttctttcttcggttaaccaatttttattgcaaaaaaaaaggaacaaattagggttttatcaagcccgtcgttgcatataaatagtcttttcatcgccgcttgaaacagataagtgtttccttcgtctctctgtggtccgatatgtctccctataatctctgtttcatagtttaatcatattcttttgtggttttgaattcttatgttcgaaaatcttgagtagttgctgtgatgtaactaccgtgtgccagagatgaagttattcatcgttgacggcaaacataaccttagagttctaagcttttcttttgttctattttttggtgtgtggtcgaagtgacgataaagaattcacagtctgtcaatccactgacaacatttgagtgatgttattgtgatatctcgacaggttctgatctactcttaataaaaaccctcccaatgatttttttttattagatcattagttttgttgaaagtggggcagatgatgattatcataaaacaaatgggtaatttgcgactgataatattacattgatgtgtttttcaccttggagaactgatgtccccaatctcatattctaagttctattttttttggtattgataatgaattcgtgaagagttcgatttgtttcttcttgtcataaacattaagccaattagcagagcaagggcgtctagtttaaatgacgtgagttgccttgaaggttggcgataacaagttttgcgattctccgtgcctatcaaattttgtttttcgtattgataatggcctcgaacaagtcgctacattcgttttttttcttccaaagattttgtttcaaaagaagtctcttatgtaataattaaaattcagaataaaaatcaggttatttacgatcataactaaccaaacgcttagacaatatgcttatcagttgagattatagtcccgtaggtggagcaatggtcggatagttaatgtgcagctatgattaaagcatatttgtagactaaatgtttggatggttaaattaaagcccaattatgataagaacctttgtaaaccggggatgggttcaatgtacaaaagtgtatatgtctgaacattaattcaacaaattgatggccatgaatcccatattaggaaggaaaaaaaacaataaaatgaaggtaaagaccaccataatggggacaattttcgtcgcatttttttccaaaaaaaacacgttagtccttgactcatttgaagacaagctcaaagtgatatttgcgagttgtaacggtaaacgattggattccctaactaggcaaataccactatggactttatgtagaatatggaagagtcgaaatctcctgggtttatcaacgtcggtctagcgaatggagacgagatgcacaacaggcgatcactgaatagaaacgagtcgaattaaatggttgtcacgttaggagaaaattttgatgtggtagagttgattaatacaaattttgaaattttacaataaataaaagaaaatatatgcagttatttatgtatatctatggcaaaaaataattgattgttttttgttttaaacaatgtttgcgcctatatggttgtggtaagcttcaaatgtgttacaaactgaactctgacaaatttgtttcaatctctctatagcaagttagtcataaattccaatagcaaatcgttacgcttcaaatgtgttacaaactaaactttgataaatttgtttcaatctttctgtaacatttttcatctacctttgcatccgaagctgaatttcacgatcagaatattgtttttttagattattcatgtcgataaactcaagagttacattttgcatatctggataagccctcactaaatcttcaatagcaactctcacctctttttggatacgtcttttatccgaagccactccaataacaatggtgatcgaaaaaatgccatagtaagtatttttgtgtttttgtgtaagagataaaaaacgctcggaatgaaatattttatgtcgtaaaatccacctcgtggatctttagggaatcaacattcttcgagttcttattcaaaagttccaacaataatatcattcattcttagttacaattatataatatacacaaattgtacactagtatactgtaacaaaagagcaacaagtatctttgatttggttgtaagaaattgctactcttacccataactctatttcaatccacaattttgatacaaattatctgtttcttgatggaataattaccaagtaccattgttaacaataatgttttatagcttgaatacccataacaatagtgctcccctttggtgtctatgaaccttttcgatgcttcgtaatcattacaaaagttaagcagaaactattttgaatatgttgtgtattggtcatccataaggttccaaaatactgcatcacttatattctcagcaatcgcgagctttcaacaatacactaaaagtttgattataaatttattaatgtaatcaatagttgtttttctattaaaaaaaaggaatgaaactaaatattatttacttaataatgcaatcaatagagttgattattcgattttagaattcttcttataaagattgcaaaatttatttagaaacttttagaataattttacagattcacatagattttatggggaatatcacctttaccctaggattttgaaagtcttattggttcaattttttttaaaagttaatcaaccaataacactaaactttattataatctgaaaagtcagtaactcaagattttgattttttttgtttgttcaaacattttgaatgaatttctaaaattattaattcaataactcataacttttaatgtacgtaaactttttataaatattgaaccagtaacacttacttttgataaaacatttataattcaagatttaagttataaatgcttcatagttaacagaattataacttaagcatttcatgtacaactctttaagttataaaaccttcacagttgacagtgtcaaaagagatttgtgtgacgtgtgaaattgtgtgaaagttgacacgtggttaaaatagtttcagcctatattgttctcgtttaattttttacaaaactgttcaacctcaaactttgttcgaactcactaagatgtgcttataaacataaaactctttctaacctttcttggtaagaacgttgagtgtttatccttttataatcgtatgtttcccacatttacggaaaaagtgagtaatttgccaattggatcagcaagagaggttactactttatgtaatcaattacttgtaacccacacaatatacacaagaactcttgatttgccgcaatcaaatatcaactgctgcacaaaacataagttctacataactgctgcataaaaatctcatatacacaaaagtcaataacccaataacattctacataaacaaattcatagcttctatcacagtatcatcaaataggatcgagaaaaataaacgcataaccgagagggatagcgaagatttataagcaggacagtgaggtgatgaaattgcagagaagctgctatgtaaggattctaaacgagtttgaggagattctgcttcagaaataccagcagcggaacatagagcgagaggaagccatcctctggagggggaaagcggacgtctttaaggctaccttctccacgaaagacacatggaatcatatccgaacatcatcaaatcagagggcgtggcatacaggagtttggttcgctcacgcaacgccaaaattctctttttgtgcttggctcgcagttaggaatcgactttccatggttgatcgtatgatgacatggaacaatgggacacccacgacctgtgttttttgctctagccctatggaaacacgagaccatctgtttttccaatgccactattcttctgaaatctggacttcaatcgcaaagaatgtgtacaaagatggtttttccacagattggtctgctgtggtgaattacatatctgattctcagcctgattgcatccagaatttcttatctaggtacacattccaagtctccattcattcaatcacggtgaggcgtcacgttcagcttcaaacctcatgcgacagatagacaagacaattagaaaccagctatcgacaatccaaaagaaaggggaacttcgactcgaaaaggggctgcaagtatggttcgccatgcgtccttagcatcctccaagaaagaagactctgtttttgctctctccattctatttactctgtttttgttctagttctgttttcttttattatcaaaatctcaaaaaagctgatgtaaaaagtatatttttcttttgaatataatttgacattttattcaaaaaaaaaaaaaaggatctatgagcagagcaaaccttatgcatcttcttcatacccaactttctcatatggatgttaaagtttctaaaatagcacttaatctgcattattattggctaaaatgtagagcacgcgaaaattctgggcgtgtaacatgaagaaagtgaattttttatatataataagaaacataggactggatcagactgggaaccaagatgaatattcataatggtgaatccttacaaaagactacacagacacaacaaatgagttttgagaccgtgactaggttgattagagatctcaaatgctagagtcatcatcaacccagaaacaagaatcctacttttactgacactcttgattgttacacgcagaaataataaagacacaggaaaagagaattaactgaactcttcaagacttttaaaatggactcacatgatggtgcatcggcccttttcttcgtttggttgcgctggcatttgctggaaccggtgtgactctgagggattgtatgtgaactcagatgtgtcaagcccatactgtttcaaaaaaaaaagcaatcagtgaatctcggtatcgcactaatgcttttttttaatttcagcacgttataatcttgttaccttttccctcatacgtgcactccaagggtcactgcggcttgggcgttggtccaaagtaggagcaactgggacaccagtgacaggggcggcttggcggttgatgaatggctgcctgatttgttgccttggagcaagatattcatcatcactgtcatactctgctggtgtattagctgccctgaccataagggcaagcaagaagagtaaagcctgcgagtaaacaagacatcattaagagtttttaaagatgacatgtttctattgccatacaacagtctacaaacacttccgcagggatatttatctttcaaagatagtttgttcttgattttcaatgatagtctgaacttgtgcttgctattacctcgaaaacaactgctcctagagctacccatcttacaatcttccagttctctctaaggaaattatatatcgtatcgaagtttccagtcctgtcagaaggaagttcctagagaacaataatacaaaacggttagctaagtacttgtgcagtcctgtctgcagatcatgtcaagttataaggcaacatgaagtctaacccaagagggaaacagacaaaaaaagaagataactcacatctctccagctgttatcgaagaaaataaatgctgcgaatccaagctccaccaagatcaacaagatcagaagaagagagtactattctcaattaaggaaatgaaaggttaagacttttagtttgcttaaggatcctatcataactaagcaaagataccaataacctgagcatataactaaaggtcaaggcagtatttatctaacaggaaatgttggataagaaaagcaagttaagtaattaggatacgcaagataagcagcagacactcctcgaacaagtaccaacacagccacagcaagaaataacaaagagagccacaccaataccaatgaacaagtatatgaacctgcatgataaaacaaaatcaaagaacataagaactaaagaagtgcaacaaaccaagactctgtttttgaacccaatatataaagtaaaagacgataatcacataccacgctttgggaagattgtcaaagatattagaagacagtgacacagccataagaataggcctcccaaacgaaacgtaactttgatctccattagtcaaatcgaatgtaacagaattatcggtaactctcttgtactcaacgaataaatagataccataaccaatcatgccaagtccagcaacagccaggagaaagttgagtaacttcaacaaacactccaaacaacctctacaagccatcttttttttgttttcacgacttagaactgttgtatgatttacactcagcgtttccctttaattcatcagtccaaagaattatcctaaaagaacaaaaaactaaatttcaatgagttcataataacaatcccaaagatagatcaatgataaagattctatctaaaatatcatcaaaactaagaaatgaattttgactaaaaatcaaacttcaatgaaattgtgatgtcctgcccaaattcaattgctatacacacgaatcaagcctctcatagagctgagaatgagagatacaccaattaattttctctaatcgacataaaaaacgaccaaatcacagagatatctcgtaatctaagagaaatgattccaccaatttttttttccgtgaacaaaattacgaacgaataagttcagatcgggagaacaaaatcgaaattacgcaatcgaagcacgagattgagagagtggaagaagaagatgatggaaacttacggagaattgttgagagatgattcttcgatgttcgcgatggttttgagtttttttgtgttgttgttgttcttgtcgccgagaggaaggggatgaaaaatccaaggatgggaaaatatttgtttggaattttgctgtgtcatacaaatgccagctggcaatttaaatttgaagatgaagtgacaagtccaatgggtagataggccattttagtttttcaggagcccaactacgaatacgtgtgtcgttgaataatttcagtttacagattctttatcctttctgatttctgtcggcaattaaaattagttttgtgtggaatggaatgtactacacatgtctatatgtcctaaagactccaagacattacaaaatacaaagctttagttttatttttttgaagttaaatttacaagcacttttaatatttacgtataaaatcttttctgaaaataattgaagatttgtgtagtccgttcgatttgtttacaaaaggaagctatgatagagcgaaattaacacgaaaatgaaaatgctttgttcatcgcctaaaaggcagcttaaaggatttgtctatcctacgaaattgtcacgagctttcacgaaccaagactgttctgtgggttaaacaatatttttatcgagaaaacgtattttgtatgtttatgatctgcgttaaatatcttatcaattttttattaccttgtccgtcaaaatatccaaaaaataatttagaaattcggtttataaaaatgttgttttcaaagtttaattgttagaattgataatctcataatgatcatttcgaaaaaccaaaaaaattatcacattgtatgaaggattttgacaaaattttattcggaaaatcactctcaacaacataaataaacaaaaaaagtttgttttatataaaaaaaatcagtataaataggtaaatgggattactttacacactaaaaagtaccaatttgagttaatactaagattttgggttggacattaatacatcaaagtcaccgattctcatttgaacaacttcacttctccgatcaacgatcaataaacgtaacaatcactccgatgttcctaaaacaccaaaatgataaagcgttagctctcgagatgagagaacttagttatgaattgtttttgggtttttagatttttacaaaaaattagtagtcagattagtagtcggaaaatcactctcaacaacataaataaacaaaaaaagtttgttttatataaaaaaaatcagtagtcagattactttacacgcagtcagattagtagtcggaaaatcactctcaacaacataaataaacaaaaaaagtttgttttatataaaaaaaatcagtagtcagattactttacacgcagtcagattagtagtcggaaaatcactctcaacaacataaataaacaaaaaaagtttgttttatataaaaaaaatcagtataaataggtaaatgggattactttacacactaaaaagtaccaatttgagttaatactaagattttgggttggacattaatacatcaaagtcaccgattctcatttgaacaacttcacttctccgatcaacgatcaataaacgtaacaatcactccgatgttcctaaaacaccaaaatgataaagcgttagctctcgagatgagagaacttagttatgaattgtttttgggtttttagatttttacaaaaaattagtagtcagattagtagtcggaaaatcactctcaacaacataaataaacaaaaaaagtttgttttatataaaaaaaatcagtagtcagattactttacacgcagtcagattagtagtcggaaaatcactctcaacaacataaataaacaaaaaaagtttgttttatataaaaaaaatcagtataaataggtaaatgggattactttacacactaaaaagtaccaatttgagttaatactaagattttgggttggacattaatacatcaaagtcaccgattctcatttgaacaacttcacttctccgatcaacgatcaataaacgtaacaatcactccgatgttcctaaaacaccaaaatgataaagcgttagctctcgagatgagagaacttagttatgaattgtttttgggtttttagatttttacaaatgattcttgatgatgatggaaataatctgctcatgactcttagtctcttatagcttctaacggccttctcacatctgcccgttattagcctccatgcgtcatttctaaatcttttttattggtcacttgattccacacttgccaactcacacctgctgtggttctgcaacagacatgactggaccggactaaataaggtcaaaccgtatcgggtttggtacacacgtggccgatcatcatcaaagggcttaccaatattacgatggactcgaccacagctgatagaagttccgatattacaaaaacagaaagacagaagggtttacctatgattaatgtctgaaaaatttgatatttgaagcgaatcaacaacaacagtcgggttcgtgaaaaaaaaagatttgatcggctaaacttggtcggtatgattctcatctatctggttgaaattcttcaaattgttgctattgttgtgtgattttcccctttttctttgaactttggatccgtgtgaaatcaattctggcgattgggattggtatcactgtatcagtaatatcagattttcttcgaatttcttggaagtagttgagctttgtcgaattcaaaccttcttcaaaaaagaaaagaatagaagaatgagaagttttctcaaatttttggaaaataattatttttgtcacagttagttagcgaatggagaagtagaaaaatcagatatttagtgatactttcttggggattcttttgatgtttaattgaagattggctcactgattttatctttgaaggtcttagtaaacgttaatagcttgacgttatcattagaaactcaaaaaacttaagtctctctctaattattagctttcaggtttatcgtggaaggacttgtcaatggcagacgtacctggatacctgcgcacttgtttggatatggggaagatagctttcttagcaatccttgtatctacagggattgtgttgcagattctggtatcccccaagagattctttcaagttttgatcctgcctgtttatgcttctcctgccaatagtagattcatacttgtgtttaaaccctttgttgctaattttgttccaggcttgtgctctgttcaataactggtggccaatgctaagtggtgagttgtttcgctcgacctccaatatctctttgttggttcgatctttagtcttgcaaactgcattttatatcgatgaaagtagtctgttttaaatcttgtttggttacataaaaagtgtcagggaacttggaaaaaccattattatatcaatggtgatggattttaaactctttcttgcggttaatcagaatctgatattgctttgcagttataatgtatgtgctcctcccaatgcctttgctcttctttggtggatcagacagtacatctctattcaacgagtcagataataggtaagcaatttatatacaggcctccattgtttgtttaggtttgcatttgcatttacgttacattccaagtgaacccacaactacaattatcgactttctaagtctaggtatatcaaagaaactcgctgagcttacatgaacattttcttttatgcagttggatcaatgcagccaagttcttgactggtgcatcagcagttggaagcgtcgcgataccatcgattctaaaacacgccggactcatcggttggggcgcattagcccttgatctctcatcctacgttgtcttcctcgtggctattttgggttacatttgcataggagatgccagtgacaactattacagctacatttaaaaagacacacacaaattcatcatcatttgtttaaacctcaacaaagtctcagccttttatcacttccccgttcgattgatgcttcgaaacgaaaacatcttgtttctatggaatgactcactgattggattttcacaagtttaagagtttgtgtgtcaagtgtatgtatgaatgattttttttttgggtggttttgttacgttttgatgtatagaacatatttattatttggtggaatatatataaattttctttacaaaagcatattgaaaaactgagtcttttagataaagaagctgtgaaaagtgtttgaatgcgagctctctgtgtaaagaaagtttgtggctttctctcaaaattatctctcagatcttcaatatcttgtcgtcgatactatggagataagataccgaattacggaagctatcgtcgaggtttctctaatgaagaagctcttatacttcgtcgtttatctgagggaggtcttgtacatgcacgccacttgctcgacaaaattcctcagagaggaagtatcaaccgtgttgtttactggacttcgcttcttagtaagtacgcgaaaactggatacttggatgaagcaagggttttgtttgaagtaatgcctgagaggaatatcgttacttgtaatgcgatgttgacgggttatgttaaatgtaggagaatgaatgaggcttggacattgtttagggaaatgccgaagaatgttgtttcttggactgtgatgcttactgcgctatgtgacgacggaaggagtgaagatgcagttgagttgttcgatgaaatgcctgagagaaatgtggtttcgtggaacactttggtaacgggtttgattaggaatggtgatatggagaaggcaaaacaggtgtttgatgctatgcctagtagagatgttgtgtcgtggaacgctatgattaaagggtatattgagaatgatgggatggaggaagcgaaactattgtttggggatatgagtgagaagaatgtagttacttggacgagtatggtatatggttattgtaggtatggagatgttcgtgaagcttatagattgttctgtgaaatgccggagagaaatatcgtttcttggaccgctatgattagtgggtttgcttggaatgagttgtatagagaagcgttgatgctttttcttgaaatgaagaaggatgttgatgcagtatcaccaaatggtgagactctcatttctcttgcttatgcttgtggtggtcttggtgttgaatttcgtcgtcttggtgagcaattgcacgcacaagttatatctaacggttgggaaactgtggatcacgatggaaggttggcgaaaagtcttgttcatatgtatgcatcatctggcttgattgcttcagctcaatctctgcttaatgaaagctttgatttgcagtcttgtaacattattatcaaccgttatctaaagaacggggatttggagcgagctgaaactctgttcgagagagtcaagagcttacatgacaaagtatcttggacatcgatgatcgatggatatctagaagcgggtgatgtatccagggcctttggtctgtttcagaaacttcacgacaaagacggggttacatggacggttatgatctcaggtcttgtccaaaacgaactttttgcagaagctgcatccttactgtcagatatggtgagatgtggtctgaaaccgttgaactcgacttactctgttcttcttagttctgcgggagccacatcgaatctcgatcaagggaagcatatacactgcgtgattgcaaaaaccacggcttgctatgatcctgatctcatccttcaaaactctcttgtctctatgtacgccaaatgcggagccatagaggatgcttatgagatattcgcaaagatggttcagaaagatacagtttcatggaactctatgatcatggggttatcgcatcacggcttagcggataaagccttaaatctgttcaaagagatgcttgattcggggaagaaaccgaactctgtaacgtttctcggagtcctctctgcttgtagtcactctggactcatcaccagaggtttagaactattcaaagcgatgaaagaaacctattcgatccagcccggaatcgaccattacatctcgatgatagaccttttaggcagagccggaaaactaaaagaagcagaggaattcatctcagctctgcctttcactccagaccatacagtctacggcgcattgttaggcttatgcggactcaactggagagataaagatgcagaaggcatagcggaacgagctgcaatgcggttgctagagcttgacccagtcaatgcaccaggacatgtggcgctatgcaacgtgtatgcgggactagggaggcatgatatggagaaggaaatgagaaaagagatgggaataaaaggagtgaagaagacaccaggatgtagttgggttgtggttaatggaagagctaatgtgtttctctctggtgataagtctgcaagtgaagctgctcagatggttttgccaatcttttgtggtaatgaaatgcttgaggaggaagaagagaaaccgttgagtctatgccattgctgagagttaagcacatatgttcgctatagtttgtgtatgctcacaacaactttgtttacaaaaaataagaaaacgtaaaaaatacaaattcacttgtaattctgcttcttcactttgacctccaggaaccatgaccaaacttggaaaataggtacaatgcaaaggccaaggatcaaccacagaatccaattgggttttactgatcaacttattctcctccacaacatagatccaagctcgtccagtttcatcacaagaacaaatgacgagccttttaccatcaatgaagtaacttggctgagagtaggttttggtctgtactaaatccggcatgttaggaattgacacctccatgaaactcatccagttcacatccccagcataccaagatgacgtttcaattcattttaacaactagatccaagatttattcggttagcgtcaatcccaaggtagtggtgcgtgagttaaccaggtttaacagctcagatacctataagcttggttgataccagtggattcttgctttgtagcatgggtgaaggagccgttgtttggaacccctggttaagacagactagatgcatcgagccccgaggttaacgaacctagtttggattttcttggcataggttatgataataataagagtcagagggttgaggaaattgattacaagaccctttcggtttatatggaggacttagactctaccgatacgtggaaagatgaagatttagacgaaacaaaatatagtgaacttgtgaccattaactattacttaagggttgtatcgttgaatggaagtttgtattgggttactcgagagaacgattctttaagttttgtgacctaccaagtggggagaaccatgctcgcgatgctcttgtccttagggtttttagggatcggaagatcggttttcgttgttgaagcagtgccatgtaacaacgaagattaagatttgggtgaccaagaacaaaattgataaaggcccggcccagagctggaagcttctccttgttcgccattgggtatattgttttcaagtcacttactactcacttacgttttcaaaatgactataaagttttcccagttggggtatatattattaacctattgttgttcatgaaaatctccaaaatccctcattttagtcttttttagtcataaagtctggatttttcttttccgtgagaatctggattttataaaatgttaactagttaatatatttatgagacccatattctctccattctttattagatttttttttggcagatcgatggttctttcattattagccatatacatgtaattcttatgttatttaattttatgatatagcaattaaaaaaaatctcatataataaacccggagatgtcaaacctatattatgtaaatgcaggctaagatattttaaatttaaataatgttttataaataccttacaattaataacataactttttcatctataaataaagttacaacttaaatttattttgtaatctctttctccatagcttatactaccaatcatggaatggtatcttaattattgtttgattgacacaaaaaaagcttttcaattaaaatttaacaattgtaatgatttatattatatacaaataaagttgcatttatgttatttataaatttagccttacatatttgctggtttcaatttaaatatttatatatgacaaaatttactggtgttaaaatacatttattatatatgtttatatatatatatatttgtttcaattgtaaaacaaaatgcattgaatataaatcctactatattatttgggaagtacatcttaaatgtaaccttaatttttgtaagtaattacataggtacgccattagaaataaaattttaaagagtaaattaatttatctctttaaggattaaaaagtcaaatactaatttaattaattaaatttaattaaaaaaaaatacattattaatttctaaaaataataaccaatcaaaatcaacatataagatttgatatctaaattttaattaatttaatttaattagaaaaacgaaatacattattaatttccaaaaaagtaaccaattaaaatcaacaaattatatttgatatctaaattatcatattaattttttattaattattatagttcacttctcatctttatatgattctatttttgcggaaaaataatatcatcattataaaaaaataattagagtcttttcgcatatgccataatttgaatttttaaaaacgaatataaactgttcaatacatgaaaaaatattataacgggtgaaaaatagatttaagaaaactttctactgagtaacgagtcataatttgaaatatttatattcaatttcatacatattatattgaaaatttataatcttatatactacaataattaataacatattacatgtgatttaatttttaatacaagctagaaaatcctagaattgacgggtttagatcaatattaatacaagttggtatactacaggtgaaactcttaaattaacaatcaaactacaagtgtataatcttaaacactaaacaatatatataatatcaacaaaacatatacaactcacagtttactatacatttaaaatcaaataaaataatatcatatatttttaaatcatctttacaataaaagtttttagtttaactaaaatataaggctttttggatctaaagacgggtcatcaaagatttcctaaactgaagcaaaatatactgaatattcaaatatctatctgttaccaaattataaacaaataagttaatttaatattttatatacaaaatcaattaaatcttaatcacataaaaattagcacacaaaaaaaagtattcaacaattaaaaaattatcaaatctctgtgttatataagttttgatactatattcgaataaagtgtaatataccttttcaatttgtattctttaactaatttaagctaactaatatatttgctaatcttatacctatcaaaaccgactatagtttcttatctctatagtatttttgcaagacttttttggtggatttggataaaagtgcattcggatcatatggtacatttccctattaaataaatatggtgcactcctatgttattagctaaaatatttagaatataattcagagtcatatcattaataaaattaatattaataaaataaatggctttttggcaagacggatttggagggacgggtttttgaatcaacattaataaaaaagtaaaatataattaatccatagtttcaatacgggttaaatctttaatttattattttctaagaccactaatattaaacatatcaaatcatcctaatttagaaaagattatataaaaccaaaaatgttatgtggtatgtataatgttaatatatataaaattaaacaataaaatataaatgtattagagaatgatacaatttgcaaaatttttatatataaaaaataaatcttaaattttaaaattactacgttaaaaaaaaaatcacgggacgggtaaagaaattacagaacgggttttattttggaattgggttatatggtggatgtattggaattaatatttataaaatattaaaatattattaatatgctgttttaataggggttaaaacttcagttttttaacaattgtctcatggattcgtggtatagcgttacttaatatcaattataaactgtaaaatataaatattttataaaaataaaatttgtaagttttaatatattacttttaaaaaataaatcgttccgcggtataccgcgggttaaaatctagtaaaatctttatatgaatactacgtgatttcgaaaaaggttttaaaattgaaaatacaatcacacatgattttactttggatttctaaatcagttaaaatccatttgttgtttatttactcaaaatcataaaattggaaaatatcaaattcactaagatatatactttttggacaacttaaatataaataatgtatataaaacaaaaggaactatacatattattcttccaaatttagggcaaggctttacaaaaaaacagagacctgatgaagagaggaaacgaagagaacaaccacaagacctcctcatcatcgtctacacaacgtcttagccgccgtaaaatctcagccggagaaaagtccggcaacgtcaatatccctctggatctaacggtggagatactcaagaaactaccggcaaaatctctcttgaggtttcaatgcgtctcgaagcaatggttatcaatcatcagcagccgtagagacttcatagactcgatcgtgactcgatctttgactcagccaccaccgcgtgatatcaaactcatctttcaccaccaagttctttatccgggacctcacttcttcatcttctcgtctacttaccctcaaaatacagacaaagaatcattaacaaccagagccagctcgtatcactatgtccgtggcttgatttgttgttggtcacactgtcctactacggtagacatatataaccctaccacgaggcagtactataccgtaccggatactaaccggtaccaatacatagaaacttgcttctttggatacgaccctgtcgaaaatcaatacaaagtaatggtcttaccaaaatactatatggaggagtcgccttgtcaagtattcacagtgggagatcccatagagaagccttggagagacatccaaggcattggagttcactttcttttgaaagatgctgtttgcatcaacggtgttatctattaccaggcaactaatgaatatggttccacatatttcttggtgagttttgatgttaggtccgagaaatttaatcatgtcaaggcaccgaaaatactgacggatcatccttgcactttgataaactatcaagggaagttaggacttataatgtgttgcaagaagggcttggaaatttgggttatggaggatgctgagaaaaaacaagattaatggtccaagattatcttttatgagatggagggtttagaaaaatggtatattgacggtgtcactcatggtggtgagattgtttttgtccattgggggttaaaatgttacaatgcattatatgttatctattttaatccaaagcgaaacagtatgagatacgttgaagtcgaaggtgcaatggtggagaatatagaggatggacataaatgttatcttcgtacatgggctgttccgaatcctgtcgagaatacaatgcgtttgtaacttcttttcacaaggtgtactttcttatacaaattaaacttatgttatttttttagtcacgattaataaagcaatgtagctcgtgatacaataaagcggctggtaatcatgtcgagaatataaatatcattgtaggattcgttgatattttctcatattgtcaaattgggttatgatctatacaatatataagaagttaagatgcaattttgaacatactcagccttttctcacttcccaacgtactcggttactacgaaacaccgataaagaactcacatctccaggcaaagatggttatacatcagttggtctgtaggtgcggattaagttactaggtggtgtatcatacgtctgcggattgaccatttgtagtctttcagcctccttgcattgaaaccctatatgttttatagcctatatgtgaactgtagaaagatggttcaattcaatataatttattcatgttgggaaatacaactcctcaaacagggaacacaggatgataacatgtgaaacataaaacatgtacaaaactcttttgttgccgaataacaggataaagcgttatgttttatttccgaatcggattcaggacaactagattttaaccgagtccactaaacattcttcaatctagtctgctctaaacaatcaaaaataatttatttttgaaataattactagaatagaacacaattgtatgtttattcctagaatagaacacatcttttttttattattcacatgttttcagtacttgtgtaattacaattaacacccttgattagttttaattaaatattattattaaattcgtttttaattaaaaaataaataagaaaacagtgattatccatgtcaccaatccatgtcatttaccctaatccacgtcatccgaaaccaaaaattctcttaaaactttcagtttctcattttttcagcatatctcactgttcatccgcgcaaaaagaaaaaaaaaaaaaagaaattgtcgctctcttctctcgttcagtcgacggaaccctaattttgtcgccgttctttacttatctcgtctctttcggccaaaactctttcggtggtgtcaaatttcaagtcatcaaaaatcaaaacccaaatcaaagaagatgtatggaattttatatgatttgttacaagtttgagttgaatcaagaataactactcttttactttgattttatatgtctctcgtttagttttcctctcaatcgatctatttagagatatttctacttctatcaatgttttgattcatatggtttcgtcttcctcctatgtatctctcaaacatattcttacgtttcttaatttgattgttgttatttggccaataaatttcatattgtcttccccagaaaaatgttgcttttcgatttgtattataaatcagccgtaaagtgatgtaactcagccgtaacgtgatgtaactcagccgtaacatataatttacacaacctttcgtcttccctgaataataactcagccgtgacatataatttaccgaacctttcgtctttcctgaagcatataactcagccgtaacatataatttacactcatctttcatttgcccttgaacatataactcagccgtgacatgtaaatttatagatgtcttcccttaaacatataattcagccgtaatgtaattttacagaacctttcgtcttccctgtaacatataactcagccgtgacatgtaaattgactgaacgtttcgttctcccttaaacatataactcaaccgtaatgtaattttatcgaacttttcgtctttcctggaacgtataactcagtcgtgacatgtaaatttttagcttcctaaaaaaccagacaagaatctcgtaaccatttatttttcgaggccgagagagattataggctaaaggtttagaacttccttataatttcaaccaaaaacgaaaaatatataaaaaacggataaccatataagaaaaacacaagtaaggaaattgaaattgaacttgtaactctgcttcttctctttgacctccaggaaccaggaccaaacttggaaaataggtacaatgcaaaggccaaggatcaaccacagaatccaattgggttttactgaccaacttatttccccccacaacatagatccaagcccgaccagtttcatcacaagaacaaatgacgagccttttatcatcaatgaagtaacttggctgagagttaaatttgggatgttctaaatccggcatggtaggaattgacacctccatgaaactcatccatttcacatccccaccataccgattatcaatcttgttctttgtcacccaaatcttaatcttctttgttacatgacactgcctcaacaacgaaaacctatcttccctaaaaaccctaagggcaagagcatcacgacgacggttcttcccgcttggtagatcacaaaacttgaagaattcttcttacgaaaaattgaagctaagtaagaagaacaacaagggataattgacatgagtcttgtgataatgagcaagccaatacaaacttccattcaacgataccacacttaagtttgttaagcgaatggtaacacttccctcagtaattcgtctactatattttgtcttttcaatctcttggtctatccacgtatcggaggcaaagtcatggattttccacgtatattgagagcctaagtctttcatataaaccgaaagtgttttgtaaacaatttcctcaactctcttattattatcataacctatgccaagaaaatccaaactaggttcgttaacctcgagcttgatgcatctagactgttttaaccaagggttccaaaccacggctccattacccacgtcacaaagcaataatccactggtagcaaacaaatttttatgtctttgagcttttaaaccgggattatttaaggttaactcacgcacctctaccttgggattgacgcttactgaataaatcttggatctagttgataaaacgaattgaaacgtcatcttgtgattgttgatgaacgtcttgtcgttgaagagagcgttccatcgtttgcaaacggttttgaatcggtcaagagaagtaggagggacacgagataggatctcttcctccaaatcccatggaagcttctccttattcgccattaattagtttgtgtaagactgtaagtcacaatactttttcatatatatagacgactctttaatgataagttttcttaactagggtttccaactgatttgttcacatataaatctccaagaataattctatatatacatttttggaggggatttttgaagataatgttgaagatttgaggtataattcaacaattaattcaaatgggtgggttttacccagtttaactctgttcggatcatggataacatgtttaattctgttctgatcttggataacattaatttttggaaaagttacctaaaaactaataattaaaaacgaaaattaatgatttaattaccaaatttaatataacaatatctctaaactaaccatatttcttatttaccttaactaatttcctaaaatatttctacctaatttaaacataaatatataattcttctttcatttttatttgatcttatactttatttatttgaattttatataaaatatatatagttaataaaatattatattttttctgaatatgatgtaattcaatttttttaaaacggacatatattattcaacctatgaagaaataatatgtgtacaatgtcctacatcgcttagaaaaattgaacaatggttcagacccatattataaaaggaccaaaatgattctgattacgaatgagcaggaagcttgatttatcaggcgtacaaaattaaaatagttatccgattttactcggattttttattttaaagaattgaaactttaaaatgtttcaagaaattataaatattattactttatcaaaagttaaatattttaattttaaaaactttttataaagtttatctttaaaaatgctttaaatatttataattttaaaacttataaagttttaaaaattataaattgaattttacaagaaatttaaacattataaatatatataaaatatattaatacgagacgatatattacaggaaaaatcttaaatataacaatcaaaattcaatgatgaattttgggtcgatattgtatttttttaagtttcaaattttataatattaaaattgataagaaaatgacaaaattatgtttaatttcacgggactgggttatatggtaggacgggtttgggtggataataattacgattttacaatgtcccacatcgcttaaaaaaattggaaaatggtcaagagccatactataaaaaggaccaaaatgatttcgattacgaatgagtatgaaacttgatttatgaggtgtccaaaattaaaatggtttgtttactagggttatttattttaaaaaattgaaactttaaaaagtttaaaaaattataaattaaattttacaagaaatttaaacaatataaaagatattaatacgtgacgatatactgcgagagaaatcttagatataacactcaaaattcaatgatgaagtttgggtcaatattaatcttttttgaagtttctaattttataaatatttgaaatttataataaaatgacaaatttgtgtttaatttcacgggacggggttatatggtgtgacgggtttgattggataataacatgggatagtatgctatggaaaaaaacatataataataatcataatataattatataatcttaaacactaaacaaaattaacaatattaaaaaaaaaaaacttaaaactttaatttttttaaaacacattttgattcttttataagaaatttaaacattataaatatttaaactttatactacgggtgaaattttagaattgactgtttgggttgataagaatttgcgatataactaggagttaaattctagaatgacaatcaaaatataattatataattaaatactactacgagtgaaattctagaattgacgagtttgaatcgatataaatatgggatggtgtactacgggtgatattttagaattgactggtttgggttgataataatttgcgatagaattaggagtgaaatcttagaatgacaattaaaatataattatataattaaatactaccacgggtaaaatcgtagaattgacgggcttgattcgatattaatatgggatggtgtactacgggtgatattttagaattgactggtttgggttgataataatttgcgatagaattaggagtgaaatcctagaatgacaattaaaatataattatacaattaaatactaccacgggtgaaatcctagaattgacgggtttgattcgatattaatatgggatggtgtactacgggtgaaatccgagaaacaacaatcaaaatacaattatacaatattaaacatttaacaaaataaacaaatacaacttaaaactttaaaatttgagttataaaatttcgtctcgcggtgaattatacatttaaatcaaacaatagcataaatttattaaatcatcctaaaaaatattcaattattttttatttaataaaaatataggcccgcggtataccgcgggttaatatctagtattttacattcttttttgttttacttcataatatctgaattttacaaatctagagatattcatgagatctatattctctccattcgtttttattatttgttttattttttattttttatattgtcagtaaatctatatttttgtttaaaaaaaaatataattcttaaactaatttctacatgcattaatttaaaccgatgaaggaactatacaattattaatcagggatcgagcattacattacatctagatagtagaccatcgaggttcgaaactctgcctttcactctacagtctatagcgcattgcgaggcttataatcttatatatgcgggctcaactggagagatagagatgcaaaaggcatagcggaacagcatgtgatgcttttgctgacgctcgaccttgttgatgaaccgggacacgtctgtgcgacatgtatgcgagtttagagcatctcctatggtattcaatatcttgttccaaactttatatttggtgaaaaatcactccaatgatgctctatattttgttctaaaaacatatatgaacaataatttggagcaacactaatcatatcatacgaacggttcatatcactatttttatagcacaatttttgtttcacaaagtacacctcaattttatatattactttttatacattaaaaattatatatttaaatcagtatctacttatttttataaaatgtcaattttcacactaattatatctacaaagtaaacaccactctttcacattgtttgatgtatgcatgttaaatttcgtatagccttttcaatagtttatattgttttgaacgttctctccaaaatggactttcttatagccttctcaatagtttgctctaagatgatgatacttaaataaaaatgtattaatcatttgatctctgatttatgtattgtaatgaaattttattagatatttgttttaaaataaactatctatgtagaatttgtaaacttcaaaaataaaggactatgtgaaaaatttaaatataatatacttagaatatttgttttagagcaaaaaaaataaagcgaactaacaaactatatatagagatctctagatttagagttaaaaataaagtcagccataggaaatggtattaaggaggtatatataagatggagacggagatgaggaacgagatggggttaggagtgaagaagagaccaggattttagttggatcgtggttatgatggaagctcatgtgtttctatctggtaataagtcagcttgtgaaattgctcggttgattttgccaatcttttgtggtagtgaaattaggaagatgtgaaaccgttgactatctgtcatcattgctgaactgaagtgaagcacatattttttttctctttatttttttttgtggagaactgaagcacaacgttacatttgtctagttgtatttgtttactaatttttttttatagcattcaaatacaaattatttttattattcttgtttttgtttggaaaattgccgacaagaaaaagtttaaattatcaccacaattgcattttttcttttaatctgggtagagaattggagttgtatgtaaaaactaatttcagttaccctatttcttactaataagattaaaaatatactaatcgatagattaataattgttaattatcgatttcgttaggaaatcacaaattcaatcaaataacaaaggaactaataaaatctgttatagaagggacatattttcttggtttaacaccaaatgggcttataaacaaagtagacattttttcaaaaataatttgagaaataggtagtttttttagaaatttgtgaaataaacattctttttactttttgtgagatagagtttatgtgtaataagctaaaagacaaaaattttgtcaaataccactttaccctttactttatatgagaaagttttattgtgtttccaattttatagtatttaaatatttagactaattattatattatagttaaaaaaaaatttcatctttatttttttgtattaatatttgttaacttccaaaacaagatgatttctatatattcaattatcaatctcgtacactagcattaaacatagttttgtacactaacacttgtataccaaattattttatccaacaatatttatataatatatcctaaatcgttaaatgcaccgactttgactcatatttattaattaaagtaatgattgttcataaatttatattaatatgatgttgtacaccatcatgtacatcattaaataaccatgatagtgtactaatatttgtatacttttatgtacactaatctcgtatactattatttaaactttgttttgtacattatcacttgacaaaaatggttctattttttgtatatggggtgtacaaagtaggtgaaggtatacggtattgtagatggtgtacgaggtgatatatggtatgactcattatctcatcatttcatatatactattaatattatgtacaccatattttatatcatctccgtataccattgtattatatagttgtacaccgctatatattgtcgtttgtacaccactttatacattgtcatatatcgtattacgtgtattacttcttagatcaatattattcattttctacatacactattatttgtacaccacttttttataatatcgcgtacaccacgaggttgagattaaataaaagaaaatgttacatatttatgatagataacaaaattagattttttagattcatataaatcttttaaagattatatgtttttatggtaattattttaaaaaaaaattatagcaaaacaaactaaatatgtataagtaaaaataagaaaaagaaaaagtaagttttgtctttatttgattacatgacaaaacaagagaaggttataaaggtcatttacaaattagagaagaaaaagaaatgtgtctattctccatatttataaaaaaaactacctactttacaaattatttttgtaaaaagtatctacttcacaaaatatctcaatcatttaatctgattttagaccgacattataatcttacctttcacacaacaaattcgttcatttgttgaaattttgtacatttccatttcattaaaactttatagtatatactataaacagacaaaagaagatataatataaacttttgtatatgcgaatttaggtgagaaaatattcactggttctctctgactcagagggttcagtgtaactgtctaccaaacaaacaaaccaatagaagaaaccaaaaccctctctctctctctttctccgcccctccttctctgtctctcctctgcatctcctctgttcctcaggtttctctgctcatggctgcttatggtcaaatctcctcgggaatgactgtagatcctcaggttctctcttcctccagaaacattggagtttccctatcacctctccggagaacactaatcggcgccggagttaggtctactagtatctctctccgtcaatgttctctctccgttagatcgattaaaatctccgaagatagccgcaaacctaaagcttatgcagagaacggtgcttttgatgtggtgagtgaattcgtctctttttcttctttccccttaattgctaatttttgttttcgtgttagtcacgttctgtttgattctctttatagaaaatgtcttattaggattcaatctgatttgttactattttgaatttggggtttattgtgtatagggagttttggattcttcatcatatagattggctgattcaagaacaagtagtaatgattcaaggaggaagactaagattgtgtgtacgattggaccgtcttcgagttctagggaaatgatttggaaactcgcggaagctggaatgaatgtggctcgtttgaatatgtctcatggtgatcatgcttctcatcagataactattgatttagttaaggagtataattctttgtttgttgacaaagctattgctattatgttggatacaaaggtatgctctttttgtctcttgtgatggaattgttatgaaagttttgagttttaatgtatttgtgtggtattgttttgtgaagggtcctgaggttcgaagcggggatgtaccgcagccgatatttcttgaagagggtcaagagtttaactttactatcaagagaggtgtttcgcttaaagacactgttagtgtaaattatgatgattttgtgaacgatgttgaagttggggatatacttttggtggatggtaagagtacttgtatctttgtggtttgttggagtctttgttttagttcattttgtaatgagagatggcttcttgtgttttttatattaggtggaatgatgtcgttagctgttaaatcaaagacgagtgatttggtgaagtgtgtggttattgatggtggagagcttcaatctagacgtcacttgaatgttcgaggaaagagtgcgactcttccatccattacaggttgataccagctgatgtttttccaatatcttgcatcaaggagcttttctaataaaatgtttttgagtggttatattctggttttaactccacgcagacaaagattgggaagacataaaatttggagtggacaaccaagtcgatttctacgccgtctcctttgttaaggatgctaaagttgtccatgagttgaagaactatctcaaaagtaagcctggtcccttttcttcactctcctattatctttggtgaaatttctgtgaaactaatagaagatttccaaaaacatttatagcctgcagtgcagacatatcggtgattgtgaaaattgaaagtgcagactctataaagaatcttccttctatcatatctgcttgtgatggggttggtttcaaagtcttttctgtcagagtttatatgttgatacttagcgcagagccttagcttatataattatcaatgctttttcaggcaatggttgctcgtggagatcttggagctgaacttcccattgaagaggtcccgttgttacaggtaaatccaagacttggtttctgaaacattactttagactctgttggtatttatgcatttgctattgtgtcttaattttaggaagaaataatcagaaggtgtagaagcattcataaaccagtgattgttgccacaaacatgctagagagtatgattaatcatccaacgcctacaagagctgaagtctctgacattgcaattgcagtacgtgaaggcgcagatgctatcatgctttctggtgaaaccgcacatggaaagttcgtatttctaattaaagccttaccttttgacgtcaatataacttaccatgtcatgtgatcttgaatgttctttggttttaattctcggatgtcaggtttccgctgaaagctgttaacgtaatgcatactgtggcgttgagaaccgaggcaagtctacctgtcagaacctcggcatcccgtaccactgcttacaaggtactcacacattcctcatatcagaaatattatatatgatatgttaggcaaatgtgaatgtgttaataatgatatttttgttacagggtcacatgggccaaatgtttgcttttcatgcttctataatggcaaatacactgagctcaccgctaattgtatttacgagaaccggatccatggcagtgcttctaagccactaccgcccatctgcaacaattttcgccttcacaaaccagtaagtgtttgttcatctgtcaatcaggaaatgtcctatgtatgcaacttttaatcgatgaaatgggttttgatcgatcttttggtttatttcctttaggagaagaataatgcaaaggcttgctctttatcaaggtgtcatgcctatatatatggagttctcggatgatgcagaagatacatatgcccggtctctcaaactcttacaggtacgttaaccatgtaccttctcatctatcaaacattacattttcggcagttttgcttacacttaacttatacatcactcaggacgagaatatgctcaaggaaggacaacatgtaactcttgtccaaagtggctcgcaacccatttggcgtgaagaatcaacacatctcatacaagtccgtaagataaagataggtggatgatgtttttacttcttgagctacacaacatcttgcttttactcagctttctttctcttacacagttcgatccatatttttttgaatcactcacagtgaatcaaacaaccatataaaattttaagttattgaagctttttttctggttatagtttagtacctaaatgtttgatatgtcatggaggatttctgtctatctcatctgattacttattggtaagagtaacccatataacacattacagttaagtctttagagcttaggagtttaaagaagaagtcttttcgacgaaaaagactgatccgatttagccttttatttatgaatcagtttgctgttacatcaccggaaaactgaaaaccaaacacacatttgttagactttagaatccttctctcgttcctcttcactctcggtgtcatagtcatcatcactcatgtcttgcatctcatcttttccttctagttgtataggtttgtaccattttgcacatgcaatgtataccaccaggtcaatgctcgtcaacgcagccaggaggaaatagaatctgtctaagtgacctttgttgagattccttggaatccaaccaggcatgtgatcctctgttgagatcttcaccaccattgttaccaacaagctactaacaaagttccccattgacattgacatcatacacagagcgctcccgaagctctttagtccgtctggtgtttgcgcgttgaagaactcaagctgacccacgtacatgaacacttctgatgccccgatgagtgagtattgtggagcctgcaaagagtagaagagtgtcaatactcggaagtttcttttgtaagttgttgattttaggaccaaagtgagttttaaggtctgtgttcattacctgccagaagatgcttaaggagcttgagccatcacagtgagtacaactcttgtctgcatacttaagcctatagcattccacaatcccggctgcaatcatagctatgacagcaatcacaagtccgattcccatcctgtgaagctcggtgattccttttgatccattctttttgaatctgttggctactggctcgagaactctgcggtacaggaatatgaacaaagcgacgctaaggatgtcgaagctggacatacttgccggggggattttgaaatctgagacagaggtattcattgcagcgccttgctccacaaagagagaggccatttgagtgaagacgactgagtagattatagtgcagagccaaattggcatcagtctaagaatacacttgacttcctcgacttgtgtcactggacagagcctccatgggttcactgagtcttgtttcttgtcatctagatctctagctgtgatgtacgctgctttgtccaagaacctgaaattccaaaaggaacatgttagaacacttcatggcattgaagtatatggtgaaactgcaatttttggtgacttacttgaattcatcggtatgcactatccttctccctgtgttaactgaagcatttttcccttcgctgtctccgtcatacatctcctctctccctcttaatggtgcctccaccgatgatttcttcgttgcagcgaccaaaacttggcaaaacctcgaaagaggattccccgtgggcttgaaatatcggtatctcggtgttccaacaaggaaaagaatcaacccaatgatagcagagccagtggatgcccaaaacccgagtgcccacattccctcatcctcaaaataccccaagatggtgttcgaaaagagcgatccgaggtttaaagcaaggtaaaagtagctgaaaaacgcaatcttcgagtacccttctttaggatgctcctcatcgaactgatccgctccaagcgttgcaatgtttggttggtaaccgccatatcccaatgcgatcaagtagatcgagaagtagaacattgtgatctccatcatggaatgtgaaccacaaggcgtgacttcgtccccacaacctcttggtctaatcaagaacatgtatgatgatagcgatagcgatgaaagtccctgcgttttcacatccaaaaaagcgttcttatgagcttaaaacgttccaacttaaaaaagatgaatcacattttgatagttgctattacttacaatgacaaaaatgacttggaagatagcacaagtcttgtaacgaccccaatacgaatcgctgagaaacgctccaaccaatgagaagatataaacagtccctgtccatttgctaacgttgttagctgcgtctgcgttgttctgctgcaaaacgcgagttaggaagagcaccaagttcactccaactccaaagaaggctagtgtagccagcccctggttcactgttaaccggaaaattagattagaacccggtttagagagagttaaccaaattattattgatttgaaagaaaccagaatagatgaaagaattgaatgaatgattgttaataattgttccgtgttcgtcaagatgatgttaacatttctttggttggattgtatttaatgactacttcattattgttccaccttctaacgaaatcaaataaaaaaatgataatgaaatctacaaataactacaattttagcaaattaaattcttcatgcgaaatacaaatcgttaactaataataattattaaaactattacgtggactctactaataaatcatcaaaccaaaaagaaaacccactagaatctcttaaattgtactttgtataaaaataaatgctttgtgtaatattcttaaaatataatttaatagtaacataattttgtaaagcaaaatttgaaaatgttaggagaaaaatgtgaagaagtggacgtggcaaaagccaacgtcatgggacgacgagatgggtaattacgtgtaaggcaacgtaattccactaacacatgctttccttgcacttattttaatttattagtgtcgactttctcaaaataactttttttcctttttttggttaaattccataaaagtatctttaaaaaacctaaatatctatctccatatatagaatcacttacaaatctgaatgttttcactttcagttattttctaaatgacaaactagatccattaattttaacaaaaacactcaatcattcagatctcttacatcacattagttgcgtttgaattattagtattttgttttttggagaaaatgattgaaaagtacacatatgtttattatataataactatttttcatcataagtattctttttgctttacataagtactataattgttgggatccctataattaataaataaaaaatagcaagaatttatgggaaatttactagataagtctggaaattcattaatgatgcgtccgttatacaacaaaaaattatatgcatttgtcatgtggttggggtttttctaccaaaacatgcagcgtacgttcgaacacatggatatgtcttgacacgttcacgtaaaattcgaagttaattctagttattaatgttggttctattgtcactttcctagtttctgataacttattacctcaaagataagtatgcatatcaatcaatctacacacttttagatatacatcatatcggtatctagtttttttcccttgtcagttcaattcatacgtttttttgtcgggatatatatctcaatttatacgctacacataattttatatacaaaataatgtaaacatgtgtgtagaaatatacaaatcatgtattaagccatactaatgatttgaatccatgaattatatagggaccggcactgaatataccttatgcaaagatgctatgagtttgcatgtggtatctttgagaaaaggacgtgaagaacaaaataaaataaaataaaagattctatgttttaaggtgtcgatcatatattttcctccgctttggtttatattctagagttgatttcttagcaaaactatatatttatttcaatttgatatatagttaaattgtaattttgattagggaagagagacatacgaagaatgacgatgccagcaacccattggcctgagttagaacgaatagagggacgaccatagtaatccactgtcccatctcttgtttcttcttctccttctttcttcttcatcgtctgcattttcatttagttaaatttaattaactgatacacacacatcaatttatctataaatatatagaaagatgctttatatgcctaattatctactagtctctacaaccttttgtgctcttgatatggagaagattcatgagttcgatagttttgtattttccggaacttaaccaaaaactaaaaacgttttttttttttaactcttactttttgtattggcacgtaattctcgtttcgtatacacaattttcaagatcatttggaatcattctcaactttcaatgacagcactaaacggaaaaatacttacatctatatatttaaattaagaagattagatataatagagctaattaattaaaaagtatggtgtattaaaaagaaatttgaagaaaaagaaaagatgttgagctaagtttttgcacataaagatcgtgactttccattgcactaagcatgtccttttgatcatgctcttcttgagccaccaaaagcttagaaagtttttactataacaatgagtaacttaaaaagaaaatatttccttttgtagtcacatatgaaattcaagaaacaagagccttaatcagataatcaaaatcttataaggaagaaaagcaaaggtccattacttcaaactctgattaatatatcaaagaaaataaagaaacaattgaagggacaagcttaaatattacttacgtctttgttataaatctctaggcaagacattttgcgatgatatatgattatatgtatgtgagttttggcaagagagtgataacgaaatttctctttagttttggtgttttttttctttcttcttttcgtaagtgatatgagagaattaaaacaaaggacgaagaaggaagaagcagaaagcaagttcaagcttgggtgttgtagagaagagaatgttgagaataaatagaagtttggaagatgatttgaacggttctgattttacatgggacactcacatgcccaatatctatttttaattgttttgtttctgaaaaaatactttagcacgatgaaaaaaaaagctcaaaagcacaattttaattatttaggaaatcaatatttgcattttccacccaataattttgttttctctggcgctgaaaggcttcttgtgctttcgaaacttggggatgtggctgaggctgatggtcggaggatatttatttatttattttcgtagcaaaacttaaacgtttggtagaaatagatttaattaatgattctataaatttcactacaacggaaaatcccaaaatatttgttgttagaaaaaagaggtaccacattaaattaaataagtacgtatagactgaaaaaattgaaggttcgaataatttcttatatccaatttagatttcaaattctaaaagaaaaaagaatatctttctattcctgaagttacattatattttatgttgaacactcgtgatcacacatgtatactattaattgggaagcattgtgtgaactacaacattgtaagggtagtttaaaactaactaaatgaatatttttgcatgggtaatttagtaaattaacaactactccaactaaataaatatcttcaatttttcttttttaaaaaatgatttaaatcaataaattaagaaaatttttggattttagatttgtaattatctagaaaatggtttcagtatatatttaatattttaattagaatttaaatgatataaacgtttaaagtactttttttttaaaacaagtaattttcattattttaaaaatatatcactaagctaaatttgaattatataaaagaaaatatatttttaaacgtattataatagttacaagcttttgaaatattcattatactagattaaattatttatttatttttaaatagtaaaacaaagtttaaataccaatatttaaaaattttaatgcaaatattcaaaatgagaaccatcactaatatgatttttttggcagatcattaattgtattcgaacaataatgactaccatatttgcgataatgtataaggataagtttaatttaaaaacataccaaaatcgttgagatctaattttagctttaaaaaaaaatattttcgttatcctaaatttaaaatatgtaattcagattagtttttttccagtaaagctaaaattgaatccaaattaaaatctaattttatgtacaatctatctcttataaatgttatgcatacattcatattgcctcacaatcaatctagaatattgattccttaaaaaaatagatagagattcatatgtaaattacttcatgttctaatgatatttatctcctaattttactatccatttatgcgtatgcttatagatttttctttcagggtcaacattagattacaaaaaactagccgggtgttggtcaatattatacaacagataaaattatggaattaacaatcaaaatatagttatacaatctgaaacaataaacaaaacaaatataacttaatttatgttttaattttaactaaaatcaacaaatttatcagtttattaaaaataaaataaaaattagcttgtggtaccctacgtgtaaatcactacgatttcatgaggttgcaatatcaatttatacaaattttgacttttaaaatatactttatataattattgaaaggtatacattaaatatcggttttatatacttcaatatcataaatttataaatcacaaattatttttaaatatattaatccaagatctaccacaggtcaatcccttgatttttaatatattacaataagaatatttaaaataataaaaatattatttaattttacgaaatgaagttatctggtggaacgagtttgggttgatactcatacgggatgataatctacgagtgtaatcttagaattaacaattttaacacaattatacaatcttaaacactaaacaaaagaaacaatatttacaaaacaactataacttaaaattcgaatttttagttacaaaaaaatcgaacaacggtgtaccgcggagtaaagtttacattatatcatctaattgatcaaatttcaaacaaaatcaattaatttgtatatacatcaaactaacaaaaatacacagattttccaaatatctctatattattccgcaaatagaaacaaatctaacattcgatttactatgcaaaacacaaatgaaatataaataatataaattaataaaaaatttagttattgtatcataaataacactatacaatttttctatgcatattataatttacacactacaatatctttcactaaaaatatattccaatacattttttaaaatataaaacccgcacatatgcggggtcagaatctagtttatgttaaattagaacgtttatttatttttattgttttgaacacagaacatatatttatttaaatgataaatcccatgattaaaaacaactaactttttattattagaaaactatagcataacagacagtttaaaaacagaactatttatgtcatagtggcgtggcttaaattttaagttcatttgtaaaacaatagttgcatttggtaacacacaccttgtttctggaaacgcatagttttcatttcgagagaggacattattaaactcttaatatttttgggcaaaggcatatatataaaccattactatacttataaattacagcactaccagttcttcatcactcaaacttaaaatcatattactaattgtaaagaatctctatcatttttgtaaaagttaattttcaaaacacaaatgtataacaagctaggtcatgactagaatatcacaaggacgataatatacaaatatatatatgatcagtggttttttgggatcaacatgtagagatttctaccgacaatatatcgtctatgtacaacctaactaaacgcaagcatgccttcaactttctatactttctctttgtttaattcatgtctctggtgaatatatatatatatatatatatatatatatattttttttttttttgttcaaatgaattttgttctgttaatgttactttaaatcaatgacgttgacattactttctcttccttttttcctttcctaagatttcgatttttcagcttttgttttcaattttccctagtgtggaccagaaaaacgaaatatcaaaatcattaagaattaatatcgaattgaaaacagacaaaaaaacagacttgaacaggatggtacatatgcatttatacgtgtaaattctgcaaccaagtagtttttcaattatttagttatcagtgtcttggttcttaaatatgcgagtcgatcgacatttacttttttatttagtacattgcacaaaaaaagaaatgaaaagagagtttcactttcaccacaactattctatgactttcgtttattcaaaacaagtaaaatactagtacatgattatgagttaagcaagccggtaaaaaatataatcgactagtaatcgacatgagtgaccagtcagtaaccttttagttgataaattaggtcgtttagacattaattaactagtaaatattcgattagccagtgaattagtttactgctttatagaactactatatatttttgttttgatcaaatagaactactatattataaatgggcatttcgttgggggaaaaagattcccaagattttttttccttaaacagaatttctgttagatttatacaaaaattccaaacaatacaaagtataactaaattgagtaaacaatatttagtgggttcttaacatgccgagcttaagggttacagataccaaaaacactgttttcaatttttaattcgtataaaataagtttctaataaatacgcttcgaaattcattttcgttttgattatatagatggtgaaatcaatttcagggtagtttttattgccattgatcagatttgtggggaaaaagagtgtatggatccacataaagacacatactacaaaaagattataggtgcatgttcttggtcgaaatgatagagttagacaatgacatttgatttctaaaaattatgtttttaacttttaaaagaagccaaatggaaaatgtgtcatgttactatgatcagttgatcttacctatcataggaaaaaataaaggaagttctttaaaagcaatcatcttctccattacaattgtggaataaaatgagcactgtttgggaacacacacaaaaaattccatgtaaagttttttttttttttttttcttttttaactttaatattccatgtaaagttaattatgcccattgttttttgttttccatatagtattgtaagtttttttaaatatatattgtaatttagtttcattggactttggggtatttaaaagtattcttcactagaatgatacgtaattaacaaaatttgaaaaaagtataactctaaagcgatcgagttatttttagactcaaacgccaactttaaactacaatggttaaaagaaaactataaatggaaacgcactaaaagtggttccaaaccgccaccaagtttttctaaaaatattggataattttagggttaatctatactagctagttttatattagtgctaaaattcgaaatttaccaaatatttgatattctgagcactttcaaaatctaaagatgttgattagataataattaatttgaaatcaattttactgtcattgtttgttttatggaggatgatatgtttccggtcaaaaacttgtcatgcttcttatcggaagagaagtatacgtcaacacctcataatttctaagtttaagaaaccattaacgatgatatgcacatatatttgcaggtgaaagtgaaacctttcatatcgaaactaatcaactagttaaattatggagtaatcaagtacaagagaactgtacaaaacattaaatgacgataaacagccaaaatcaatttcatctatttctatggggtattctttttatccacactcctactttatacatttgtttatccgaaccaaagcaatttttacataacaaacctaaactatgtaactgctagataatttcgacattattattattaaataatctaataaacttgaactgtataatcgttagccaattaaataaaaataataacaaatacaaaaagctctattaaattggctaatagttatatagtttaaatttgttatttaaaaattatataaatttaagctaaaaaatacaaaaaattataatttaaattgaaaaaatggcatgaaaataattaaggtcgattttaacagcatatgtacaaactgaaaagcaattgctcgtattacgtccacccacttacttatcaaatttttctctcttacgtaaccaaatcacctttttggtttttaaataaaacaacatccattcaaaaaaatctgcttttgataagaaaaaataataaattaaagctgtagagaatcaagaacaaatcacttatcatgaggctttaccaatgtccccatatgcacaatagagcaattaattgataaaaatgttcttacaaaacttaatataaatatgtaaaaagtccgcatgagctcgagttggatcccacttcacttgtttgtgtatatagctattggtttattttgttttatttttattttattttattaagacatcaacatccataccagattaattttaaaaactaatttatttttagaagaagaagataataggttaacaaattgtggtgaaattcggtcataatcactctatttgcctctgaaggagacaataacctgaattagcacattgcttagctccactttaaatttatttcattggtccaagtcatatatattcacagctcataatagagctgggtagatttcattttttttttctatcgtgtgagtgctttttaaataatgttttctcgcttgatttcattcttaatgcctaagttcggttcacttgtttgtaacaaactaggtgattatgttgcttttatttatttatttgagattatgttgcttttttctttcttttttattaccaatgttttcaaattaaaccacaccagagaggaagttaaaccatacaggtttatgagttatagagagtagatgcgatggtgcaaaatattggtttaagtaccattttgattattttctacagttaaatatttgattttgttagaactatttgttccgcatataaatttggaagatttgtgtactagtatatgagtgtgtgacaatcctacacttttgagataacttttggatatgagatcaactcacacttattagtagatttgattgcatataacatcaagatgcacatgtttcaaaatatttcaagcaatatttttgtagttaaatcatattaatgtatagatattctatgacggataaataatcttaagaatgaatttcaatgcacgtacaaaaaaaattcatgttgaaaaataactcgtataatgcatgtcgagtagctttggagctttctagagtaaaatatcgtcttggaaacaaaacgaaaactacaaactaattgtaaatgaaaaatgtggatggttcatagacaaaaacactaaagaacgcacacaaaaaaaaatacttctcctttcaaagttaatataataatggcatgagaatgtatccatcggataccgccaagaagattaactgagtcaagttctcaataaatatatctatacgaggaaaaaattgtgatagaaattttaatttgaaagcataatgattgtataaaagataggacaatagtgaattttgggccaatagaaaccctagaaataaaaaaggacacagtcccgtccactatatatacttactccatcatccacaaagcctcaggtccacacatactgttcattgtgtgataaattacatcatcggcttcacttatcactatagtggactgtggactaaaaattaagaattggactagattaggttacaaacagacggaactggtctaatctacagataattgaaccctaagccatacgagaatttgctgttttattcatttatttataaacttaaattaaatgacgctattatactttcgtaacaacgagcaaaacgacgtggtaagggtacaatataacttttaaagagattgtttgtagatccatagatttggtgtggccaaaattgtttggttcagacaaataatagacggtgcaagctgattaagatagatttggaagatttcaattatactaaagactagaagacacgaaaggtcttcttttcatgtatattccttttcttttttagttagtttaatcaaagactccatcctcaatattttgtgagccttcattttcatcataaaaaatacatagcaatttatcaaatttggcatggtatcaaagcttccttttgatctgagattgctcgattagtttttattcaacccaaaattcaaattgttaaagaaaatgttaatccatactttcaaaaccttttttttccttttgatgaagatcattaaaacttattagtctgtaagtttaatacattcatcaatattagaataatgttaaatatctataatgtatatatgtatgactaattatccactaacaaatcattagaatccagagcttaggatgtgtgtgactcaaacagattaatcatatttaaggaaacaattaattgtttatcttgtatagatatgattacgttttactattaatgacatttgttcatcattacgtattacgttatcgactatagtattttggaaaataattaaaatagaaagcaaatcatgacctaattcttccatattacaatgcttttttgtttcaattttagagttctcgttgttttcaattagtacacttggctcttttgtctacgccactagacactagttttacttttcacatttaaataaattacgtactaatcattagccaagttttcaacttatgcatatgcaacatccattatcttataaccgtagattattttatatagtaactttagtttatcaaacttttgcctcgccaaaatttggtaagtttgcaccacttataatatttttgtgttattttatcaatccatatatatgtagcgtgacatgtctcgttgcggtcgacaactattgatgagctgtatataaagttcataaataatactagtaattcattggtctgtataatcgcaattatggctctttaatgacaccattgggaaatagattatccttctttaaatgtctaaaatgactcttcacgtacggctctattcatcttaatggttaatgaaaggtcatttacttttcaaatgataggtttattggttcaccaagcacggaaccggtagttttaagtcaaatttccaaatctggtacgttcaaccaattgcatacggctgtcaaactattttgttttggataaactaattatccactcaaatcataagagtttacttttactaagagaggatacaattaatatagttacaagaagccaaacaatccaagacatcaaccaatatattggtcgagtaaattaatggtaaagctaaaaaaacaacaacaatactcaaatagagacttttggataaagatgaactcacaattcatccaaattaaaatagcatacaaaacaagtgaaatcgataaaaaaaaaaacaacgtctttagcttggtagtcctagtggaaaccaaaatagaaggaaataaagcctccaagatcgttaaggccaaacatttagcatcaataattgttgaacgataaatgattggcatcctcgcttctgttccaagcagaatagccttaaacaaaatgttccacttaacaataataagcccgtaaaggagaatttcagaaccatgaaaatccaaacaaacgagactaagggtgcaaataaacatataactaagttgtattattttaaaaatgctttcgattttaggttgttataaactataattatcgtaaattaaattaattaatttggtacaggtctaaataatattatgttatagttcaatatcatatatatgattattttcatgtatatatattagttaaaaagacataaactctgcataacatttaattcattattcggttctatatgtttcaattgcactaaattcagttgtgatcttgtttgtttggaataaaagacaatgagtcaatcagattgtaaacaaattaacttggatactgtttgggtcgattcaactcttaagatcagccacgagttagtacttagtaggctacttgtcaacttggcttgtgtgtatgtggttgttattaagtacggccatgcaatcgcagttttcaattcttataattttcctttaaagcttttcaaatagataggatttttagtgacattctgaaacattgttgtcaatgtcgtcttattgtaaattcttgcctatttttggttggtctctcgaaagtatgtctattactgttcatgttattcattgttctttgtacaaatgtgatgtcattttgcataaaacctcgcattctcatattaattacttttaaattaaaacaagttaaagtgaagacaaatagaaatttaggtcttgatttgacagcaaacctttaaagctattactggtaacatcgaatctggaaatatgtggagtaaaacgtacgtattgataataaaaatcctttaatttaagttgattctatagaaaaaatcgtctattcgataatttattctgtagtggctagctaactgctataaatctcaatgctaaaacaaaattatgtgtatttcaatgttttctttcgcactgtgttctatagtacttatgtaacatatttgctaaaaacatttacgtatatgatattactgatgacttacctagttatatataatctataattctacgaatgatcaaccaaaatcagaacgtttttttttttttgtaagcacatcaatattcattaggcatttgaaattctgcatattctagagtttaaactttatctctgacatcatttttttttggagcaaatatcgctgacataacgaagttcatgatctcttagccaacgccaaaaacacttcttagtgttccaatttataacaatactcataattaggatcgttttagcattatcctttagattccgtatctcatatttaatatccaaaagcatatttaagattgatttgtttttaggtagaaacaaaaaaaaatgatttaacaagcataatttggcttagaagtgagaggaaatctatattttctagactccatgtttcatcaagcactaaacttgcgagtctttaatatatactgtatcctttctatatttgtatgttttgtattataattaattatttttatcatcagtcgacactcaaactaatctcaataatctaaaaaaaaaactgaatatattgtccatttaacgcatataaaataatcaattatgattgaacttgctagggaaacactcgaattctagctcttcaacttccagaatagacccttcaaccaaggtatcaaaattatagcaaattatttttgacttgttaataaatatttagtggccattccaaccaagtagtgtgtattgtggtctaatggttctgagagtgagagtaggtcacttgttctattccatttaggataagtgatttacgtcttaaacgtagtattattatctacagttggccatgaacaccagaagaaattatgggacaaaggttcaaactcctatacacagtttatattaaaaaaaaaagaaaaaaaaaagtgaatggcttatgtaatcaacaatacgtggatatagaattatatttctccaatacaatgcacactataagaaactatattaccataagaaacaaaaaaaagcactataagatgtcatatattacttgataaggaatcgtaatcgatgcaactttacgttaatatatatgtatgcgtacactattatatactatatgcgacgagctgtttaccaaaaacccgttagtggcttttgattcgcttatgtaagctcatacatcaatggggttcgtccttactttagcacgttacaaatattgattagattatgtcttctttcctaatttatcaaatatgtcctcaaacgtggatgtagaacaaaaagtgtcttcattgttcgtgagaaaactcgaaaatatagtcaggactcaggatcattcatgagtaagaagattcaggattagaaatttagaatagcgaagaagtgaacctcgctcaagaagtttttatcctctaaagggttaggatatgttcaagttttcaccgatattcatactccatcctcttgagtcttgatacccgatcactctgggttcttacaaaacaaaaattggcgggagcaaaaagtcacaaatgctagctaagattttctaggaagcattttctatataatagctagaatctctatattcagttgcagcaaaaaaaatctgtatattggatcgagttttaaattcattcatttttttttgttctttttttcaattcgtgtctgtcaatttacattttctattttcctcaagttcgagcagacaaatcacttacgagatcatttttgagagaactttgcaagtttgctacgtcacgcaacgcaacaaagatgcaaaacctaacaatgtagttaatttataagagttttatcattttgttagacccgtggactatataattataaatgtaatagcttgtatagatctaaatcggtattatattgatatatgggtttgtaaaaaatgtatttagataaatctttcttatgccctcagtgagtttatataatattaagaaatatgacacgagaaaaatatgtattttgtacggtactaattatccattttactaccatactaaaattaaaacaaaaatatatactgtttagttggaaattaaaacagtgtgacccgaattctcatgttcccccttaatctaaattaaaacaaatcatttcaaagttgaagatgttatctatatattttgtcgtgtgaaacagctaataatttttttttggtagaaagacacagttattaatgatatatgaacttccacgttttatttagaaaataaaattgtccataaaacaaatatagataataacataaaatgcaattcaaattagaatttttataatttatggccacaacaagataatttcagccaattcgataatattttatttttattcaactgttacgtgatatgtgatttattctaacaatatattaattttttaactgaaattttggaatgcatttatttacatatacatttttacagccaatttgtgaaataaatcatgtagttgagacttatttacaatgggtgccactggattttaatgtttatttttgataattagaaagaaaatcttcaaattaaatatttgttatttaacaatcttcccaaaatctctctacattaactacacgattagttactaaaataaaaattccaaaatatttaatatcattttaatcactacaaaattatcatttttgatattgcttttttgcataactataacaattcgattataatcatcaaaccgcagagatatttgatagcatttaattagtacaaaattacaaaatatttagacaatgattcataaatttatcataaataagatcaattttaataaaataaatgatttttttttacgacacgagttggtggaacgggtttggcagaacgttacttaataacaattgtaaactataaaatatatagatacaatttgcaaacttttatatatgctaaattttaaaaataaattgttctcacgatatactgcgggttaaaatctagtattatatctatatgcttaatctatcatcatgtgatctatattggattattatttggaacgttaaatattggtatatctaagtatggtgatacaaaacaaatatatttttacatatgtattcagaaaataagacgttacattttcgaccacattcttatatgtacttatgtagcattttatcattttttaattgaagcacttgctatttatctaaatacaccgtcactttttattatgggacttcgtctcacagttccttagcaaatcacctggaggacatccgtttttgggcgaataaattggcaagcattcagtttggttttattagaagaaagagaaacaaattagcacatgtcttagcgaaatatgattgtacctattcttatttttattttggttctggttctttacctatttggcttgatcgatacttttgtaatgactctaattgattaatataattattttgacgtaaaaaaaaaatcaaaggccgctttgtgcacaactaaggaaagcttgggctttaaggctacatacatagtttaaaggccctatagacgacatatgctttaaagttcaaaccaactaattaatcaaatgtctattttcacacacaaaaaaaaaataactaatcaatcaaatgcacattaattttttcttttattattatattaattttcgtttaaatggacaaatacaatgataggtttacacggtcaaacgacccataaaatggaaaaaaccctaatcaacatatataagaaatctgaaaagggtgatattcggcagcaccgacaccaattccaaatttggcgataacaagaggtttttcgttgctactccaatccgactcgagcgacatgactagagttattgattcccatcacaaacccaaagccatggagtatcatcaatgatctctaggttttgttggacttctatggtattccaatatttggtcttatagtggcctacacattgttggtatcagatcccgcatcacgggttcgggacctaccaaagattgccatgtaggtaggagaggcccaaaggaggaagggcccacggtcttcgctgagcgaggaggagaatacgagcgaagtggtcacaccgcgaggtggatgtgacgacgagatcaaagttgttcggattgaagagccaagtgggccggaagataaggttcagggagcccggagtcaattcaaatttgaacgtttgaatagttaattcgaaaactaaaaaggatacatttaagatggaataattgtgtgtaaatgagaattaaatgtattccttgagtataaattatgggtcaaaggtcatgtaaagacacacgcatttttgggcaaacatactatacacattttcttacaaaactcatagttttctctataatcattaattcatttttctcatacatttgtcatcaagaataatccttctcactaaataaataaatacttgagtgtgtgaatccgacatccacagacatattggccggaagaaattgctctcaactttcgatgagttaaatgaccacggtcttcatcataaccttgcataggcgtgtgtagaaacgatgggaaagtatatccatatttttttagttattttagtttaactttcacattaatttagagcatgttttgaaattgtaaaaacaacgaactaagaaaaactgtttatatctctagttttgttatcgtagcttttatggtcaccaccgaaactatcatgaccattatagttcccactggctattaccatgactagtttaaccgccagattttatctggccaccactaaaactacaacgactagttttctgattgtagctctcttaacgtctaccgagactagtttgaccaccatagtatccttggccattaccaaaactaatattatcgttataatatgcatatgtaaaacagtttatgaatgatgtgatcaatagttgtgtaaagattgtacaattgttcttacaatgcatattagttgtgacttagaatacataattttatatgtatttatctcaaatccttatatatagattcaactgcctcccataaccggtctcaactatctgctaaaattactctcataatttttttaattgcatttacttcttttttttattgcatttacttttaactaatcgttttgaatcttttacaaaataaaatcattttgcaaaaatctaattcaaaagcaaaactcaaacgatctaatgcgacctaacgaagaactcaagaaattataattcactgcttacttactctgattagcatttaatatatatatatatatatatatataaatatttaattaatgttataaatcataggtgatttgatttgctgcaaagaaaaacaaattaataaaaaatgacttgtggaaacgagagagagagtgtttctcatgatttcaaatgaaacgtatataagcataattgagtaaaaactaccaatgtagattctctactaatatgggtaagttttctccaaacgaatgtattttgacaaatgttaattcaaataatctgcggataataaagaagaaaacaaaatatggtagttcattagtttttgatatcgtttcacccgagaaccgagaaaggtaaaagtttgctctcaagtctgttttttaacagaaaattataatgataagtgattaattagtagaactcgttctgtaatttttttaccgtcccgtgattttttttaaaaatagtaattttaacatttaagaataattttttatatagaaaagctttgcaaattgtatcattctctaatacatttatatctatagtttaattttatatatagtaatattatacataccacataacatttttggttttatataatcttttctaaattaggatgatttgatatgtttaatattagtggtcttaaaaaataataaattaaagatttaacccgtattgaaacggtggattaattatattttacttttttattaatgttgattcaaaaacccgtccctccaaatctgtcttgccaaaaagctatttattttgttaatattaattttattaatattaaatttattaatgatatcactctgaattagaatctaaacattttagctaataacataggagtgcaccatatttatttaataggaaaatgtaccatatgacccgaatgcacttttatccaaatccaccaaaaaagtcttgcaaaaatactatagaaataagaaacgatagtcggttttgataggtataagattaacaaatatattagttagcttaaattagttaaagaatataaattgaaaatgtatattacactttatttgaatatagtatcaaaacttatataacacagagatttgataattttttaattgatgaatactttttttgtgctaatttttatgtgattaagatttaattgatttcgtatataaaatattaaattgacttatttgtttataatttggtaacagatagatatttgaatattcaatatattttgcttcagtttaaaaaatctttgatgatccgtctttagatccaataagccctataatctagatattaacctgcagtatatattttagttaaactaaaatttttttattgtaaagatgatttaaaaatatttgatattattttatttgattttaaatatatagtaaactgtgagttgtatatgttttgttgatattatctatattgtttagtgtttaagattatacacttgtagtttgtttgttaatttaagagtttcacctgtagtataccattttgtatcaatatcgatctaaacatgcaattctaggattttcaacttgtatcaaaaattgaatcacatctaatatgttattaattattgtagtatataagattataaattttcaatataatatgtatgaaattgaatataaatatttcaaattatgactcgttactcagtagaaagttttcttaaatctagtttttacccgttataatatttttgtatgtattgaacagtttatatttgtttttaaaaattcaaattatggcatatgggaaaaaactctaattatttttttataatgatgatattatttttccgcaaaaatagaatcatataaagatgagaagtgaactataataattaataaaaaaattaatatgataatttagatatcaaatataatttgttgattttaattggttaattttttggaaattaataatgtatttcgtttttctaattaaattaaattaattaaaatttagatatcaaatcttatatgttgattttgattggttattatttttggaaattaataatgtatttcgttttttaattaaatttaattaattaaaattagtatttgactttttaatccttaaaaatataaattaatttactctttaaaattttatttctaatggcatacctatgtaattacttacaaacattaaggttatatttaaaatgtacttcccaaataatatagtaggatcatagatagaaaagaaccttcttcgcagacaaatttattgaaaagtaatattaaaaaaaaataacaactttattaccaaaacaatcttttcatatcgcaaattaggaaagttggaccatacagatgtcatgtatcaacatgtaaaatggagagcaaataaaatgacactacacatcctatttttacattctaaatatatttgttcactattaagttctattttgtttttaacactacacaacttttatttcagtttcatttttctcatacttttgaacatgttttgcacttatcataatcaaatttatatcaccactgttaaaaaatataaaatagattggggtctttttaggcacagtattagatttggtggatgatacgctaattaaacggattagacggctatcaaatggggttataccgattgaaatatgtctaagatcttttagtttattttaaatagttcaaactgtatttttgttttcttaaaaaaaactttcatatatcatttacttcaaagtgtttcaattattattcaattgtatataaatataaaaattttatttaaaaattttgttttgagattagatttttaggcgttaggctgccaaaaacaccgatactattaaccgattcactaagattacgatgtgtaaatgctaaatataagagaagataaaggacctagttgtcaataaaaagcaccacttgctaattgaagatcattgtctacgtgtgaacgagctggcaaagaatattaaacccctttttggtcaaataaaaaaacgtgtaaacataaatcttttggtaataaaaatcaaaaccaaaatattatccaatttgtctccatccttccgttttttttttccattaccgtacgccgaagaatctgccccaaggtaccgatttctcttcttcctctgattttccgatttcttctctgtttataatcgaatccgaaattttaggttttttttccgtgggaaaatctcgagagaatatgttcggagagaaagaaaaaacacttcgatttggttttaaatcaattggataaggataattaatttaggtttatggctctgattcccgataaaatcgcatgatgaattttttttacaaaaagatcgagaaactgcgttgactttgggtgctaattttgagaatttagggtttgggtttgtttaaaaattagtgtttgattcgtttaattatttgtatgaattgtaaagttttaattttttttactgggttccatggattggtctagattttgcttttttttatttattgtagtgttggttggagaattttgattttttttaatgatgaattggttttgtttgcaatgtgaatatgattaagatttggattagaatggatatggtattgaaaacgtagtgaaatgtaattgtgttttgggtttgttccttgtggtctaaaaatatgcagaagtttaaaggtattgatggaacaaccgaggaacaacaagacctctcaagaacaagctcgtgaatcgctcatcgaaatctcctacacttcacccgaggaagacgaggttataacctactcagatgtgaagcctgtcacctatatctcaaacggaagtgccaaaggaaacaaagatgatgcggagaagctcagagatgagctgatttcgatatcctacgacgagtcaccgtcgccttcaccggatgtggatgtagctgtttcgccgaccctgccgaacggtgtatgtcgtggataggaagttaatgtacagcttgaagaagtctttactttcttatgcaaaagacttttggtttggtctaaaagttgaccattgttatatgttaacgtttcttccttaactatatgattgaaaatcaatgaagtttcttttattgtgtgcttgtttgacctgtcttatataaagttaaaagctctgatgagtctcattggatgatcttttaatcaaattagtatcacactgatacaagttgagagtggtaagaaacattgagaaatgaaagattgaaactaaagcatggattctcttgttttgctctgtttttcgaacatttgggaaagataaaaggcgaagaaaccctagtgagcagcgtcttcttcttcgcagaacttggtgtattcctttggacccatcagagcttccaactccgcggggctgctcggtttcacctttatcatccaaccatcttcataagggcttgagttgatctacacaaatgaaaaatcgactaatcagattgatctgcgccacactacaaacagaggtatttttcaaaatgtaaaaacttaccaaaccaggtgactcggtgagctttgtgttaacctcaatgacttcaccagagattggagatagaatctcacttgtggccttaacactctcaacagctccaaagcttttttctttgctcactgaactgtttgcttcaggcagctccacaaacacaacttctcctaaatggtcctgcacaatcatcgacatatacatataatctctctctttcagacacataatctgatctaaactagttctaagagttatgtctttgttacctgcgcatggtcagtgataccaattgtagcaactgagccttcatgtttcacccactcatgtgaatttgcatacttaagtccttccaacacttaaaaccccaaacaaccactaaagaatttcagacaagagtcctaaaacagaaccaatgcaacatacaagttgtgtcaagatgttgttttcttacctgaggagaagcatctggagatggagaaagctggcaagagatgagatttggaggcagaagaagagagcttgagagcatttgctgtagaggaagcccacattctcagtgccattcctttttctggtttgtttgtttactttgttttgagttttctcaaaggaaaagtgggaaaacagtaaagagagatcttaattgcttttattgacgtttgtgttctatctttagatgtatggcagaaaacaaaggcctcatcttaatgttgtcgtcgaaaaaagtgtgacccaaactttctcgaccagtcagaaggttttgaatttgaacaaaaagtaaaatgaaaatgaataaagaaaccaaaaaaaaaaaaaacttaaacggggttatttcggcccacaaagctgataaacacaataacttgaggtttacggtaccttatagtgtcggccagaaattgaaatttagaaggtaatgagtaattaatcccacatcggagaactttaaggatctaatctagtatataagaagcatgagttagtgcattaattaacaattggcttttagcaagacaatcagcacggacattgtttaaacgtggaataaaagataaagaaaaacgaggaaagctagactttaaagaataaaattttctaactcagaagaaaaagcgggtcactcatcagaagtgtccaaaagctgtgtcaactccttgcaatctgtctcaaaactatatattacatgatatatattaaaactagttgttttaacttttcaaagagcaatgtcatggatcggcgtaatgttttgtgatttcttacaaccattactgattcaagtgatcatcttccacgcaaaattgcaggcgggggatgtctcacaaatcaatatctctcctgaaataatctcagtagaatctctgccaggtctgaaattcagacccgatccgcaacatatatgcctaggcctgttacggttatcgacagcaatgtgacaaacgcggtgcaccaggtgatggatgcaatgcaagcgccggtctacttcgagacatacatcataaaggggaaaaatatgaatcatttgacgtgggaagtggtggactcgatacggaagaacaaagtgtgcttgaatggcagagtcaataactccttgtgtggtggtgcaaggaaagagcttgatctctttgcatctcttgtcgactgctttaatcttaatggtcaaccgagtcgccatgagaatgttgacatcgtggtgatcagagagaacacggaaggcgaatatgcaggtcgggagcacgaagttgttcccggtgtcatagagagttttcaggtgacaatgacaaagttctggtcagatcgtattgctaagtatgcttttgaatatgctcacttcagcaaaaggaagaaagttacagcagttcacaacaatggaaaatacgaaaaactagctgatgcgtttttcttggagtcttgtcaagaagttgctaaaatgtatccaaacatcacctacaacgaaatcggtattaataactgctgtttgcagctagtagagaaaccagagcgattcgacgtcatagtaactccaaatctctatgggctataattgcaaacattgcttctggtgttgctggaggaagttttggtgatgactatgcaatctttgagcaagttggatcagtaggaaaccataaaaatcctgtggcgttactgttctcttcggttatgatgctgagacatcttctgcttcctttatttgccgaccggcttaaaaccgccgtgacacgtgttatctctgaaggaaagtgtgggaacagtaatacaactacacaagaggttgttgattctgtaattgcaaacttggattgacttaacacagggtttctgagttttctaaccacattttttccaaagtaacttcgaaatgttttccaaataagtttgcttgatactttatttgggttctctttgtaaaagttttcacaactgctccatgcagcggaaaagaagttactgattcagacataatgtagctcgaccttacaatatataacaatgggaataaatggcactacattgaactgttcataacattttaagtattttctaacaaaaactcaggaggctgaccaaaaatgagttaatgtagtgaagagagcttttctaacaatctgtcaaagtcgtatgtactcgcatctgtttccattattcttttgccaatcccatctgagttcttacattgcagcttttccagctcctttgggcattttctttgatgcagctgaaagatcggttttgtctttagagactgaaagagtcgattctacaaaggacagtaataactaaaaagtataactggatttgagaaaaaaggttcataccgtcttcaacgtccttgagctggtagtagtgaggagctaactcaatcaaccactctggtttcaactctgttacctgcattttcgggtatgggagttttagtagcatacagacaaaccgatgaatgaaaccaataagttaaaccaaaagtaattaagaacagaaatacaattatggctaaaccttgcagtatcaaacatattaattacctgtcgcatgtattccttggacgtaagtactagttcgtgatatacaacccatctcggcaatacctacaacacgcattgagaaaaacttatcagtattcaaagttttgagattctgtcaaatcagatatttgtggtttatgtagagtgagaattcattaacctgagataagcccgaattgggatgtatgtgcactgtctggggatgtttcactgttcggtacgatccattcttctgtagctttgcagtgtgcggaaaaaaccctgagtatataagtaagaagttcattagcagaggcataattgtaaagaattatacatttcaaatcaacaaaaaggagaatgagattggcaattaccggctacgatggattttctaactgaatccaattcattcaggtttgagctgatatctatttccaccctttcgagaagtccctccaattgatcacggatatctctggctcttttcatgctccggacctgaacacatgtttaacccaaaacaaaggtcaattggatccacatgtgatctgataaacataaagaaacaacttggtacctgaatgtagttctcgtagcaccactgagtagagaagtttgtttccttccatgaactgtaaacctgaagagaaaaacaaagacgataaacatacagagaataaaagtataaactagtggaagaatgcagaaaaggaggaatacagaaggttcaaacctttagcaaagcaatatggtcaccgacattcccggtgtggaaattcattcttgcgttgtccgcatgaacttgtttgtccttgggacggtagaagatagagccaccaattgacaacatagcagcgattgatattatctcatcggagcacttatacttgtcagaaacaacaatcattttcgacagcattggatcaagggggaactctgccatccttctaccagctttagtcaattccccgagcttatttagagcacccagagcaaagagcagttctaaagactttacaagtgcttcagcaggtggagggtccatgaaatcgaagtttatgagatcatgaattccaagactcttcaaagcaagcaccacactagcaagattcgtcctctgtacttctggcaccgtgttttcctccaagtcattgttgtaattaaacgcagtgtacagacgataacacttccctggacttgttcttccagcacgaccagctcgttgagttgcagaagccttagagataggagtaataagcaaagattccatccctgtcctcgggttatatgacttcatcttgctaaagcctggatcaacaacatactttataccatcaattgtcaatgatgtttcggcgatatttgttgctaggacaactttacgtgccccttctggagttggctcaaatatttttgcttggagttcacttggaagatttgcgtaaattgggcatatgattaattcacggatctttgtacccaaacctcttatcctgtgcttcaagatctcttctgcagtttcaatttcctcttgaccagtgaagaagaccaatatatctccaagtggctccctcacatggatcgtaaggatagtaactatggctgcgtccatgtaatcagcttcaggtgcacttgtatagttgatttcaactggataccttcttccaggaaaactaaaaatcggggctgtatcaaaataatcagaaaatttttctgcatccattgttgcactagatatcaacaacttcaaatcaggtcgaaaccgcgctatatcctgtcaaatataagaagagtcaatcagaatgtatccaaggatttaaccctggttacacaagtaagaagagacattgtacaagaaaatctacttgccttgactaatccaaacagtatatcggttgacaaggtcctttcatgtgcctcatccacaataacgacactgaaatgttttgcaatcagtaagcaaaaacgtttagctgtccaatagtgataataaaaaaatgtgccagaatattcattacctgtagctggccaggtctggctcaccaagcagctcgcgcaaaagcattccatcagtcatatacttcagaactgttttgtctgaagtacaatcctcaaatcgaatggaatagccaacctgtgacaagtaccaaccaaagttcagattctgagagtgaaccgacaatttaaaacaatcagctaccagcagaaaaagacgaaaaacaagcatacctcatgtccgagtttgacacccatctcttgagccacacgggcagcaacactcatagctgcaactcttcggggctgcgtacaaccaacctgaaatataatagaaaagcattacggtactttatttgataaaggagctactctactagccagtctatacttttgaactcattcaaccacaaaggtcatggacaatagctttcttcctaaatccaagtatacgtttaataaaacagcttttgaagaaaaaacaaacaacttcacatgaaaataagaaatggctaagtttgttttcagcaagctaacagctcttagttaaagaaataccaccaatttgttagcaacttcaacttcaatgctacaatttgggacaagcagtaggttgtacctttccacgctttgtgtaaccagcttcatggagatattgtggtatttgtgtcgtttttcctgaaccagtgtctcccacaatgacaagaacctaatatattaaaaaaagttgaaagaaaaaggtttcaaatttcaattgcatgtagcagagaaagccatatagtgaaaaacaaaaacgttatgcacaatttcataatcaaacatttcaatctaaatcttcatttgtacaaaacactgaaatttgatacgttcctttactcaaaaatgattccttctctatcgatcttgaatcagttacacatactcaaatgttataaccggaaaatactgttttcgatagggattggtgaagtatgcttctcgtttgttattagatgatatcaaaaatggcatgaaagcttgaattacctgatgctcttccacagccttaagcagttgatcacgatacgtataaatcggcagacttcttctgacttcctgattcacaaataaacagatgcaagaacatgtcaagataaattttagtttttgctacggatataaattcaaagaaacatacaagcttaacttatcttgaattacatcctaaaaagaagatctggtggttgagtttgatcaaacagagttaatgagaaaaaatagaaaaaggatagtacctgaagttcctctaaagctgttttctctgccaaatcttgagatttttgttttgcatccatagcatcttcatactgcagtacaaaacaagcaatcagctaaaactcaacatatgaaagaaggtatcatcaggtttaatagacatcataggcaataatacattttcaccagccatgacagattcctttatgaagtttatttggtcttcaaacacaaacctgcgaaaaacatgtttaagatttagaatccccagatcatgggactatccatgtttaagagctggcaaggactatttctcaaacgagataaacaaattcgaaatcagtagaataagaataaaagaacaatatgcaacagatcttactgataatcgtctgaggcttgcttattctttgcaccaaattttaatgttgcttttcctgcattacaatgtcatttaaattagcatacaagtaaacaaagtcacttaaatcagtggatagttaaaaaatgactggttaacagaaaagagttaaaacagaaattaccaatctgatggtcctcccaagcttcttgctctgcgaatggattcattttctctgttgaatccaggtccctaatataaaaaatatgatttaggacgtccgaaagaattttgtaaaataagaaagatagatattcctattgtaagtgcaagcagagaagaatgtggtggatcactagcaaatcgctcgttgtcgactcacctgtatcgttgaacagcaacagaaaacctcttctcctgatcaacacctccctcttgatcataagcatctggaattctatactgaactccgagaggtaggagtaaaagggagaggcgttagatatatagatattctacataaccaagtgggagaagggtccagcaagatgaaaacgttacctcctcgacgttatcttcatcttgtgttcttttcttcacgaggtcataaagctctttcttgtacctatcaaagataacagatcaacccaagctcaatcaactataactaaacatactttcttaaatatgaatacaaccatctaacttttcaattgcaaaaataaattttttaaaaatgcactattcatatacaattgaaaatgtttattcctcatcaaaagaagcatgctgcatcaaatagatgttggcaatggcaacaaccaccttgatacaagaaagatgtaacaattacctaaactcacgaagctccgtttctgtgagcttttcacctccgaaaagatattgttcatcttctatctcatccctatggagaaaagaataaaaatgggagaaatcaattatagaagatagatccataaaagatagaaaactgcaaaaatctttatgtcatgtaccttagttcatccagtttcttttgttctctcttctttaagtattcttgtctcgagactttcctgtatcagacccaccaaaagatgatcaataacatggacagcacaaaatagcctccaaagagattatttcaacaagtaagaacaccctcaagagtacttaacaaggagatgattgacatagtcaaaaattggtaactggaacatcatatagtattttaacggtgggattttaacatacaacacccaggtacattattgactactgttcttgtaaatcatgctaggtaactaaacttaattacctaaaatcactgttaaaaagcgatcatcacaaacaaataaagaaggaaaaggttcattaccttaaggaatataaatcatccttctccaaagcatttgctcttcgaacagcctcttctgttttgcaataaaacataaaaccaaaatgagaatatcaggcaaaaaatacttatgtctagatcacaatgtatcatagaaatgttcatatatgttcatgcgcaaattataacagagtgtacctttctctttctttgacaacgtttgctctgttagctgatcaataaacaaacgaaaataacatgtcattgactttcacatgtacaatacattgataagtaaaccatgctaactatatacttcttgtttggttagtgaatttgtcttagcatacaagattggatgacgaataaatgtgaatatttttgcttaattcatcttccatactcaaacaaagctagatttgcctgctatgaattacgagaaaactcattcattaataacttgtacataaattgccgacaatacttacccccggtttgctacaaacacacgacctattcagagcacaaaacaggaaaaatataccaagattagattgaggcatacctttcgtgtccgtgcagtatcacgatcttttaaatgctgctccagttcttctctctccttttggtcacgcactctttcctcttctgactgtgcgagtggacaagaaagaagaacattataaaagcacacgtgaatgcacatatatctatagaacatctcccagttattggagtaaaccaaagaccaggaatcagaaaatagttgaaatgcgttgagagtccagatatacctcagaaccatcatcctcttcagaaacctttcttctaacgtgtctactatcctctctaacggccacctacatttatgttatacattttatcagatcagatgccaagctataacttaccattaagaaagaaagaaattggaatctgtcaatgaggaaaagaaactatgcctcgccatcactttcatctgactgcccacttttctttctaaaccttttcttgcccttatctgattttctagattcagaaactgaagattttttctccacaacaacttcgtcttcatcatcatcagcatctaaaagagcatatgttttctgcttcctcactagcattgctgcctctgcttcatgtttttggtagagctgacagagaagtaaaccaaattaagaaaaccaaccaaaactacagctaagctcatatccatacatacttctcacagaaacagaaactaaaaaagcatctcgttccaaaagcttcaaagagaaaacacaagaacgataaagtttacagcaaactcacatttacaccagcagttttacggggaactctggcaaaaatttcttctgcaaacgaacgagtatcaccagaagacgaaaacccgtaatccaccaactctcccacaagttcagttggtgattttgtttttttagctgcacacaatttgttaaagttttgggacagtcaagcaaaagttcttacataagctccatgatccaaaatcgaaacatcaaattacccattgcaatgagatagttaacaacagccgcttgagagtagccaagtagcatcatcagcttatccgaaacccaagtcttcaaatcattgctcgccattcttactgtatttgaataaacaaagcaacaccaagaatttcaaatcaaaatccattctctaaccatttcacattatttcattgatatacgaatcaaaacaataattagtgaaactatacaagattctcaattttaaaattcacttcgcagcttgaattctcatagctatcaaatcaaccgtaggcagcaatatctccgaaaaatcgaaagtaacaaaacctaatttataaactgacacaaattatcctaatcatcgaactaatggaacaagttacaaaccctagatttcggtaaactaagggttcaggtttctcgagagtgagaagatttcgagagtgaggatctctgttttcgaagctaccggtgggcgcgaatatatatatcggagtctatcgaagtatttcacccgagtgggtggatagaaaaggcggtgagagtctccgacgttgaaggaggccaacgatggagaaaagggaggcggtgaaaaacaagtgtttgttgttttatcagatttcaaataaaaagcgtgttgttttcaagttttacttaaatccataaacatcgcgtcgttttacttatacagatgcgaatagaaaccttttcccaaatttaaagagaaactgcacgctatttaactcatatagaagccaactgtttgttgttcttcttagtttttaattaaatgggccaaactggactatatgggcctcccaagcctttgagcagtaatgaacaaaggataattgacgaatcgtaagcgcaaaaccggcgcgtgagtatcacgatcggtttctgtgaaacacatcagagcaagcctttgacgtgattcctggcttggtctctgatttcccgatttggaaacttctcgataacctctgatccaaaagacgatatgagagctcttcttgcagtctccaagtcgatcccacgagcttggaaatagaagagctggtcttcttcaagatcactgatagcagctccatgagagcatttgacatcatctgcaatgatctgaagattcggttttatgttcacggtggctcggggtttcagaaggaggctccgtgttagttgtcccgcgttggtctgttgagcgaatctgcatattaccacacagaagttaaaccgatgctaagcacaccaaaccaaactgaaaagtttacctgttaactcggacattgccatcgaaaacagcttgaccagaggaatgagcaacaatacacttgtgaagctgtcgtgaagcgcctcgtggatggtctaagataattttgctatggagatcaagagtctgctcgttgacacacatatgaaacgtggttagctctgtgagcgtatcaggcccaagctgctgcacatgaacattgtgcctcccaagtttcccaccagtactcacttccacaagctcatattcactctctgcctcctacagagttcaccacatgaacaattcagcataaaacattccgaagccataccaaaacatcctattctataaacctttatactacaaagaggagaagacaaaatcaaaactcacatgaggctgaaactaaactattcatcctcatcaacaattcaatcataaagattacaacttttccaagttcagcaatcagcagcaacaaaactaaactaagacactctcctcagacagcaataagattcctactttcgtactcaaattgatatcaaaacatccaacactaatctaagccacgagagagtactaccaaacagtaataggctaaactactgattcaacaattcaagaattctactaataccaagccaattagttactggaaagacaataagagaatgagcaaagattgaacctgtcggacaaaagtccacttgatatgagcagaagccatggattctttctgcaaataagaatgcttcaatttcgcattcttttgaacaacaacttccaaaacaggattcgtccaataaaacccttcttcatctttaccaacaaattcctcaacgataccaatctctcctccttcctccactaacacaaaaaccctaggattcgataccggtaaccgtttcgattcccggtcaccagtttcaccagaaaagtacctcaaataaatcggattctcgaccttacatccttcaggaacataaatcaccatcaaatccggtgctcccataccattaatcgaccaaaacaaatcaccagaatcaaaattcccgataaactcagaaatccggttcgttaactcatccggtaaaccagaatatttcccgaagtaaaccccatcgggcaaatccgatggaccaatcgtcaaattcgacacgaacccatcaataatcacagcgtttgtgaactgggtttccgtcagattatccaaaatttccgaatttcgttgctgggtcgaaattggttcgatttgagaagatcggattaaagatgtatcggtgaatcggaaaggttcgtcttttcgtgacggccatggcgtagataaaagagtctcagcggaagaatcacggattctttgaagaggtaaagaagaagaaggagaagctgagagagaatcttcgagagattcagctaattgaagtacaaaagggtcagagaacgaagcttgtgcacgaacagaaacacttgtggaagttgttcttctgttagatttcaattttggtttagatgatagatttggtatcagtgataagcgaccgagaactgtggcagccgccattaatggattccttccttctctctctctttgcttttcgccgcgattcccacaagtactttctcaaatagagtgtgttttttttcttgtctctcttctcttttttttttgttttccgtctctattttattgtatttgtaatgttgtttagtttgggctaaatgggcttctatgatagactcattttaacttaggaccggccttaatacattattattactcaattgttttggaaagaaactgtgaaagtgtgaaagttagcaaaaaagtgtgaaccatttagttaagtctcggtaatttgcgaggcataccttttgaccatgttttattttcagggattggcaaagtgaaagatggttttcacgttttgtctatttagctaaaatttgatccttttgcccttgctgctacagctgaaaaactgttaaatgtacggtttagttagtcaggtttagttagatacactgttccggtttagttgaagatatttttgtttcacggtgaggagtgcggctgtacagttagaagggagatttttttttattaaaaatgaagtgacatcaacatttaatggcccaaaaagtttagacgtgactcttgtcataattaatgcaaaatcatcattacatgttataatataataaaattattgataataattttattcgtattcaaggaaaggtgtcaatctagcgtaagccgcaatactagatcgactttcatctcgcacggctcctaagtgataaaagtaaagaagaactcatcttctttcttttttgattaaattattgagttaaagatgaacccaggaacaaacattaattgctaacgtacattgatgctcaagaagtgttgatcttgtttattcacgaagtttggaaccaatataagcattatcgtataagtaatgaagttttaaagaatttttttgctataacacactatgatcttcagtatgttcgaaatcaactttgttttttatatagaaacccagaaatttttatttccaattttgttggttgaaaattctaaatgtataaatatttatgtttataagtgtgtatatcaaaattctatttgtttttgtagatataatcatgttttcagttgcatttaatgagtttttcctgaatttatgatgcacttgggtaatggatatttccgtatttactatggtcggtgagtggagatgcaaagaagaaaaatgaaaatttgaatcaaaggaagacatgtttcgtcactgtgtacgtgttaaggaaaacatgacgtacacggaatttgtacgtacactaagcgaggctttcagtttgaagtccacagagatcaatcccataattagttactggatgccaggagagatgttagtgatgatagatactaaacgtcttcctgtctacattgacagtcaagtggggttggatacgttctttttgattcgtggtcggtatccttctctcaacttgtttgtccgtcaagacactcgggaataatgtctttaggactcatggtgacgatgctgaaagtgaccgtgtgtgtgatagtgtttcaaatgttgatgaaaataatgagaccgtagatgagcaagacgacgttgaagacgataaaacagatgaggatgaagaggagggggacaacaaagatggtgatgggtatgatgattatcagggtgacgatggatctatgggggaaagtaccctcgatcctactattgatggtaatgaaagtactggcgaagattatgattacaacaagtggaacgatataattgtaaaagaatatggaatatggaatgttgaggagaacgtcattctcacacaactgactattcaacatccagggaaattcagtcgtttgttggcagagtgtacgtacacaagtcagcgtgtacctggcgaagataacatttctcactcgggtgaccatacaccagttgtgactccaagaagtatgtgtcaacatggtttgtaccattgtacgtacactatagattgggaagtgtttttaaaaacagaaaagtcatacaacaaacaatgtcttatcttgcaatcaaacaatctttttgctacaagcaacctaggtcatgtcctacaagattggagatggtttgcgttgatgatacttgtccatgacatttgacagctcaagccactgacatttgtccatgaatttaaaatgtttcaaaatcacatcgtatgaacgttttaaaatatatctcagctactgccaatattagtttaatattgtattaataaatttttctttataatttaattcacaaacaaatatgtacgtatattatttcacatgtatatacattaatttaccaacaatattacacatatacgtacataacttttcaatatgaggaacaaacattatttcaccatctatttttatttaattattatgtatgtatggagattattgagatataataatacataataaaatattttaagttattagaaatcgtatcatatacgttccaataaatgattttgtgtacgtacacagaaaaaattagatgaagggtataattgtaattttccagtcatctttaacctatgtatccttttctacaaacctaattttgcggtcgtctttaccagttttctcaaaatctcatttttttttacgttttgattactatttataaataaatcttgtaaacctagagtatctttagtttaaaaaactaaagtgtttgaatctatgagttttttttttgcattttgttgatctctgaaaacaagaaatttgttcctcaattttggagttcaatggagagatgtcgaaatatgaaggagtcgataatgatttttaaacttctttctacttctctctcaaatctttccgtctctttttctttttcttcttcttcggtttctttgcttcagtttttttttttttttcaaaactgaactatagaagctaaaccgaaaccaactgttgtacggtttgattgctcccaattaaggatattttggtccgaaaacgattgaaaatacaaatggtgaaaaccatatcttattttgacaaaccatgaaagcaattcttttttcatccacttatgtgaaaatttcttttctttttttttaataagttacagtagttttttaccaatttttagaaatcttttcaaaatctaaaatttgaatactagctagctagcacaaaagctagtaagaaacagagtatgtaatgcaagcggaaattatcttgggatgttccgctaccgctacatcaaaaccgccgggatcatattaggggaggcaatgtaacgatgtgattcgagagctaatatatttttgacttttgtagttctttttttctgcttgaactaaaaacaaaaaaaaacttctctattaactatttgtgaagatacaactatcaaattgtatattcaacattatttcaattgttgttaatattttaggttctttttgtgaattcttgttttgtttaatgaaaagattataataaaaagtgtgtggctagcttaattgagttaatgttcttatactatacgacgagagaatactctcatgatgactgtgtgttttcaataaaatatttcgctgaattaaataacgggttcaatttttcatttttttgttattgtagatgtcccttgggtgaagaaactaactttacatatcaatggagaacaaaaaaaagaataatcaatgtgaaactaatagtaaagcaaacaaacaactagtggtgttttgtcgtgtccaaaaaagtgaaaaacgcggtaatagaaataatttaacattttaaaggttttagttaatggagattaatttgatcacataggcaaaaaaaatatgcataccaatgaaaagttgttcattaattagattttccaagtcactctgaggtggaaggaaagctaattgactcttctttgacaaaaaaaaaagaaagaaagctacttgactcctggtcggactcgtgttcacattttcatttatcaaacaatatacaattagaaagggaaaaattcagtttcaagtgtttctaatcctatcaaacaatattgcaaattagaaaacttattcttctttagacacatctacgtaatgaaactatgtatgttagtagagacaagaattctataactttttaccaaaaaaaaaaaagaattctataacctttaaattaacgaactctagccttcttaatatacgtactccaatgtaaaacattcagttaataatcatataattatttattctttttgcacgaaataattacttagagttgagcacaaactgattattcatttcgaaggttttattgttaattgacatcgaggcaactactgaactactttaagctatgaagcccctatattggtataggtcatagaaaacagtatggtgtttataaacataaacttcaaacggcaaaatgtctacatgtatttagtaaagacggcaatacgtttttaagtctctgagtgagtcagtgtgaaagcttttggttcaggtgggccaatgttgtggaatttgtgggacgttcagacaagtaagtaatcttcaaacactttcggtctgtattattaaaatgtaaaaatagattactattactatatttaagtttgtattaatacttttaatcaaccttttagccttttaatcttctgctatatatatatatatataatccataccaaacggtccaaacttacattttcccctctccctctaagtttcaacataatcaacctccaaatttcaacctcttgtctttaattttgttcaaagagggaatttgaaatcttgaaacccttatttagaaataaatttcgtgttcttgtttttctctgatatcataatctgttttttttttctcacttgttccttgagctttaagaaagacaactataggacttagggtttctgttttgtggaagtttcacactgttttcgacaagaaatttttaaatcaagatcaagaatacgactgagtaaatcatttgaagaaattatagataaagaaaatggtaggatcatttttaccacctggtttcagattttatccaacagatgaagaacttgtaggttattacctgcacagaagaaacgaagggcttgagatcgagctcgaaataatcccattaatggacttatacaagtttgatccttgggaacttccaggtatgttgcttcttgtaaaaaataatcagtttttactatctatattataacataccaagtttttgttcattacagagaaatccttcttgccaaatcgagatatggaatggtttttcttctgtcatcgcgacagaaaataccagaacggatctcgaataaacagagcaactaaatctggttattggaaagccactggcaaagatcgaaaaatcgtttgccactcttcttcttcttcatcatcttcctctatcaccggctgccgaaaaaccctagttttttatatgggtcgagctccttttggtggtagaaccgagtgggtaatgcatgagtatcgcctcttcgacaacgatacttcacaaggatcactaaacttcaaggtaacaacatcataaaccaaacagatgaaaaaataaaaaacttgattcatagtttaccatttaccaattgatcattttcatttggtattcttccgctctttagggagacttcgcgctgtgtcgtgtgataaagaggaatgagcatacgcttaagaaatgtgaaattatctcaccagaggtttcagatgagtcattaagcaataatgttaacaatttttgtcaagcaagtgacctagaaaagggttcttgtgatgcaagtaacacacgtttgtcttctcctgatttcatccttgaatcatcttttcaggtttagctacttaaatccaaactctgcgaaagtcccattcgtttatcaatatcactgtgtctcaaacttcattacattgttttttgtagggaaattcacattcaaaaacagaagaagattccggtttccaagtatttacattacccgaattcgaatatccgctagaggtttttgcagatttgaatttcgatttggaaatggaggatccattcatgttcgattatcatccagagcctcatatgaacaatgaagtcatgagccatcacattcgtgggtaaagaaaaatattatagttcactagactgaatctcaaaaccaaacactcgagatggatcaagatctaactacaatcacatttattgaatatagatttgtttgtgtgtatagttgcatattataaaatgtaaagctacaagattctcttcagcatcaactagtagactagtagttatagatacactttttaaagactttttaggtctcaaaagtatgtataatcaatgttgtatatctactaattacataaataaaagtgacctataaattatcaggagacactttgttgagattggcttagttatttaatacaaggaagcaatataaggactacaaaagaccaatacatcatcaagactaaccttattttcatctccaaatatagattcttttccatctttcctcttagcatatgacaatcccaatcttgatttagccaccctcaaatcaccaatccccgagttcgtatccggacccgcaaatccgcccatcacgggagctaaaggcggtccgataagaagcccgtcagctccaaattgaggccctccgcgagcataatcaaatagtgctgctccacttcctccaaccttaggaaggacgattgggtcatcacaatcctcgagccaatagaagaggaaagcatcaaatgtatcgtaataatcatcagtacttctatatccttccggactaaatccaccaaacttgaaagacttgtctttagtgtaagctatgataacacatggacctttgaagtcacaacgctcgtggaactttgttgcaccaaacccatcaatgcttgccttgtagcaacattttaactctcttcctaataaaaaagattgttatatagttgaagaactttagataagaaatatacttattcctagtggtagaatatataagtccacatgttgctacaaggacttagattgagaagaagggaataaatttatttaccttttaggaaggttttgtttaccattgaaagagagaaaggaatttcgacatcgtcgtggtaagccggttgttgcggcggccggatattgtctattttcttaccggagttccaaccgaatagactgttgtaaggacttattctcttcaaggtcttgaaggttacagtatgaaatgagtttgagatggcacacgaagccattttcttgcaagtaacggccacacaacaaaacccacaagaagaaaagtagacaaagcatcaataattgtggttttcaagaacttgtggttgtcattgttttgctaacaagtgtccaatccggtttaaccaaacaaaaccaaaaacaaaccaaacgatagttgatttttatttggtaaaaactagagaggcatgtttcctccaaatcgaattcatcaagataatcacgataataagttattttacatcgtgcaaagatctttcatcgaaaaaaatcaaatttcctgagtgtaaaaagctctgaggaagaagctaaacatattatttgtacttacaaagtaaaacctgaagttgtggtgatctctctgaaacccaaagagaagcttatttctgcttttatgaggttgctccaaagatacggattcgctgctgaaccaaacctcggcaacaaggacaagtgactttgcttccgccgttgttgctcgcgaagaagctatcactgcaactaccacacacaacttgatgcgcacaaggaagaaacaccacagagacttcatctttcatacagattatgcattctcgatcatagtttgcttcattgtcataagacccttcaagcttatcaatttcttcaagcagcttagcaatgttttctccttgagattttttgggtttccaagcgttgttggatatgtggcttgagtcactatctgaagaggctttgagtcgaccgagttcttgctccagtctttggtgatcgtctttgtgtctttggaagtctagttcaattttgagtcgtaaagtctcaagctttctcttgttgtgaccctcagctgcttcttttgagcgttgttcttcctccatttgagccagagcctcctcttttgccttctgctcttgcctccatttcgcctgcaaataacatatgaacaggtaaatataaaaagaagttgatagactaaccatcattccatgtttaattgaggtaaagtaaattgatatttcaattatcagtcatcaaccacagtccaagtaagcaaatctagagcaaggttttgaacacaatgtgcagcaacatagataacgtacccgcaaggcgcaaacaggtaaaacgtcaggaacgaaaagaaaatatagaccaccatgtagagagaaaagctatccagtggaacatatcaataggtatagcaaatcatttggcttctacaactcgagacggattctccaagattatattcatatcaaatccaggttccatctaccctagcaaaatatgtggcagacacagactatacctcttgaatgatctttgaagtcttatggcatactaccatctaagacagaaccaacttcgcaactagatgtgtgcctcaaatgataacgtacgtaaatattttgaatcctaagtaaatgtacttcccacaattctagagttaaaagtatagaggatctagagaactttcacagtataaatgaatataatatgaaccaacgtacctcaatctccttttcatactctgtgatttgagctaaagtcttatatagggccttaatcttttctttttcagctgtaatctcatcctgcaacttcaatatctgtttctcccatgccacaagcttcttcaagcattttttctccttctttgatgcttccatgcacgctttaagcgattctgatgcacttaatttggatccctcccgctctgctcgaatctctgcattttgattctcaagctttcttacaattacattggccctgtcattttgactgcaagcttttctgagttcaatttccttgtcagtaaatcttttcgcagttgattcttcaacagcctgtttcccctttttcagcagttggattccttctctttcactactcaatgttttaagctcagctaattcctcgctgaccttttgtgcggcttgcattgcgttcttctgagcccactctttcctttcctttactttcttctcgaaatccttaacctgatgaagcagatcgactatcacacaatccttatcatccacacccaccgattccagattatcatcaaggttcagatcacgaaatttctccaacaccgtactaacactttcttcactccctgacttacgtggttgctgcccacaactcttcacaattgcaggatcattacaagctttgctatcaccaatagtatcagacgactgtatttgcttctgcttcatactagcacgatacccagcagcaaacgctgcaacattccgcttcaacaaggacttcatggatggcgaaagattaaaccttttaggacaatcaatctctctctgcaacttcaactcagcacctttcatagaaaacccattaccagaaaactcaggtcctcccccattcccaaaaccccaacctccatggaatcgacacaacgctggtgccataaaaccagcaatatctagagtaccacccgtaccaacatcttctacattgctatcttccttagtacaacaactagacctattcgttgggacatccagagtacttgccctaccaacatggagctcactcattaacaaacaccacattgcatcacctttactcaaattaggcttaacttgttgcaacaagtaaatcatacccgcaagcgaatactcctccaaatctctcaaatccgtaaaaccagtctccgttcgatcctcaccgttcccattactcccacctccacctccaccactattcaaataagataatgaattattcactatattagtcaacacatccaattcaccataacagtgtccattactcaaaaccgctttcaacgcaacacgttcctcatagcccaattcaagaagcttagaaacagcttgattatacaaaaactccaaatgtttcagcaaaatctcttccaaatgctcctctgtacaatatgcccaaaaattctcctcaggattctcagtaacggaattcaaattgacagaaccggaatcagtaagaccaggatgataaacaaggttctcaacaattgattgtgacatagcaatcttctcgacccaacataacggtgggtcggatctaaatgcagcggctttgatcctacgggtcggtttcacgtgcttctccctcacagtacaacccatgccaaaatctgaaactgaaagagagattgaaaaacagagagacgataaaaatgaaaactttaccaaccaaaaaacatgggtttgaagaaatggaattaatttattgaataaataatgattcgatgatagagacggaggaatacgaagaacttactgatcggtggtggtggctgaattttctcggctaagagaagatgagagtttcggcgaaaaggttatgcgagagagagagagagagagagaaactttgtttcggtttcttccatttctggcggcgccagagaatatatttatgggctttgagcccattacttgactgaacttatttgggcccatatatccgaattcaaaccgacagcgttttattataggtatgggttaaaatccgatctgtttgtttggtttcggttatatagaatgtgaaaacagattagtttggttcagtttgattatggttttgattcggtttggttttagttaggaaattaactttatattatataaatataatgtttgaactaataatattttaatatagttatactaacatctattgtattaataaattaaaatgtacattatgattatatttatctcaattagtttagtccgatcgactggttacattaaactcggtttcaaattcttattctttttataaaaccaattggttaagaagcaaattttgtttttggtataaacatttatttcagtttggtttacagttttgtgatcccttcgatgcttatctattctagaaaccctaatctataacttcttagattttggcaaagcaatggacacatatatataacttcttgctttttgaaatttcttagattttggattttggtgatattcgcttatatgtttggatgcccagtggtacgtaaatgttgttcctttgggtaattaaccaatgtccatcagtccatgcatctgcgttttggatgtagagttttttttttgctataaagctttttttatgtagagttgggataccattggcattaataaacaaatagtgtgctaattccagttgtaattatatacattctctatagcttgtgttacatcgtctatagaatttaccacattctcatataagaaaaaacgaatggaaacaaaagaggtttttgtatgcatcttcttaagctgagccatcatagtttgaagtaagacgtggacaactccatagccgcactttaatggctatccaagcgtctctagagacgtcaatgtccaaaatgttcttacatgactctttcctttgtccttttattctttctctcccattcctccaaatcccacacacatacatgcacatacatatacacgcatacgttacgtagatgcatacatacatgtattggcttagtggtcatgatggaacgagattgagaaactcaactctgtttgcttgcttctggaaggcatcttctgttgaagtgtcttttacaatttctttagacaagatgtttggattttaaaacccttttaacaaaaaaataaataaataaaaataaagatatttggattttgcattgtgacctcaaatctctttgttccctaagaacttcgaccattttgtcaaatcgacatacccatattgcctccttttgaatcagagcatttgttcatgatggtatgaatggcatagtgtttctttttgtattcatagcattcgtcaaactttcacatttttattccgctaaatccattacatgctagcctctattcaaataacatgggtagtaaaatttaaatgttagtagcctctattcaaatcagttttttttttacattttagtaatctattaaaatcaagtttttaacgtatcatattgaatattctgaataaataaataaaaaatatatattctgaataaattatattcatttcaaacgtttttgatgtttcatcactttataactattcatatcgaatcactttttgtaatatgtattatttttactatgacaattaatgttttatttcccaatatacattgcctttttgtatagggatattaaggcattaccaagttatatcgttttatccagccgacttttggatttttatgttggatccgaaaaaaaaatcttctttttagcattttcaatttaatacgttttataggggtgtattcaatcaaacatttttgtttgttttaactagttctatattattaaataataaatttttcgatattttttctcttgattgtctttgtttggatgcttcttggttgagcttgttagctccctattatcatgcatcctttgagttattttggttgttttagctttaccatttgctcgtccattatggtggtcattggattggtttgtgtgcctcatagtagttctttgtgtcttttctttgcggaggcaaaacatgtttaaatttaaaattatttttaaatttgtccaagaacagtattcttgataacttcaagagatttttaaaaaatgttcccaagtaaaaaacacacaaaactaaatcccataattttaagtggaattttgtaggattttataataaattataaatcatatcaactttcctaattcatccaaaatcatataaaaaaataaaactcaaataatttaaaatacgggattgaacatgccccttactacattttccactaccaatattgattgacaatgcagaagaaataattcaattaattagaaaaaacaaaattaaccactcaagcgttaagatccatgccgaacaatctaaagcttcaatattcggatatcttgatttggtttagaacatcaaaaattttggttttacaaaagctttgccgaattagactgaattagaattttgattatattcaatttgaaagccaatatttgaactggaactaaaacttccttctatgtatacacaaagataaaactaatttccaaataatttcagttaatttaaaataagataaattaatttccatatatttcacttatattataaaatcagttttgacatagaaataactcaatgcctactccacctcgaaccatacacagtttatgtaaatttaaactccacataactaatcagcttacacacctcaatccaacatcagcttaaaccacaccatactcgattcggattcagatcacaacaaaatcaaattgaaaaatgaacacatataagttataacatagatatacctgtaagatcacggtcaagataatttgagtccaaatttatatatagaagctcatatagtaaatgagttgagcttagctagttcatgaaatatctgaattc

SEQ ID NO: 999 - DNA, 94618 bp, Arabidopsis thaliana
gaattccacaaagctctcaaatcacacaatagaccaaggttttgaattaagctaagtaagatagtaatgaaaataaaaagaaacaaaaggaagcaatagcagattgtgactttgtgaggttgtaagacaagaaagtaaaaacgttaggcttagggtattctcaggaaacaattggtttgtagatctaataatagctaggttgttatcgaaccattcttaaactcaaactctaattatagaataaccagtggtgttccgtgaaactccctatgcctatagctaagaataaccggagaagccgagagatctttaacctaaacatgcattctaaacgggttcaattgttcaccttagaagataggccgattcttattacacacctataaaccaggctcatcaaataatagatccaactaaagatacctatggtgggcataaaaatggtttggattcaagttctaggtgatcaatgtagatctagcatttagaacaattaaagataaagaattctacagataacctaacaaagggggatctactaaacaatatgaatccctaatgagaaaccctacacctaacaagtggattactcagacatgatcaaagaaacacaaatcatagtatgaataagaaatcaataataacaagagaaagagtaaagaagatcttctccaaagggagtctccatagggttttgctcccaaagtacaaaagagatgaggaaaatagtctctacaagcttaggtctaaacaatgacctttaaaactatatatatgacctaaaaagtgatgggccttctttagaaataaaagaaagttctgggccaaatttagaaatcttcaaaacatcaataagttgcgtcttcgaattgccgtcaggtattggtgtcactcaacaccaggggtggtgtcgttcaacacctacgtgcattttagtttccggatttcttcagcagtataaattctctgttttcctccagaatgctccattatctcctaatgaatcccaaacatgtaaagacctgaaaacgactagaaaagactctaaaacctatacctaaatcatagttaaaaacagtaaaaatagggatatattaactccccagacttagcttttgcttgccctcaagcaaaacacaaaagccgaacctgtggaagaggttttaaaacacaggaactcccaacattctctagcttattgccttgataatcctaaccaaattcgtctagcagttctaatcaaatcctaaccaacatgtatttctctgcaaggttacacaacattctagattccatacctaagttctattactatatctaccacgctttcatcgatgggtctcatcaaacaagctaacattcaaaatccttctagactcattcttgtactataccatgataaatcgaccattatttatatatttttttctttggtgttctttctcttcccagacttattctttttagagagtaaacaaaggggaactcgcatagtagatcgacactctcggcatttttcgaacctttgtaattgatcattctagataatgtataataatagggtcatagaaaacattcctacccctatacactatctgaaaatcctgtcaatctctcattttctttctctttttataatggaagaggaacacattctttttatcacattggtctcaatatcaggtatgaacaagaagtcaagatctatgaatactaactgtttgaagaggtaaaaggaagagcagtgagattaactccagccttagtggttgtgttggaaactaggatatcctcaagtctgttggtttgccatctagattttccaatagtcggattgagtcaaacttgcagcattaatcaaccagacaataatctaaagaatagagatcataattcctatcaaaattttgactcaataaaacgactcaaaaagaaaaataaaaataagaataagactcaagaaagaaaaacatagtaagtaagcgcctcccccagacttaaacgacagtgtccctagtggcattcaaatcacgagtaagcgagaaaaagaaaaaaaaaacagaaaataaaagaaaaataaagaaaaataaaccatactagtgggttgccttccactaagcacttgtttatagtcaatagcttgactttgatggagtatggggatcaggtggatcagatggtggcagcaaatatcgcggagaaggacctctcatcatccatgttggcatataagcagttagcacgtgaagtttatctaggaagagaggagcatcagcagggtgggactcatgtatgggtggaatactcctttttcctgcacaatcatgaaaagaaagaacaagagctcaacgagaaactcgtggcttgcttaaccgtaaaatagtatttgaaaattttaaggtcttattgataaaatcaggaggtttaggaggaggagatgagtaacttagccgtttaggaggtggatgaagtatgagaggtgcagtgggtgacgtgacagtagaacctggacttatagctgtgatcccagatggaaaaatagctatcggagatgattctgctttaaccagtgatgggtgtcgatcgacactagtagttgtgtcgatcgatacacgtgcaacaactcgtcttcccttagcctatcgacaagtcagctttgaaatctgttctaagacgataattgtcttccttttgtctccctgattctgtggagccttgcaacgcccctcctgaatcccttgcatatactgttgaggcgatggacaaagaattccaggcgtgtagactagttcatcaacatgtggaaagtcaaggctaagtggtgcagtttgcgtccaatatcgatcgacactaggtgagtgtcggtcgacactactatatggtattgatcctgctctgccaatctcgattgattctgctccatcaagcgtcgacacttcctgaggttggtactgatgtcgatcgacacccaggtagtgtcggtcgacactatcaatgtgtgtcgagcgactctagagatcagtgtcgagcctggtcgattttgcttcgtcacagcttgatgtctcgtatatatgccatggtgtcgatcgacactatctcttcaacttcaaaatcgccactctcgtcaatcttcactaactcatactcactttccattgaagcagcatgccaagatgtagtgaggctcctcttattccatctagagataggtttctctaagatcctctgttgaccttccagaatctgttccagcaatgattctatcttgcttctaggtgctggtggagtggggcttggtaagaagcaagatcatagttccttgtgaagctgaaactattgctattctgaagtggttgctggaactgagaattctcagtgtagctggttggaccattcccataggaaactctgtagccttgttggtgatcaaatctctgattcggaaaatctctgctacgaacataatcgacatcctccgtaagtttattgtagaccgcgttaagcttagccatgatccctgcaatcttattctcgttcatgtttctcgtttggtcttggttctatgattagacaaacacctgaaacacacaagaaaaagaaaagagaaaaactaagtaaaatcaaaaaagaaaccaaaaataaaagcttagacaaaatcctaatcctaatctaatggtgaatcatagagaacttcggcaacggcgccaactttgatatatatcaaattgccttaagaccactctctcaaataagagatcgattgtagcacttaagggtcgaattctacaaagctctcaaatcacacaatagaccaaggttttgaattaagataagtaagatagtaatgaaaataaaaagaaacaaaaggaagcaatagcagattgtgactttgtgaggttgtaagacaagaaagtaaaaacgttaggcttagggtattctcaggaaacaattggtttgtagatctaataatagctaggttgttatctaactattcttaaattccaactctaattatggaataaccagtggtgttccgggaaactccctatgcctatagctaagaaaaaccggagaagccgagagagctttaacctaaacatgcattctaaaaaagttcaattgttcaccttagtagataggccgattcttattacacacctataaactaggctcatcaaataatagatccaactacagatacctatggtgggcataaaaatggtctggattcaagttctaggtgatcaatctagatctagtattaagaacaattaaagatgaagaattctacagataacctaacaaagggggatctactaaacaatatgaatccctaatgagaaaccctacacctaacaagtggataactcagacatgatcaaagaaacacaaatcacagtctgaataagaaatcaataatagcaagagaaagagtaaagaagatcttttccaaagacagtctccacatggttttacgccctaagtacaaaagagatgagcagaatagtctctccaagcttaggtctaaacaatgacctttaaaactatatatatgacctaaaatacgtgatgtgccgtctttagaaataagagaaagttttgggccgcatttgaaaatcttcaaaacatcaataagttgcgtcttcgaattgccgtcaggtattggtgtcgctcgacaacaggggtggtgcctttcgacacctacgtgtattttagtttccggatttcttcagcagtataaattctctgttttcctacagaatgctctattatctccaaataaatcccaaacatgtaaagacctgaaaatgacaagaaaagactctagaaataacatatagactcgaaaagctatacctaaatcatagttaaaacagtaaaaatagggatatattgactagcattaagaacaaccaaagatgaagaatcctacagataacctagcaaggagaactctactaaatcatttatatccataatgagaaaccctaaacctaacaagaagactactcaaacatgatcatagaagaacaaaacatgtttgagtaagaaatcaataatgaatataagaagagaatagagtaagaaatatcttctctaaagggagtctccacaaggttttgctcccaagtacaaaaaaaagaggagaatagcctctccaaagcttaggtataaacaatgacctttaaaactatatatatatatatatatatatatatatatatatatatatatatatatatatatataacctaaaacgtgatgggtcttctttagatataaggaaaaattctggaccaaatttggaaatcttcaaaacttcaataagttgcatctttgaattgccatcaggtattggtgtcgctcgacactagaggtggtgttgttcgacacctacgcaatttttactctctgaatttcttccgcagcataaattctctgttttcctcgagaatgctccattatctccaaatgaatcctaaacatgtaaagacatgaaaagaactaacaaagactctagaaataacaaatagactctaaaactaatacctaaatcatagctaaaaccagtaaaaaatagggatatatcaactccaatacttagcttttgcttgtcctcaagcaaaacaaaaaagccaaacccgtggaagaggtttgaaaacacaggaactcccaacattctctagcctattgccttgatcatcctaacaaaatccatatgcctagcagttctattcaaatcataaccaacatgtacttttgtgcaagcttacacaacattctagattccatacctatgttctgaaactatatccaccaggctttcatcgatgggtctcatcaaggaaatcgatcattctttatatttttcttttggcattctttctctcccccatacttattatttttaaattataaacaaaggggaactagcatactgcattgacaccctcgacatatttccaacctttgtaattgattattcctaataatgtataataatggggtcataggaaacattcctacccctatacactaccgaaaatcatatcaatttcttgtttttgtttttttataagtggagaggaatacttttctttttttacattggtctcaatatcaattataaataaagaatcaagttctataaacagtaaccgttttgatgagctaaaaggaagagtagtgagattagctctagcctaaatggattgtgttggaaaccaggatatcttcaagtctgttggtttgccatctgaattttccaatagtcggattgagtcgaacctacaacattaatcaaccaggaaataatcgaaagaataaagatcataatttcaaacaaaattttgactcaataaaacgactcaaaaagaagtaaaataagagtaagaataaaactcaaaaagaaaaacgtagttagtaagcgcctcccacagagttaaatgtcactgtccccagtggcattcaaatccgaagtatgcgagaaaaataaaagaaaaacgtaaaataaaagaaaaagaaaaaaaaaaccataccagtgggttacctctcactaagcgcttgtttagagtcaatagcttgactatgatggagtttgggaatcaggtggatcagatggtggaagtaaatcgtagaacctcgcatcatccaaggtggcgtataagcagtcggtgtgtgaggtctaccaaggaagtgtggaacatcagcaaggcaggacaaaggtatgggtggtctactccttttacctgcacaattatcaaaagcaagaaaaagcgctcgacgaaaaactcgtggcttgcacgctttaccataaaacagtttttggaaatttcaaagtcttattgatgatatctggaggtttaggaggaggagatgagtacctttgctgtttcggaggtggatcaaggagtaagggtgcagtggttgacgtgactgtaatgcctggagtatcagcagtaatttcaacacgaaaacaagctctaataaggaactctatctcagcctgtgtggggtgtcgatcgacatccccaatgtgattaataaataatagataaactccaagcaagctttttattgcttctcaaagctttgatggtgtagccaaagtctgtatgagtttttggctttgtatcttctaacaaggaaacactactttagcttttgggaaccgattgcggttctacttcttatactcaatcatacacatgaaatcttgtcacatttgactccaaaacactaactaagcttcttattgcttctgaaagctttgatggtgtagacggagtccgtataagtctttggatttgcatcttttaacaagttaacactactttaacttgtaggaccggttgcggttctagttcttatactctatcataaacatgacatctagtcatatttgactccaaaacactaacaaaccttcttattgtttctcaaaggtttgatggtttagccgatgtccgtatgagtctttgcctttgtatcttctaaaaaggaaacactactttagcttttgggaaccgattgcggttctacttcttatacttaatcatacacatgacatctagtcatatttgactccaaaacagtaaccaagcttcttattgcttctcaaagctttgatagtgtagccgaagtctgtatgagtctttggctttgtattttctaataaagaaatactgctttagcttttgcgaaccagttgtggttctagttcttatactcaatcagaaacatgacatctagtcatatttgactccaaaacacttaccaattttcttattgtatctcaaaggtttgatggtttagccgatgtccgtatgagtcattggctttgtatcttctaacaaggaaacactactttagcttctgggaaccgttgccactacaacaaatgttgtcatgattagcacggaaaatttgctagtatacacataacatagcgaattcacaaatgctatgacatcgacaatcatcataggggtaacccatataatagtcttattttaacagctacaaaattgactaattctataacgaacctacaacgctattacatattctcatatagcaccacatgtgttgctatcgtatgacatgataacatagctcttctatattgtagtaatatatatttgtgtagcgtgatatttgttgctatcatacatgtttatactataggtcttgaaaaaatgttatgtattatttaattctgacatttacatatgctatactacaatatttgacaactaatattttagtgctatgatagaactagatatgctatgatagaactatagatcaattctttttttgctattgtatgtattttcatatagctattatatgtgttttcttgttttctgatacaaattaataaagccatacaatcctgaacatatagaaataaaaatcatctcacataaagtctgattccaaatctataagagtaaaagtttacataatcattctaatccaaaataacgtaacacaaattctaatccaaaataacataacacaatttctaacccaaaataacataatacaaggggaaagttattagggtgacccatatttcattcataataaccaaaaaggaatgctaaaaatatgagttatatgggtaataattatgtctaaaatgtccttattttcctttacagaaaaacaatattacagaaatgccatgactatttgattccagcatggtaataaaactacatttaaatacgaaactgccatcgtcgtttttgctaaatctatggctcttgttgtgacagatttgttttcgatcacagattttttggtcaaccacagattttttacaacatacttgttttgtaccacagactttacttgattaagttacgacagatttttattttttcgtagatttgtttatcgtgacagatttgtttcatatagtctccacagatttttctaaaatttcaaaatttagaatgttgaaaccaaatctgtcactgatttattttccataccgcaaatttttctttatggtggcagcagattttctatttgtaaccaaaaatctgttgtgttataacagatttgttaacccggaaaaatgttttatagtcatgacagagttggtttgtgtaatcacagatttaattaacttgttaacaaatctggtgttttacaacaaacttttgttaaaaaataaaattactagacagtcatatagtgataacagatttgtgtttagtgatgactgttttgtttttcagtgtcaaagcataacagatttactcatgtcaatgttatggccgatttgtttatgactagaataacctttttagtaataacagattttttgttggcagatttgcttttaaaatttcgaaattttttgttacatgagatttatttgctagccctcaagtaataacagacttttattagcgtttacaaatttttacaaaatattgtcatatttgacgtttaatgcattacatatccaattacgagtcaagcttggaaacagctaacaagctactctctctgatcctaataatatcatttgccgtcgtacaagacaaagacttgcaaacgtcacgacgcttagaagaatgtttaatacaaacacaacttctaacttaataattcagataataaaacttaattaaattcaacagtttgatgttagttttaatgagcttgttggtccgtttccggagattgttggtggtatggtggaagttgggcagttgaatgttgctcataatttgttatctgggaagattccggcgtcaacttccaaagcttgagaatttcacttatagttatagtttcgattagaaatcaaagaagaaggagaatgcaaggaagaaggttaaataagaactgaatcgagaaaataaaacgtaatgagagtttacttgttttgttttgttatttttatatttgtttatttattttaattaataatttgttttttttgttgttttttgttaaaagtatggtttttttattgattaaggttaattagtcttttaacttaaaatatgagtcattatagttaaccatcaattgagagagtcataatagttatttatgttaagattagagttagtctgagcaaatctttctaataggattcataagttgttgattagcttaattagttttaaacttaattaaaactagctaacatggaacaaagttacttcattccccctccaagaagcaatattatatcagatttgtgatatcagcaacagatcgattagaaagcacaagcaaaaccatatacataccttagtttcttaaactgatcaaaagatgaccaacttatccattggccatactcgatttcatctgatggcctccaaaccgctgcgtcatctttcttcactatatcaaccatactctagctgcatgtgaacccaagcgaacacattggaccttaacttctaggtcgagtgaatgcacacgtccttcagcgacaacttgcttccttccactaatatccatcaacttgcattttttattttctttgatgacctaagctcccattttacgctgtcatgattataatacaagtcagagagatataaaaatcagaatcacctgcataagtatactataaaagacttaccggagatctttgaggaggggatattagcatagatcgctgacttttcttgacaggagattttggaccagatgatttctgacttactacagcagatttttgacttgtttccaaagatttttgagctgatgctgtagattttccttctgaagattgctgagttgatgcagctttctaaataggagattcctgacctgttgcatcttttgtgttttcaaagacaactttgttcacaggccatgatacaaaagataatagacaatcctcaaggtatgttacatcaatagtaggtgtccagataaatgtatcaggttgatgtaccacatctacaaatatcttcactgcatttggtctgagaggtatcccatttactaaggtatcacgatcttgtgtctgccaacgtctttcagcaacatccacgtcatctgaagacaaatccagtagcttgcatttgttcatcgctgaataagtcctttggctttgtcaaacacattcatagaacatgttaatacttccatatatacattattatactcatgaagatgaatcataaactttacctcttctgcaatgtctcctggttgttgctcatatattaggttaacatacttagaggcaggccacgcaatcatcttaccgataacagattcaattgtgcatatgttaagcacaggtctccaaagatatgtgtctggtaccatagcagtgtcaaccaacactttgacatcagatgggcctaaccgacaatcattcactaagtcatctggatcagaagttattatacgcccctcaacaacagttgcatcaccattaccagtccaatcaatcaagatacacttaggttgtgatcttttgttaacgctctataaaattaataaagactaattactaaggcattcctcaaacaaataaaacatggatttgatatcaattacaaacttactctagcagctgagtttgaagcagcatcaggctattgtctctgttacaaaaataaaccaaagtcaaatctagtgttataatgcatcaagttaaagtataattaaagaagtgtctaacttggttctttattttgtcaattacatcttgtaactcattgacctttaactggagatgagcttgctttgcttccgtttcagccatacacttgtttttcatttggaaacatgctaatttggtcttattcatgtttcgacccattgccctcattcgaccaggattgtcaggtccaagtagttggctaagtgaatcttggccttcaaaacaagcagatgatggcgtatcacttttgacaatctctgatgcctctctctatcaagtacaagatacggattcacatgttatgatctaattctagcaatgaaaataatagtacaagatcttgtaactcacaatcttttcagccgcattttatttcactagtgtaccatcttttctagtacgtgacttgatccacacctgaagccttgacatttaactgggatttggactctcctttttctaattcagaccaaaaaaagtttacaaatagctagtaagtattcaaaagtagtgactgagtttaaacatgtaacataattgtagtatgattaccatatcttctgctagtctaaccattcctctacggctagtggtgtgaggaatctgtttgctccttatagtaaataaacttagttaattacaaatgattaccttaaactctttgctagttttgagcttgactagcttacgccactcaaatggagaaacattcttaggtcgcagcttcatcctcaattggttagtctaggcttttactagccgagatttccaagaccatgaagaaaagcaatcacgtatatatcatcatcacatggttctcatatcctggcaacatttcgatattgatataatattccgttagccaacaagaatctcaatatcttacattataccctaacatctacgtttgatttgaaactgactttgagatggttacgtatgcttcaagcactacaacaaatatggacattcttatcacgagaaaaatgctataatatgtctttaatagcttttcatgaacgctattttaggacactgttattatcaggagcggacccacaacaagagagggttgggcacgtgccctacactctttaaaaaaaaataaaaattcctttatataattaattcatttgctggaatatctgttgggcctaacgtgaagtaccctactctaatgttcaactcaattcaattaaaacaaatataatattttagcccaaaataattaaacaaaaaagcccataaaaatatggctctgccctaaaaaaagaagtcataacctagcttttgtgattaaacttcacgagggaaacattattgacattgatacacctagctttttttctttcgtcaattaaattttaaaaaattattctctttattggtttcttctcaatttggaatcattcagtcgcaaatgtctaaagtaagtaattttagtgattattttatgattgattaatactaaaattgtagtagatgattcaaatcattcgtatgtttttttttgtaattagatcaaaatttctaatctaaatttggtttctaatatatttattagggaggaattcatagatattacaaaagaaagttggaaccaacgcctgaagaaaatttggaagatttgctttcagaccctgcagataggaaaaaaccttcggactatcatccaaatgaaagagataaggtaagacgcaaatatctgattaaaggtccttgtcaacctcgcgggcatgattttcctaaaacactatcaggaaaaaaattgagacgattcaatctagagtggtttgatctctatggcaattggttggaatacagtgtgaaaaaagacaaagcttgttgtttggtttgctacttgtttaaagattacacagaaaataaaggtgaaagtgatacgtttgtgacgaaaggtttcgatacttggaaaaatcctcagagtttacgtgagcacgtgggattggtgaataactttcacaacaatgcattaaaaagggctgattgtttgatgaggccaggtcaatcaattgttcatgcttttcataagcaagatgaaatagtcaaaaatgaatacagaatcagattgaatgcttcaattgattgttgtagatatttagtacgacaaagattaccttttcgaggtcacgatgagtcagatgaatcagctaataggggaaatttcttagagcttgtgaaatatacagtagggcagaatgaggttataagcaaagttgtgttggagaatgctccaaaaaacaatcagatggtatgtcccaaaattcagaaagacatcgtacattgctttgcggaggaagttattgaatctataattcaagaagttgatcatgatgtatattgcttgttggtggatgataagtgtgtattttgcatgttttgagcatccatttttcatcattttagcattatattatcactgttttataccattcacatcatttgtcatcactttgcatgtttaggatagttttgcatgcatgttgcatatttgtgttgttttcaggtgatttggagctgtccacgagctaactggaagaagcggacctgatcatgacaaaccactcgacccagaggtcgagtaggagcttcaagatctcaagagaccactcgacccccaggccaagtagaagacaaaaccactcgaccacatcactcgacccccaggtcgagtgacttcctctccatcttctgacaaccactcgatcacgtcactcgatcacgtcactccagctactcactcgacctcccactcgaccacatgggtcgagtacagttcttaatccgtcccaatacttcgtcgttttgagtattagggtttcagaatatttggctataagtagcatgtacttcacattttcgcaaacaagaagtttttatctagttttattccgcagaccttgtgttctagaccttttgtaatccggatttctctttatctattcagtattcagtattcagcttttgttcttgatttcgtttactgttgttcattctattatcatcctgctgttacactgttgttatcatgttttcaacctgttcaacgtttatgcttactgttatgatgtctgagtagtgaataggtttctgaggatgggttagagtagtgtagaattctaagtatgctaggtgattgagtatttgttgatagatcccttctgaattagttgttcttaatgcctattgctttctgatcaactaaaatttgagcccagacatttccgcgctcaaaaggtgttcgatgaaatgtctgaaccactaattccagagactcgtgaccctgtaccaaggtattggttgcaaagagcgttttggctttaacttgttgattcgtaatgcctgttaggttagctctcgtcaatggtgattgagtctgggactaggttaacttgagagtctctgttgcggtggcacttagatttggttaatgaacttgttgtctaaagttaatttattgagcatgtcaatcacctgtaaactgagaaaacgaaactactcgattaccccatcctcgggaattctttatctgattgaattatttgtttactctattgttgtttactgcatcttgttatctatcgcttaatttctgcagttctttcttgttactcgacctcatactcgactacccagttgtctggcaacagactgtgcagtcgagtatccgtgttttattttctgtctgttactcgatctgtcactcgacctcacccagtgctctgcaaagagctgtgttggtcgagtgtttcactgtttctgtttgattttctgttttctgcatgttcacttaggactgctagaacacaccaaaacctgttattgcttggcttgacttagtgacttctgatcacatcttgattgttagcataacacccatttggattgacaaccttcaatactacaacgacatgatagtgttttaggtttaattgattaaaaacctattatcagtggataaatctgcagatgtttctgataaagaacaaatggcagtggtttttcgttttgttgataaacatgggacggtgaaagaaagattcattggtcttatccatgttaaagaaacatcttctgcatctctgaaatgtgctattgattcattgtttgctaaacgtggattgagtatgaaacagttaagaggacaaggctatgatggagcaaacaatatgaaaggtgaattcaattggttgagatctctgattttaagagagaatagttctgcttattacatccattgttttgctcatcagcttcagttagtggtcgtggcagttgctaaaaaacaatttgaagttggagatttctttgatatgatttctgccttgctaaatgtggttggagcttcttgtaagggaaaagataggattcgagaagaatatctaaaagagatagaggaaggaatcaatcaaggtgaaattaagacaggaaagggattgaatcaagagctttcattacagagacctggtaatactcgttggggtactcattacacaacattacaccgattagctcatttattctctgttatcattaaactgcttgagtttgttgaagaggagggaactgatagtaccaaaagacgacaagctaatggtcttctcaagtactttaatacttttgactttgcgttctacttacagttgatgttgcttcttcttggactcacaaatagtttatcagtggctctacaaaagaaagaccaagacattttgaatcctatgtcactagtgaaatctaccaagcaacaattatgcaagctcagagatgatggatgggattctttggttaatgaagttttttctttttgtaagaagcatgacattgagttggttattatggatggagaatttgttaatccaagaaacccaagaaaaagaagcaacatgaccaacttccatcattatcaagtggagtgtttttacactatattagatatgcaaattcaagagtttaatgatcgtttcgatgaggtaaacactgaattacttagttgtgttgcttctttaagccctattgattcgtttcatgagtttgatcagttgaaagttctgagattgtctgagttttatccacaagattttactcatgtcgatcggagatcactcgagcatcagcttggtctttacattgacaatattcgagaagatgaaagatttgctaattagaaaagtctaggagatcttgctcgcgttatgatcgagacaaagaaatatctttcgtatcctctggtttatcgacttttgaagctagttttgactttacctatagccactgctactgttgaaagatgcttctctgcaatgaagattgtgaagactacattgcgcaaccgtataggtgatcagtttctaaacgattgtctagtttgttttgttgaaagaaaattatttgataaagtgacaaatgagatagtgatcaaaagatttcagagtatggaaaaacgtaggataactttatagactttttttttaagaaactatttttgtattagtattttttatttaattttatttttaattatattgtgcccgaggttaaaataattcttagatccgccactagttattataggtaccccacatacagtagcgtgagtttagtatgctatgttatagttttataacatagctataaagaacagttgtattaccacgtttaattttcttaaaaaaattatatagtatttgatttttcatgctatgttatatatctctaatatagctgttgcgaaatgttattttatcttggtttgccttttttcaattggaaaataattagtcaaattatgtgctatgttatgctcttatatcaatttataagctacgatagatgattaaaacatagcattagtcatatgttaaatattctattacttgtattcttatagcattttctgagatgtgattatagtacacataacctgctttataaaatctcatacattgaccattgattaaacataagtttagatccaaaatacataagaaaagtctcaagcacaaaataaagcaatacatgagctaagtgcataagttcaggtacgtagcattacacaagaaaaccatcagtttaagacataatgaccttgttctctggccaagcaatacaggagttaagtgaatctttcataatctctatctcatctgatggcctccaaacttttacattgcccaccttcacaatatctatccacactttaactgcattaaaacctaagggagtgtggtgaaccttatgtgctggatcatttgttgcccatcgtccttcagccacaactttattctttccagttaaatccatcaacttgcacttcttattctccttggaaataattttgttaatgccctgccatgtttacaatataaaccatcagtcatcataattaacaaaaacaacttcaagtaacatatgaaagcacttactggagacttcctgagaggagactgtgctggtaaagtattccttattggagaacttggacctgttgcatcatcaataggagattcagaaccagatgcagacttagaagacatagctgcagatttggactctgacgcagcctttgaagctgttgctgaagttttggacccgtctgcagacttcgaagttgtggctgcagacttagccttcgatgcagacctagaaacttctgatgtagaattatgaccggttggaaatgagggattttcaaaatcaactttgctcaggggccaggatacaaaagccatcaaacagtcctcaagatatgacatttcagctgtaggtctccatagtgatgtatcaggctgctttactgaatccacaaatactttaactgcttttggtccaagaggaagtccattaaccaatgcacttggttcttgtgtctcccaacgcccctctgcaacaatgacttcagcattcttcaaatccagtagtttacatttgtttccttttagaccctatcaaacacaatcagtaaacaaatccaatacaaataatcagcatgatacacaggggaaatacattgataacacagtgcaacaaatttaaattaccaaaggtgcaatgtcttcaatttggatgtctgtgtctagaagtttacacttatcagctggcaatgcgattatatgtccaacagcttttttcatattaaagatcttgtgtgcaggtctccatagaaatgcatctggttgatatgcagtttcaactaacacttttaggtccgtagggcatagacggcagtcatcactatgtcatcaggatctgaagaaagaatacgaccctcaccaacattttcatcagtctcagaccaatcaacaaacacacacttacgatgtgaatttctgttaacactctgcaaaaaattatgagaaaataagagttataaacttaaataagaagaatcacatagatgatatgaaaagaataaggaatatgttactcttgcagctgagttttcacccatttcagcttctggcctctgtaacataaacaaaactaaagtcaacttatataactctaactggttgatgaatattttaaaactcttaaagtatctaacctgattcttgattctaataatttcatcttccaagtcattgacctgtttttttaatttcacttgcctctcttccatttcagccatacacttgttcttcacttgtaaacaagctaatttagtcttactcatgtctctccccattaccctcagcctaccaggattgttaggtcctaaaagcttggcgaggtgatcttcatctggatttgttgaaaatgttggaggatcatttccaacaatttcagctgcttcttgctggaaaacatgaagacagtgtcaggttttactagtcgaagacacactcaatcaacaactctatttatacttacaatcttttcagctgcattagtatctactggtgtaccatcctttttggtacgagacttgatccaaacctgtagtcttgtcacgctggaaggatctctactttcaagtttctgtacaaaaaacaacatttgagtgactgtcacaacatacaagcaataggcgtagaataataagcaacataaatgaagtagatatcttgccatttcttctgttagtctgacaatccctttacggctagtggtgtgaggtatctgtttctttcttcttgctttatatgtatcactcacagcctaacaatgaaacatgttactaatccccttttaaatacaaaactttatattcacaagtaattaccttgaatgctgcactggttttgagtttgacaaacttttgccactcaacaggattaatattagttggtctcaaattcatcctctcttggttatttgcaaccaaattaataaccttcaccctgcgcgacttgtgtgctctccacatatttcccatctggtttatcacagatatactttgccaatcttcatcaagctcaaaccttgaatgcattcacgaacaatcacaccataattatagaagtaccagatcaattacagtcaacttttttaaaaaactacttgttacctgaacagatttccacataactgttttcagatctcgagtcactttcttccagttaacaatgttgatagggacgtgttccatcactcgatcacatcatctccatcatcagaccaccactcgacctcgtcactcaacctggaagtcgagtatcttctaacaccactcgatcacatcactcgaccccaacgccgagtgacttcatcccattgccagacctctactcgacctcatcactctacctggatgtcgagtatcaccatcaccaccactcgactgcatactcgatgacaagcttcagagccttcttcattccgcactcaaccagacactcgagcacaaggaagaaaagaagactccagctattcacttgacctctcactcgaccacgtgggtcgagtacagttcttaacccatcccaatacttcgtcgttttgagtattagggtttcgggatatttggctataagtagcatgtacttctcattttcgcagacaaaaagtttttatctagttttatttccgcagaccttgtgttctagactttttgtaatccggatttctctttatctattcagtattcagtatttagtttctgttcttgaatttcgtttactgttgttcactctgttatcatcctgctgttacattgttgttatcatgttttcaattcgttcaacgtttatgctttctgttatgatgtctcagtagtgaataggtttctgaggatgggctagagtagtgtagaattctcagtatgctaggtgattgagtattggttgatggatcccttctggattagttgttcttaatgcctattgctttctgatcaactggaatttgagcccagacatttccgcgcccaaaaggtgttcgatgaaatgtctgaaccactaattccagagattcgtgaccctgtaccaaggtattggttgcagggagcgttttggatttaacttgttgattcgtaatgcttgttaggttagctctcgtcaatggtgattgagtctgggactaggttagcttgcgagtctctgttgcggtggcacttagatttggttaatgaacttgttgtctagggttaatttattgagcatgtcaatcacctgtaaaccgaggaaacgaaactactcaattaccccatccttaggaattctttatctgattgattttattgtttactctactgttgtgtactgcatcctgtaatttgttgcttagtttctgcaattctttacttttactcgacctaatactcgaccacccagttgtctggcaacagactgtgcagtcgagtatccctgttagattatctgtctgttactcgacctgtcactcgaccacacccagtgctctacacagagctgtgttggtcgagtgttttgctgtttatattatagtattattcggcatttactatatagctaaatatttatatgaataagactaatgttattaagttactatcataaagttcaaaattaagtagtgattaacgaacctttctcatactcaatagcttgctacataaagctctacaaacaacaaaatcacaaaatcaatctattaaattcgtcgcacaaacactgataaatattctatatagcaaaacatctctagagctatgcataagaaataccttggtatatgagaattctgagggatcatttggactgaggcaaattgtggttgtggtaattcttattttaatatctgtccagcttcaccttcgccatcctgtttcatagattgacaatagtgacattagattcttatactaagaaacaatgcttaagaataaagattaaaatgaaaaatattaaaaattattcaaatgaatgtataagaagagtgatagacttacttggtttgttgaattgatggagagaaaaagagaaacaactttcatcaaactcgatacatatgtgtgattttttgagttaagcatgacttgttgaaccctgtaaaaaaaaaatacacatgcaaacataaattagttcaattttaataagagactttgacaaatagaaaatatgtatgaatgctaaacgttattgcttaaactaacattcatcccattatcataaaaagtttcttatgagttggtgcacttttagtcttctgtcgtaaggttatttatagagttccttgttgatgatagaattaggtgtgatatggaatcgagtaaaaatcggtaagcaagcaaacatattttggaaaatatgacgattataaataataataaaagatctagtatttaggtaaggaatatacctttaaattctcatttaagtgtactaattagtttctaaatttttttgagtctatgtataactgtcataataaatctggatttgaattcgatataattattacattagcataaaatagtcatgttgttatcgtaatcaagggaaatcttaccaagtttatacagcatggatcatgtatattctcgattttttgtataacaaaatatagaaaatccagattaattatagaattttttatgatatgttaccgcgtaatgcttcttcccttatctactaaatataaatattaattaccattatttgattacgatattttcagttagtagttcatatttagtagatatgatcgagattataaatattaatagtatttaattttgaagatttgatttccatatgttaggatctcaaatctcgtcgtatgggattaaatcagatatggttagttatttggttgttcgaatttttagggaatattatgtcgtgtaatattgaattagtagagatttaagggattaatgtgtgcaatttatgagggtagtgcaaaataatatttttgtttaggtaagtaattagtgcaaaatgtgaatagttgatcaaaaatttggtcattgtcctaaagaagacaatcttctctgattgattttgtagggactaaacatacaatatcgaaattgaaaaaggatttttcgacacaaatcttccccaaaaaagtatatgtagataaaatgggaaaatatttgttcgaaactccaaatccatctgaaatagttttgcaagaaaaaaaaagagagaatatttattttacgtttgaccatattttacggggggaaatatcaaaaaaaataccaactttcaaatttgggacgatttaatcttgaacttcacacaataaaaataaatcgtaaagtttttgttgactttctaaataaatgacaaagtttttgttgacttgctgtgagttctgaaatccacactagagatttgattttaagattatgagaaaggacggctagatcttcactgaaaccttgagagttatattgctaagaacgaatggacttttgtattgattttgacaaagcttttacaatgagaaaagatattacaagtgtaaaagtgtgtgtgtgtgaatgtaagctagattcaatgtgtcttcctagtcgtcctagctcccttatataagtctacgcacgtggtagctccgtccgggatctgcggagatcctcctggatattcggcaggtcagttccgagatatcaggtccgctccgcgaatatctcctcgtcagttcctaggtcattattcgcttatctctcttcatcaggtgactgggcttatctggcccaaatacccattcgcgtatgtgggctcgtcagctgcgtaggtcctctacttagtgggcttggtgggcttttgtgggctggcttggtattttcgcaggtggattcctggaggggaatccaactccaacatttgccccccagcccattgaatgagtaggtgaactcgatgagcggacatataggtcaggtaagattgcgaaaatattcttgacgagaggataaatatggttagatcagtcggttttgaggataaactcaacaatttcgttttattttcagattcctttaaccaaaagatttcaaggagatacgcgagataagtcgctgctaatgtggacggccgagatggagcgtcagttcagcgcaccgcatctgacggtccagatcaggcgcagagaagagatttccgcaatctcgaaaatcgtggtgatgatggctttaaataacttcccacctctacacttgacgtcacgtcaactcacacaactctcaaggtaacttctctcctcctttattatttactgcgctttgttttgtagaagtagaaaaatctcgtttttatttttgctatctccttcgtttctctgctattccctccttctcgatctgccttctttgctttttactttcatctctctcgtccttctccgtcaaaacccaaagatgagagacttcgaagattctaagaacaagagcaaccacagttacggcaatgattcgagttcatccgagacaaggtcgacggcatcaccgccgcaagtacagagacgcgccataaccctaggcggaatgggtccaattcatccgccgtcaacctgagccgacaaacagaagaagaaaaaggctgtcaagcaagggggaggcacgccgatgacgaacgacaacctggtcgacctccggaggagatgccaggttccggtggaggtacatatgatactcccaaggccaccgctgcatcctgagaacgtgccggtcgggtggtgctgcgcctatgccaatttcttcgagaaatgcggcctatttttcgcaattccggcgtgtattctcgagatgctctactgtctcggcctcgcctttccccagatgtgttcgaacttcgtccgccatgtgctcgcgttattcacccgggctcgggaagtaaacagagaattcagctgccatgacctgcttcagctctgccaggtcaagaccaatgctaggagtgaccaagagacgtactacatcagtgcacgtcccagatctctggtcctcggcggtttgaaagcctgtcgagacaccaattggcgatccaagtatttctttttcaaagtagatcgtcattcagttggcaattttgatcccgcgaggataacaaggacctggtctaccaacctgggtcagatggagacctgagcctcttgatttttctttgttgtttgtgttgagtccttgactgcttttgctaatcgttagtactgaaactaattgcttgtttttgatgatttgtagcaaggaccaaggaagttactctcttggagacggaacttgagctgttaacccttctccgacgtggtcagactgactggtccactttcagcagaaatcgcatcgtagctgctcttgccgtagctccagcagttcccgtagctccagcagttcccgcaatcgttccttcagcagcaccgctagatccgatcaaagaggtctcgcggattgaaccagttccccaggctgatctgcctataggtacgagttccgttatatttactttggtttttagaaatgtgcgagttatcgagacagctgcgcaactcgaattgctaactaacaaatgtcgtgctctatttgttcagttcatcctgattccagctccacttcagaactcccgctcatcagaagaatgaggcgcccaagtcttcgtgttcaacgagccaacgtcggggctcctgctcgtgctggtgatctgtcggtcgcggtgaccgcggctcaaaacactctacctttttctagcgcatctgcctcagcatctcatccctcgcttcctgaggtcattgtcgggaccttagctgcagcaggtcaaccggataacaatcaggtcgctcaggtctctgggccatctgttgttcgttctgatggtgcaccgtcctctccaaagagggctcggacccagccggaggtgaatttggcggctgagtaggtcgtgagcgaccagagggtcgcctctcctagagaggagaggatggaacctgcgactgctactccggaggcagctgcgtccgcgataggcgatcctcgagcaggtcccatggcggaggacgacgctccagaggtgggggccggtcttcaaaccggtctcaggaagtgaggcagacgtccaactccagcggaggatccgcgggaagcaggcctttccactggtcttacactcacgaccgttatcaccgaatcgttgaggacgaggctgggttagcgaacctgcttcgccacgtcaaagggaggaactgccagattcctaggtgaagaacatggccgaggcggcggcctatgatgacatgatggcgaaggagggccaagtaattatcgataactttctccttctaatttatatctttttgcttagttgtgactttctgttttgcttttggtaggcgatagctgccacaaacaagctggttgctctctatgagcagcgtctaagccaggtcccctaggcgaatgagcttgaagaaggaaaggccctcatccgggagctgacgtcaagtgtgaaggctggtcaggatctcgaagtcttgttccaggtacacctcggttttgacttgtttataaatagttcgtcgatgatttgatgattctgacctgattgttatttcaggcggagatcgagaggcgcggtgcaagtcgaaggaggtatcagactttactctaagcaagttggatctcccgcaggttttagagatttcggtggtacgtccaatagacgtcgacgagcaaggaacgccaattggcttggatgagttcaggagcaataaagatgcgtttacgggaggtctcgcggagggttctggtactgtctttgctacgccagccgaagaatcgagggagtgatcactttcgctccttgtttgttttaggatttcgtgttttgtttcagacttaatgcctgtgaaggcttttatcctttcgtttattgccttttgaacttggtgcctggaaaggcttttatcctttgttcgtttaagtactcgaatgcttgggaaggcttttatcctttttaacaagtattttttatctttcgttcaagtgttgacacttcgttgattttggtgcgagaccacctcgctttgtcccggtattttcctcgaaggttaatactttgaatgagtttgagttgttttgtcttgggaacctgttgaagtgaggtcacacaagggacctgccagattttgggagctgggcttgtggtatcgccaggtcgcgaatgtaaccttcgtttcttccttgtttactatgttatgcgttgatagcgaaagagttagatttggttgtagtaggtgagctccgatgaagccgtagtgatgtgttcttataagttttagttcactgtcgactttttggaagcgagatcacaaaatggatccgccaacgttcgggtgttgggctttatgtatcataagattacgaatgagttttaaatcatagtgtaaatgattgttttttgcgaaatatgataatgactatcaaaatttccttttattcttatctcgaaattgttaagtacaaaaggaggtaaagcaagcgacgatctggcgtttggtcgtcgagcagggacctgctcgatactgaagggagattgaactgtcaggtgagcagctgatcttcgttgatgagagatgcgatatccgtttcccttgttgaagttttgtcttacaaatagaagggttgagatggtaattgcgttggcggaggtgactgcctgaatacctggttaggggattaagcccttttgatttgattgaattggtggctgcgctcttgggaggagctgcctacgtaccctgccaagggatcaagccttatcgtagttcgattgtttttgagtacctattcgtggtatttcttgagatgcatggcattccaaggccgtaactcaggtactccgttgataacttttacgagcttatagacgccgtcacgtaccaccttggtgattcgatagggaccttcccagttagttcccagttttccagcgtttagctctctcgtgttgctgaacacttttcgtaagacgagctctcccacttcgaatctccgaattttgatattggagttatagtagcgggcggcagcttgttgatagttttgaactcggatcattacctgatctctgcgttcatcgatgaagtccatgttgtcctgtaacatttgcatgttcaggtccgggttagcaggactggcggtccttctcacgcttggtactatggtttcgacagggattactgcttctaaaccataagcgagggagaacagtgtttcttgcattgatttgcgaggtgtagttcggtaggcccagagaactccgtggagcacgtcggaccacattgatttttttgaatcaagtcttttcttgatgttgctaagtatagctttgttggcggcttctgcctgtctgttaccttgtgggtaacgggggggggggggggggggtggatgtggtaagacggatctttcacttgtcgcaaaatgcgttgatttttcccgaggtgaggttagtcccattatcggtgatgatctcataaggtatgccgtgtcggcatacgatgttttcccataggaagtcctcgacttgtttctcggttacctgttggaaggctttagcctcaatccatttggtagaatagtcgatgaggaccagcaggttttttagtctcttcttcccaccggaggcttccatgggacctacgacgtccatcgaccacttcataaatgggtaaggggaagatatcgaggacatttcctcgggaggttgatgaagagtaggtgcgtgtcgttggcatttatcgcacttgagtgaatgagctacgccatcggctagcattgttggccagaagtaaccttgctttttaattctaagggcgagggtacatccactacagtggctaccacattgcccctcgtgcatgcttttcatgagatctttcgttagttgcccataggtacacaccatgtagggacctgcgacgctgcgtttcatcagtctaccttccaggatgcagtaccttgcgctctgggctttgagttttctggtctcccacttgtcgggaggtgtgatccctcgttcgatgtaatcgatgattgggattctccagttattgtacggttcaggttcgtacgaggcaggttgttcgggggttccgagctccggctcttcctccgctgcatctgcctccgcggctgatgcaagggctctagccacggcggtggtgcttcgggttactcatgtaaagttgcaagttgccgaggtttccgtcccagcgtgtttgacccttaggtcgatgctgaggtgttctattccttcaattgggataattcttttgacgaaaggatctgacgtggaggcgagagctgccaaggtatctacagaggtgttttctcctcaggggatcctggtcagttcaaacgactcgaactgttgggtcaaggttttgactagttcgaggtacgcttccatgcgctcgtctttagcttcatattccccgtggaactggctggtgacgagttgggagtcgctatgggcgtgtatatcgcggattcccattccttgagctagcttaatgccagcaatgagggcttcgtactcagactcgttatttgatgcgttgaatctgagtcggaacgattgttcgatgacttccccgataggggaggtgagttgtattcctactctggatccctgtcggttggaggagccatcaacgtggaggagccatttcttattggagttggttccatccaggtccgctaacgggagctcgattacaaagtcggctaggacctgtgctttctggctggttctggtacgatattctatatcatactcacttagttctatagcccattttgcaagtcgacctgattgagtcggactgaatggttctgattggttgagacgtcatcactacgatgggatgtgattgaaaatatggtctcagttttcgagctgacatgactacggccagtgccagtttttccatttctggataacgagtttcggtgtctatcaacgttttactaacataatagatcggtttttgtccttcgtggtcttctctcaccaggacgccgcttatcgcggttcgggagactgccgtgtacaggtacaatgttctccttcttcgggttttgcgagtatgggtggtttggacaggtacgctttcaattgtttgaaggcttgctcgcagtcctcgttccaatcgaactttttatccttttggaggagctgatagaaagggacgcatttatcggtggacctggatatgaacctgttgagtgcggcgatacggccgcttagttgttggacctcccgtgccgtttttggcgatagcatgtcgatgaaggttgcaatctccttaggattggcctcgatgcctctttcggttactaggtatccgaggaattctcctgagggaactccgaaatagcatttctcttaattgcgggacatggtcattttcgcgagctgacttgaccagcatgtcgtcaatatagacctccatcgttttacctagctggtcggtgaacattctgttcaccaatctttgttaagtagctccagcgttttctaaaccaaagggcattactttataacaataggtgcctcggtcagttataaaagctgttttttcttggtaatctgggagcataagtatttggttgtacccggagaatgcatccatgaaggacaatagttcgtgtcccgcagtggcctcaaccagtcggtcgatatgtgggagtgggaaactgtctttaggacatgccttattcatgtccgtaaagtcaatgaatactctccacttcccgtttttctttttaacgacgaccgggttggcgagccagtcagggtattttacttctcttatcgatccgatcttgagcaaccaatcgacctcatcgtgcacagctttagccctctcggtacctagcttgcgacgtttctgctttataggtcggtaggtcggatcgacgttgagttcgtgtgaggttacctcgagccttattcctcggaggttcgcatttgaccaggcaaagctgtctttgttttctttgagaaaggttatgagattctctcgtatcgctgggtagaggtcttgacctatcctaacgcatcgtttgggatctgattcgtctatgcagacctgtgttatcaatgactttcgaggtccgcgttgagaaggatcagaggatctgactgttttcatttccgcgagtttgtcttctatcattagtactacggggtcagcctttttgataaggtcgtagctgcccatatagcattttctggagctgcgttggctgccgtgcacgactattattcccttgtccgaggggaatttaatgcattggtggtaggttgatgggatggctttcatggcgtgtagccatggtcttcccagtattgcgttgaaaggagctttcttgtcgactacgaggaaactcgtgagtcgcctcactcctcgtgcgacggttgggagctggatggttcctagagaaaaggtcgtatctcggcgaacccggtaagtggcgttttcctgccctgcggctcggaatcgaggtgccccattcttttgaaggcgtcataaaagagtacgtcaactgagcttcccgtgtcgatcattatacgggagatttcgtagttgcctacatcgattcgaataacgagagtgtcatcgtgatgtttatcgaggtcggtggttttgctttcccagaatgtgatctggtggtcaggtcccatcatcgggctcttgccttttgtgtaagaatttgccttcctgtgatgagttttgatcgaattgattgagtcgttgcagagctgagaccctcccatgatgaaatgatgcgtttaggggagaggtgctcggttgcgcttctgcagaattttgagaggcgtaatggaaacctcatgtttttcttatacggggcggggggaggtgtggtgactgaccttcctgtcccgccacctagatcgagttctgcaaagactaggtctatgcgttctctcctagcaggtgggggagagtcacttccctccggtgttcgttcccgtttcttttgcttgggagtttgctcctcctcctgttcgtcggaaggaggggtttcaactttggggtttgaaccttttttagtctttcccccagctgcgattaactttttaacggcgcgacactcctccgtggaatgtcctcttttcttgaggcacttgcaatattttccgaggtcaagttctggactctagtcctcagctgcctcgtctattgcgaataaggtatgctgcccctgcgtttggttttcctttttgaagggtttcttaattgcaaggggagcgttttgcgttttagattctttgaatcgtaaggccagcacggcgagctcctcttcggctttggcgaagtggagagctttgtgaagggcatcgtctaaagagactggttgcctaacagtgagttcctcacggaacctagaggagaaccaaaggtcgttacgaagggctgctatggctacctcttcgtttaggtttgcaattttcgatttgatggctttgaatttttcgacgtaagatcgcagggattcgttctgaagttgagtgagactctagaggttggtttcagacgtcctgtgctcgataagtactgaatactgttttaagaaagcggcggcgagctggtcgaaggtatcaatggagttctcttcgaggctagcaaaccattcgagggtcttatagttatattatagtattattcggcatttactatatagctaaatatttatatgaataagactaatgttattaagttactatcataaagttcaaaattaagtagtgattaacgaacctttctcatactcaatagcttgctacataaagctctacaaacaacaaaatcacaaaatcaatccattaaattcgtcgcacaaacactgataaatattctatatagcaaaacatctctagagctatgcataagaaataccttggtatatgaaaattctgaaggatcatttggacagaggcaaattgtggttgtggtaattcttattttaatatctgtccagcttcaccttcgccatcctgtttcatagattgacaatagtgacattagattcttatactaagaaacaatgcttaagaataaagattaaaatgaaaaatattagaaattattcaaatgaatgtataagaagagtgatagacttacttggtttgttgaattgatggagagaaaaagagaaacaactttcatcaaactcgatacatatgtgtgattttttgagttaagcatgacttgttgaaccctgtaaaaaaaaatacacatgcaaacataaattagttcaattttaataagagactttgacaaatagaaaatatgtatgaatgctaaacgttattgcttaaactaacattcatcccattatcataaaaagtttcttatgagttggtgcacttttagtcttctgtcgtaaggttatttatagagttccttgttgatgatagaattaggtgtgatatggaatcgagtaaaaatcggtaagcaagcaaacatattttggaaaatatgacgattataattaagtgatatggtaataataaaagatctagtatttaggtaaggaatatacctttaaattctcatttaagtgtactaattagtttctaaattttcttgagtctatgtataactgtcataataaatctggatttgaattcgatataattattacgttagcattaaatagtcatgttgttatcgtaatcaagggaaatcttaccaagtttgtacagcatggatcatgtatattctcgattttttgtataacaaaatatagaaaatccagattaattatagaatttgttatgatatgttaccgcgtaatgcttcttcccttatctactaaatataaatattaattaccattatttgattacgattattttcagttagtagttcatatttagtagatatgatcgagattataaatattaatagtatttaattttgaatatttgatttccatatgttaggatctcaaatctcgtcgtatgggattaaatcagatatggttagttatttggttgttcgaatttttagggaatattatgtcgtgtaatattgaattagtagagatttaagggattaatgtgtgcaatttatgagggtagtgcaaaataatatttttgtttaggtaagtaattagtgcaaaatgtgaatagttgatcaaaaatttggtcattgtcctaaagaagacaattttgtctgattgattttgtagggactaaacatacaatatcgaaattgaaaaaggatttttcgacacaaatcttccccaaaaacgtatatgtagataaaatgggaaaatatttgttcgaaactccaaatccatctgaaatagttttgcaagaaaaaaaaagagagaatatatattttacgtttgaccatattttacgggggaaaatatcaaaaaaaataccaactttcaaatttgggacgatttaatcttgaacttcacacaataaaaataaatcgtaaagtttttgttgactttctaaataaatgacaaagtttttgttgacttgctgtgggttctgaaatccacactagagatttgtatttaagattatgagaaaggagggatagatcttcactgaaaccttgagagttatattgctaagaacgagtggacttttgtattgattttgacaaagcttttacaatgagaaaagagattacaagtgtaaaagtgtgtgtgtgaatgtaagctagattcaatgtgtcttccaagtcgtcctagctcccttatataggtctacgcacgtggtagctccgtccgggatctgcggagatcctcctggatattcggcaggtcagttccgagatatgaggtccgctctgccaatatctcgtcgtcagttcctaggtcattattcgcttatctcccttcatcaggtgactgggcttatctggcccaaatacccattcgcgtatgtgggctcgtcagctgcgtaggtcctctacttagtgggcttggtgggcttttgtgggctggcttggtattttcgcaggtgcattcctggaggggaatccagctccaacacttgccatttgagtcatgtcgttaaataggttaacaagattttttacgatgttaatgttctgtttatctgctctgttagaacaaaacgatatcgtttattgcagacacacacgacgtcgtttgtctgttgaaacaaatttaaactctaaatccccaagttgattttattatctcaaatccttagaagccgaatcgattcgaatcccatcaggcgaggagacgaacgatgttcctcagcccaaatcaaatcgaaagaagagaaaacgaaagaaagaagttgaagtagatgacgtcgttttgttttaacagagcaaataaacgagacattaacgccgtaaaatatttttgttaacctatttaacgacattactgaaatgccaagtcaacaataactttgtcatttattttgaaacacaacaaaaactttatgatttatttgtctttcatgaagttcaagattaaatcgttccaaatttgaaagttagtaattttttgacatgttttccatattttacgagttaattttacaaatttccatccatgtaatataaatccgtatattttgcgatctttcctattcatatcatgtacgctgtagtctctctagattgacaatcgttataagaaaagaaaaagaaagattaatactctcgcgtctcaatcatacacaacccaagtaaaaataacaaagatacttaagagcatcttcaacggatgaaaatgtaagagtttcttaaaaaacaaaaagtaataatattttaatgttatgattatattttaattttttaatacacacaaaatactaataacgttacacgtgtttttgtgttggtgataaaggctcttagataaggatttttgttcactctctctctctttttttttacagcttttgattattatataatatatttttttagagtctctgttaatagactaccgttaagggtggtctaagtaaatgacatgaaacttatctagataaattgatcaaatagtatcttaatctagtcatttgtaaaaagtcaattacacatgtgaacgcgatggagatatcggtaggagcccaaaaaccgaattgagaaacaagtacaaattttattaagataacgataacaataataaaattacaacaacaataattaaggacagaaagtaaatcacggaggcaagatatgatatctttttccttaattcaattaatcggccgtaagtactttttggacatgacgatttatgaatctcaggatacaaccgatcacgaactaatacccgagcacacaagtattagactcaatcgaacttgatctacgatatactctcgaaattattaaacaaagaacttacttttaagaggcaagagagaggagagactttagaatttagagtgttttgtgtttgagagcttgagaaataatgagaggttgggtctctttatatagtagagggagataggattttgtgaaattctcaggatatgcatgatatattttgagactatcatgagaatatgaaatattttaaaaatatttcaataagattcaactcagcaagcccaataactcacaagcatgacggtctgcaagcccgacagcccttgagccaacgacggcacgacccgacaactcgcagcccggctcagcccggttcggttcggttcggtccggaatttagcccaagtgtcccaatttacacctttatttctcattcaatacaactccatttttgacgtatgagtataccattttgtagtactctttaccagctttccaatacactaatgacccgacaattctgttcagccgtttggccggaattcggccggaaaatcaccggaaacattttatgtcaaaaaagttccaacaatcccccacatgaatagaaataagtctaaacatatgacgactttactaatcctaaggactgacccaactagctagactagacagaccttcgagagtataaacgaaaactaattgtatatgagttggtggcattttttagctttgaacctactcactattagtacctgtcaagtttactcggccagatggtgaacatgatatcttgaaccatccggagtttgatgcaaagttggacagcaggtataacacaacttcattttcttgtagaacgaggttctctgtttgtgttcattatggccttcaacatgcctggttaatcatgattgaagttggagagtatagcctcacatattctcacattgcttgtattcaaagaagtatcctgtaagtatttcacatattttacaaagctaggttcaaatcattaaaagcaaatgcttaacctttatacatataggaagcactgtacatcatttttggaactagtaagacacaacagtctctcagtgcttataagagatttagtttgatttaattgtccctttgaacctatgtcatgggatctccaatctttgtaggtggggttaccatcaaacttcctcttaggtggtcaacttgatctcgattcaaaccttttgtaaatggatccactaggttgtcagctgacttgatgtaatcgatcgtgattactccagttgagataagttgtctaatggttttatgtcatcgtctaatgagacgagatttaccattatatagggtactttgtccatgtctttagctgaatggctatcacggtgtacacgtattgcaggcacaggtttcccccacattggaatgtcttccaggaaattacggagccattcggcttccgctgcagttgtatccaatactatgaattcagattccatagttgatttcgctgccacgatttatttgctagatttccaggatactactgcacctccaagtgtaaagatgtatccacttgtggatttagagtttttggaatctgcgatccagttggcatcactgtaaccttccaaaactgcgggttctttaccatattgcaagccatgatctttggtataatgtaggtagttcaaaactctagttatagccttccaatgcttatgtcctggattacttgtgtagcgactaagtacatttatagagtgcattaaatccggtcttgtactgtttaaagtacattaaactgccaattactcttgcatattccacctgttgcacatgttcaccagagtttttgatcaggagtttttgcagtctcattagagtaatgcttgaaacgatcaagtatcttctcagaatagtgggtttgagacaaggtaagaccttcattagttctgatgatttttatacccaaaataacatctgctagacccatgtctttcatttcaaaagatcttttgagcatgtttttagtttgatttatgatatatgtgttgttccccaatatgagcatatcgtctacatataaacataacaaaatgtaccctgttggagtaattttgaaatatatgcatttgtcacattcattaatggtaaaaccattagacatcataacactgtcaaacttctcatgccactacttaggagcctgtttgagtccgtatagtgacttcacaagtttatacattttgtgttcttgtcttaggataacaaacccttcatgttgtttcatgtagatttcctcttccaaactccatttaagaaagctgtttttacatccatttgatgtatttcaagatctcgtaaggttgcaatgcttatgagcatcctgattaaagttaatctcgttactggagaatatgtattcaaagaaatctaaaccttttttttgtcgaaatccttgtatcacaagcctagccttgtacctatcaatatcaccattcgtttccttttaatagtaaaaatccatttactccccaatggtttagaaccttggggtagatctgctatctcgtaagtatgatgttgcaagatagagtctatctcaatattgactacttccttccaataagatgcatcagggatagacatggcttctgaataagttcttggtatgttttcagctaaaaacaccatcaagaaatcatcaccgaaagatttctctttgcgagctcttttgctccgcctaggttgttcttcaggttcctttactgtttcttcaacagtaatagtacccaaactattttcctcagcctccgaggttgttgaatctcgttgttcacgagtttgttttttgagttctcctacaaggaaaaatatcttcaaagaacgatgcatttcttgattccataaatgtattttcatggatatctggaatattcgattttttaacaagaaatcgataagcactgctgttgtgcgcatatccgatgaagatacaatctacggtcttaggcccaattgtgacctctttgggaggtggtacatccacttttgctagacacccccacacttttaggtatttgtacgagggtactgtacctttccaaagttcatgtggtgcctttgcagtcaccttatgtggtatcctgttgaggatgtagttagtggtaagcaaaacttcccccacatgttttgggctaacccaagttcatgcaacagtgcattcatcatttctttcagagtttgattctttcgttccgcaactccgttagattctggtgaatacggagcagttgttttgtgtataatgtctttttctctacaaaatacattgaatggctcattatattctcctcctctatcacttcaaactatttcagtagttctctgaagttggttttctacttcgagtgtaaattctttgaattttaccaaagcttcatctttgttatgcaatagatatacataacaatatcttgtgcaatcatctaggaaggtaacaaagtatttcttaccgcctctagtttgcacatattttaaatcacataagtctgtgtgaattaaacctagaggttcagttgttctttcaactcgtggtgacggagtttttgtgagttttgcccgtacgcatacttcacatttttcttggttagttttgaatatcggaattaaattcatgttttgcatttttctcattgttttataattgacatgtcctaaacgttcatgccaagtagtaaactcaacaaagtaagcaataggattttcatttatttcaacaacataagctacagttttaggaaagactgtcattacagacattttgaccagtccacccttaacaaaaccctttctcagatacaccccatgtttctaaagaactagcttatcagactcaaagttaactgcacatttttaatcctctaaaaattaattaagtaagaaaaaattttagtactatttgtgtcaatcccctagataaaaatgagagcaaacactaatttaatattaaattgaatcaatttttgaaaatatagtggaaatatataccctaaattggaaataaagaactcaaatataatactacaaactaattttaaaataaaaaaatttcttttaaatagtgaaaatatataccctaaattggaaatagaaaacccaaatataataccataaactaatattaaaaaaaatcgaaatttcttttaaatgattgaaatatataccctaaattggaaatagagaacacaaatttaatattttaaatttattttaaaattattttggttgaaaatattttatataaaattatgatattattgaaaaaataaattagtgataatacttttaggaaaaaaacttcataataaatcaaataatgctatttttggaagtttatggagggtgtgctattattgtccataaaacttgatttagtgctatttttaggaatttatattttttgtttgttgctgctcgtttttggtgaatctacttgtcgtttattgcataatctcgagctgtttctagaagaaaactcttctattattggggaatttatgccccttttcgtcattaaagttttcttaagaaataatacacagaccgggaattgaaagggtcgtttagctttttgtcttctttgttagtttcaatgatactctgttacttgcttttacccgacaagctgttgatgcatgtttcagctgctaaaatatgaagcatcaagggactaaaatgatgttactttccaaaacatgttgtctttgatgattttggcggtgccctatagtggaaactggaaactgttgtctttgatgattcaagaatgtgaactttcaataagtttcttgatcagtttttgtcttccgcaaatttttagctatgaaaactctatttttcttttgttttatattactctgaatttacattgggatgaaaaatgagtggctgaggaatatagaaatagttgacaaaggatatatatactctattcagtgttgcatgtgtgtgaaagcttaagtgttgaagaacttgtacaattcatggtttcaggtagcatttgttataacaaccggtataaacagtgcctatgtgttgggatattccaagacagtcatggttccattgggttggattggtggtgtggttggtctcattcttgctactgcaatctccctttacgcaaacactcttgatatgtatataatttgcatgtttcacacatccttttatcaccattttgagtctagtttcacccatctttcatagcattcatcaatatttttgtacattttgcgtcttaagtcgagtctaggactagtcttgcatacattatgcattttggagttgtttcaggtgctttggagctattggtgctcagaaagaggaaaaacagaacagaaagtcatatttccaccaacatactcgatcaccagtatcagagagggaagcggtcagctcagtagtccatccagacacttatactcgatcgcagaggagaggaggcagtcccaactgcagttctactcgatcacagagctgaaggagtccatcctgacttttctactcgatcgcagaggcgactaggcagtccactttgccagtccaccagttctactcgatcgcagaagagaagaaccagtccatcctgacagctgacacacatactcgatcacagaggccaagaagcagcccaaaccattcagtcaaccaacctactcaaccaccacctcgaccatctgatcaatccgcactcaaccagacaacctgagcaacggaaagagaagagaagagaaggcctattcaaagcccattcgaagcccatcaggaaatccactttgggccgacactcttgatcacgtcgtacatgggccgttaagtgggctcgaagcccgctttcttatcttagtattaataagtatctaagggtttcgccctggcacttgcactttgagagacacgaattttgcactattattcagcagccgtttttcattcctgcaactttgtatttcgatttttcttctaagttattcagattttgctttcatttgcttgttcatctttgtttcattccctttaatatttttagtatgcaatcttcaatcgtttctatgttattgtctttaagcatgttgtctgagtagtgattaagatttctgaggatgggatagagtagttgtggaacccctcgtcgaatctgttggttaagtgtatatttattgaatcccttctggattaattgtgtttactgcttattcctttctgatcaacaggaatccgatcccagacgttccagcactcagaaggcgtttaatggaacgttggatctactaattccagtgataatcgtctctatcccaagggattggccgtttagagcggttattggctttaacagtcgattcttattgtctgcttagttagagatcgctaatggaaattaggtcagtgtctagctatgcttgaggatttatatcacgggagtgaattaatctgttgttgaacctgttgtctagggatagcttaattgagatttgttaaccaactgaattgattacggagaccacactattcgataaccccatccttaggagtttctcatccatatgatttctctgtttacttacctgcttcattcacttgccattgaattttagtatttttctgttttcaaccattctactcgatcacaccagtctactaacagtgagactgcgtgatagagtaaagtggtctatttctgcattttcactctttgtcatcctgttgtactcgatcacagggtcccttctggcagtcgatcctgcgatcgagtatatcagtcatttctgtgactttttactgttttctgcatcaacactaggactgttagaaaaccaaccaaattctgcttggcttgacttagcaacttctgatcatatctcatatgtctgcatcacacccatttggattgacacctaaaatattacaacgacaggattagtgttttaggattaattgatctcaaaaacctattatcaactcttatcgccaagcttcatgagtttggtggcaaaagacacattcgttatagagatctcgcaggcttcatctatggtaaattctccatcactctctcgcaatatcaaaaaacacacttaactagaattgtatttgcttgattgattcaggtaaaaagatgtatcgtgttacatggggattgcaatatgtctatcttttcatgattaattgtgccttcatcttacttgctggttcgaccttaaaggtacaacaaccgaaacaaaccgttttgttgcgaaaatccgaaaattagctcatatggctctgcttttgcattgtgtgcaggctgtttatgtactttttagagataattgtctcatgaaactgcctcactttatcgccatcgcgggtgttgtatgtgcgattttggccatcggtattcctcatttatcagctcttggaatctggctaggagtttcaacaatccttagcataatctacattattgttgcaatagttctagcagctaaagatggtaaactttcatgttaaatcaaacctcgaaaatgatttcaaataaccacaaaaaaactactcgccattttgtttttggttcaataggagtaaacaagcctgaaagagattacaacatacaaggatcatcaataaacaaactcttaaccataacaggagcagtttgcattcaacacgggaatgctaccggaaatacaggcaagtctcatcgatctatttatggtcaatcaaatatttctctgttttgtgacttacactaatcttttgtgcaaatgattaggcgacagtgaagcaaccggtcgttaaaaacatgatgaaagctctgtattttcagttcactgttggtgttttaccgatgtatgcggttacattcatcggatattgggcttacgggtcctcgacatcgacttatctgtttaatagcgtcagtggacctctttgggtcaaagcactcgctaatatttcagcttttctccaatctgttatctctttacatgtaagtctctatctagacctcaatgatgagtctttgtgtcttaatcctaaccttaaccgtttaaattcttgtgtttttcttacgtaaatttttgcaagtccgacttatgagtatatggacacaaagtatggagtcaaatgaagaccattaggaataaaaaatctgttgtttagaacagtagcaagaggaagctacatcgcggtgagcactcttctctcggctcttttaccgtttctcggagatttcatgagcctcactggagcaataagcacgttccctctcacattcatattagcgaatcacatgtatcttgttgctatgaacgataagcttagtcttgtgcaaaagctttggcattggcttaatgtttgcttctttggattaatgtctcttgctgctgctattgctgctgttagactcatctctgtggactcccaagaacttccatgtttttgctgatgtttgattaaaatgtcttcgacattgttaacgatgtaaaaattataccaagaagaaaaaaattgtaatccttttgttgttacttttattatttcaaatgacataaattttttataacattatatataaaaatttttctgttcaacacaaatttttacttttaacaaaacaattcaagagacaaatagaagaaacaaagtaaagtgaagtcatattcttaagcaaagccatattgattaagaaaataaataatcattttcttatgcaaagccatatttgggccaagccgtattaaagtttgggccaacttgtttgagatagccacatataagcccaatagagttttgttgctgagcttatttatgaatccatataaagtcttgacctaatagcgaaaactagggtttttctctgtgaattcgctcggcggcataaaagagagtaagaagaggaagacgagagttacaaggattgaaaatgaagggacgtcaaggagagagagttaggtaattagggttttgattgtgctctctttttctcagctgaatctccgatttgaatttgttcgttactggttcactttaatctgatgaaatctttgtgttgctgttatgcagattgtatgttcgtggaacagtcctcggctacaagaggtactttcaattttcagtctttctctgtatgttcttaagttatttggatttgaatattcacctatcgtttttggatatcaacataaggtctcgatgaaagtttgtaactttgccacaactgatagatttcaatgataatgctctcatatttgtaatgttactccattgtttctgattaatggttgtgcaaaatgatgcatttttgctattgcttcctttaagattagcttttaagcagttggttgatagtttgattgcttatagaaagcagaataaagattgattactaacgattaagtaatgtttcaggtccaagtcgaaccaatatcccaacacttctctcatccagattgaaggtgtgaacactcaagaggaggtcaattggtacaagggtaagcgtttggcttacatctacaaggcaaagacaaagaagaacggttctcactaccgttgcatttggggcaaagtcactaggcctcatggtaacagcggtgttgtccgttctaagttcacttcaaacctaccacccaagtcaatggtactttatcttcttgaaacataatcatggttaattggattttttcctccagactaatcatttttgatctgctgtgtttaatctcagggagctagagtcagagtcttcatgtaccctagcaacatatgaggtaacaacaaactcatttcagttttacttttgatccaatagtcccgtttattgcattcatttcagtagaattgaacaacactgattctgtaacttgatatttaagattagttgtttcattttgcttctctaatggagaaaccatgtcaacaaggctatatctatttgaaaggttgtgcattgtaattaagagcaattagattaatcctttaagtataatagattgtccatgatatatatactttagtgaacatggatcctgattcgatttcctaatgcaggaggatagatttcaagaagtatcggaaggaatcgccattatcatttctcaggagctgtagtttatctattcacttttgttctaaactctctgttggttttgattttatctttagacgaagtaaaacatttttcttcttgagataatattaatggaacttcagaaaacctatgatcccagtcatttccttatttattgggtggataggcatttggagttgcaagtagcttctcacttattttttccactttgatagattcgtgctccttttgtttctctattttttctcttttggcttctgcaattttctcaatttcagcaaggcaatatcaaaatgtgaattctaacaagaacaagtaaaagagatatcgagatgctttagtataatggggcagatctagaaagtgacttaataatggaaagtgatggcttcaaccgcctcagctccaaacgtctcttccgctctaaatcaaaagctcccgtctccagatctgagccttcttccttcagctcaaatgcttcttcctcttcctccatcaatggttttggttttagttgttgattgcgaggggagcgaccagaagatttgaaaccgaaagatctcatgaaactctaaaaagtaatgaccttctagcttatgctatgactcttatcaatttcttcttttttgaaaccggaagatctcatgaacctctagcttcggctaagatctctttctgtcttggacatgaaaactcacaaaataaacatatgtaaagaagaagctttgactatcaaaatttccaacactaccaccacatttcgtttttttggtcttggcatggttggatttactatatcgactccactcgttctagccaagtctagatcctctataatggagagaaatttctaatcagtcaccaatgtctatttggcagatcggaactcaagcttctccgatatggatatgaactgagttttattaaccataacaatgtttctagagatctattcgagatcctctcttcctgccaccgtgagttatctttccggagcagagaatttttcttgtaccgcataaccgccacaccaacatcgcctctctttgctacatcatagctaaccctaaaattttcatgggctcggtccattttcttttttgtgatctctggccattttgctaagcccaactttagtttagtttttgtattgcctgtcctttatgcaagttgtttcgctgactcatatgtttcgatttctttctgtaaggagagacttttcccacattccttttttttttggaaagatcatgtctacaattctacaatactttggattgtttcttgaattcaaaaacgagagtttctaaaacgtcaacaaatatccctcataatgaggtgtcccttttcaaaaaaattaagattatctctttattttttagtacggtgggatatcaatctccctccggaactaataaatgaggatcctagcatggaattgtcaaggggtgggtgcggatcttaccactcatcgactggaagagatgtgtcgtatgtactctccaggttttctgtttctatcggaaacgaagaatgatcttattcatcttcaggatatgcaagtatcattaggatttgattctcttcaaactgttgaacctataggtaatagtggtgtcttgctcttatgtattcgaaagattatccggttaagttgttttcgttagtgatcggctaattgatattgaaacaattattgatggaaaccgagtttttattacctttgtttatggcgatccggtagttcaataccgagaattagtttgggagcggttgactcgtattggtcttactcgttcggagccatggtttatgatcggtgagtttaatgaaattgttggaaatcatgaaaagaagagtggaaaaagtagatcagaatcttcttttctcccatttcaatgcatgattgaaaattgtgggatgattgagattccatctcatggtagcttattttcatgggtgggtcgacgtcgctgcggagttacgtgtcggagagtctgtaggatcattaaatcatggctagatagagccatggcgaatgaggattggcattctattttttcccactcaaacgtgaagtatttgaacacagacctcttctagcttcaatccagaatagcccaaaaacgtaaataaaagaaaataaataaaaagaaaaatcatactagtgggttgcctcccactaagcgcttgtttatagtcaatagcttgactatgttgggtttctagaatcaggaggatcagatggtggcaagaaataccgcggagaaaaacctctcatcatccatggtggcgtataggcatttgccgtgtgaggtctacaaaggaagtgcggaacttcagcagtgcagaacagaggtatcggtggtctactccttttacctgcacaatcatcaaaaaaaagaacaagcactcgacgagaaactcgtggtttgcttaatcgtaaaacagtttttggaaatttgaaactcttattaatgaaatcaagaggtttaagaggaggagatgagtaccttagccgtttaggaggtggatcaaggagtagaggtgcagtgggtgacttgactatagtgcctggagtatcaacagtgaactcaacacaaaaactagctctaataaagaactctagctccgcctgtgtgggggtgtcgatcgacataggtggtggtgtcgatcgaatccatccctccagattgattctcagcaactaaatcatgacttgctttttgtagctgcccgcttgtaccatgaaccttatctatcttaacactagtgtctatagagtgctctacagagaatgcctgaccatctatggtgggtggcttcttcaacttgtccatgtcaagagtcataaccacatcacactcattcaaaacaattggaatttctgtagatatagagcaatcgagtacacaactacctggataggtggcattgattatttcagagataggcattgccagcttgtccttcatcgtccgtggagcatcacacatcagaagtgtaatgatttcggcattaagcaagcttgcctccttatcactgacaccattcaaaattaactcccagatatattcatgaagtatataccataggttcgtgtagtcaacataaggtaacttttctagaagcaaatcacacagcgcaaaacatctctcttcaaggatatgctgttcggtccgtatagccactagaatctcaacaaaatatggcgcagtccttgtccattgttcatggacactatcatttgttgttgacgctttggtgtcgagctcgctcgatttcgctccgtcaaacgttgaatcattgattgttcctgatgagtgtcggtcgacaccgaggtcatgtcagtcgagactgagacttggtgtcgagtggttctgtaaatcagtgtggcaagcaagcgtgatggttttctctaaggtctggtgctgaattctactccctaactgaactacactaacatcctttctatcgatccgagcattcaagtcttgaaagtcattgtacagaccatcaattctttgattcgttatcacctggctcttgagaatctgttctagcatgtattccatcctactcgtagaagtgggtggacggtgggcttggtgagtagaatagctggaatgattagcatagaatagatcaggcttgttgtagtcagcaagttgaatataacgttcatctgcaatagctgcagctctgtatcctacttggtgtcgagcgacaccctggtggtgtcgatcgtcaccctcaacaatatcaggtatcatgtttccctactcatcgattttttgaccatcctcgttgtatgcctgaccagctgtcccttaacactcctgcaacatcagatataattatcaacatcttggtgttgcaattaaattcttgaagctcctgaaacacaagaaaaagaaaaaataaaaacaagtgagaaaaaaagaacaaaataagtctagtctaaattctacacctataaaataacaagagaaaagagtttagaataatcttctctaaagggagtttccacagggttttgctcccgagtactaaagagaaaaggagaatagcctctccaagattaggtctaaacaatgaccttaaaactatatatataagtcttataaacatactgggccgaatatggaaatcttcaaatttcaataacttgcgtcacccaacaagaagtctgacgatttgaagattctagaaattgccctagaagactttcttatttgtattattagtccctgcttgtatttttagatataaatactctttttggtcattgtttagaccgacaacccttaaaacttttattttaagttttatttttacttttgctcggctagtccttggagattttggagagttcaccaaacatttcaaaaccatgtaaaaagaaaatcttttctaaagtctattcttcttttgatttctttatgcaatcttatttaaacatgttttctgtttccatgatcatatctgagtaattcccgtgttgggtttagggtttctcattaggaattttgatgatttagtagatcgataacctattcgaatttatattcagagttcttcatcttgattgttcttaatgcgagttctagagtagctacctagaatgtgatcataggttaataggtaagatcggagaggccgcttattacgtgaactatcataggtaagtatctagatatagataggtctaacttaaatgcttaggtgaacgtatcaatcctgattataatgcatgattagtatttagggttttacagacgagagttgggattcctatttattaagcatagttaatcaatacagacgagagttggttgattataggttagggatttgagttctaaaacggtttgctaacaatcctaattaactgctaaatctattattcatctatttccggagaatttccttaaaccgacagctttaattatctaagtttactacaatctaatatgttatgtgctttgttgtcattttacatttaattattacttgatttagcttaattatgagactataattttttgtgttaacaaaagaactttgtggaaatcgattctaaagtactacaattgatatctaatttgagagagagcttgaggtctaatttgatccatatcactaatcttatggaaaagaaaataaagggcaattggcaaaactaacgcacaaaaatattataattaagaaaatgacatcaacaaaaaagatgggtgatatatttccctctttccctcttctcttttcctctctttctcgatattttttctccagttttcttcttcttctcactgttcacaatcgaattgtgactctctctctctctctctctctctctctctctctctctctctctctctctctctctctctctctctaaatccgtttacatcaccaatgacatcaatgtttagtctattaaagattccaacttctttgatttgcccagaaaatgtttctgtaattctattaacttatcctacaaacaaaccaattcattctatttcgatttgtttgtctatttaaactaatgattaacgaatggctaaaaaaaattgtccgaatcttaccatcgtcaacgtcaccgctacagttaatcttgattatttgggttgccaatgttgtatcttagggtatagtatttttttatcaaagcggtttaattcagtcatttggattgtctacgttttgttctatactatttagtttcattctatactattttatttgtctgttttatacaaacattattcactattttaaataatttgtattagattgtaaaatttttaatcatgttatactcagaaaagatctatttttttataaaactattgtaaaatttaattagttatttttatagcactaattcaacaattaaaatcatttggggtaatattaatttttataacattggattattctctctcttcttccacacatctcatcacgtcctctttagcgcgtgtctctcactgttgtaccattttgtcttttcactacttcaatgtgttagtttcttaatatttttgaatatggtgctatattattaattttagattggattttggttatacaggaaattcacccaaaaataaatggcctagtctgaagcaaaaaacaaaaactaatggctaattgttattgctctcggcaacaacgccaaattgatctagtgattttacccaataacttactgaacctcaaggagcaatgaaccaacacactaggaatacacaaaattatcaagtttatggaatttaagctaacaagattggaattatgattcactaacaacctattcaaaatgaccaagagaaacaagattaaagcaaaacaaaacataactaaacaaaatcaaaagattaataggataagaaagtaaatgaaacgaaaaataataattcaaagacggtttcaaaatcaagattaaacaagcaaccctagggcaagatacttgactagggagatagcaaattatttttttatttttttgtcataagatattatttagaactcaaacgagctaattttgaggaaaattgtttacaaaagtgatatgtagcggttcgactcgaattttttgcgccaaatagtccgctttgacatttgcattacgagagattaaagataaagaaaaagtagtaaattcttctttgtcgctctagaactcctccaaataagctgaaaatgctggccatttgcattgcaaattaatctattatatttaatcaatcaatcaatattcatcctttcccttcgatacctcacgtaaatcaattcattgacatttaatcaatcaatcaatattcattcttttccttcgatacttcaggtaaatcaattcattggcattaattataagctaataaagcagtcatcaacaattttcattcgcaatcacaagataagcatgcattaaataccagtcaaccactaaacatcctaaccatgttttcgaaagtaaggaatataaagaacttgtgaattgggtttggcattttgtcgaaaaccttccaagaataaaatgcctaacgtctaaatcatcattaaatcaaaggtaatttagcattaagatcattccacaaaaaatgatttacgtaaatctagcactaaacatcataaaattcatcatcaaatctccctaatctagctaccaagttcaaaagttataaaataaactatatattgcataaaactacataagatcaaatggcatcaaaaatccaaaatccattccatgaacatagaattaagaaatgcaattcaaacgccatcaaaactccttaatacattccatgaacatagaattaggaaatcaaatatgcaactaaggacctaaacttgaatccaaaatgatgggaaactaagaaaaacgaatctataaaaccaataaaaatacaaagatatcatctctatccaagatcatatcatctcctctttttaaaaaggatttgacgtcaaatctgtttgttatgcaataaaaggtacaagtatgaaatattgaagttagaactcacattatacttaccttgcacgtcgggtaagtaagcattgtcacttatccattcgattatcttgtatggaccatctattaatggcctgatttttgacttctattgagtaggaaacctttcctcttttaagtgaatcaataattgatctacaacttcgaaaatagattatcttgaatgtctacctttattagcttgcttagcatgaagcttggtcttttcataaatgtttttccctgccttttcatggacctgttaagcaagctctaccttctttttgtcatcaatactaactcttttattcgaaggtagagggattagattaaaatgtgatatggagttgaactcacaaccaatttgaaaatgaaaatacttaaaacctgaatgcaaatctgtaaattcaatatgtgataaacatttttcccaagatttcaagttttttttatcaatgcatgcaagagaatacctaaagttctattaaccactttattttgatcacatgtattttattgtgtctctactatttaagtgaaaaataagctttagttaactttttatattctcaccgagcattccgcaaacccataaaatataaatatcagagtttttgccaaacttgcaatcctagcttcattatatatcatttatcctttttcgctgtttacaataatactaggatttaacccatgatacaccacagagcaaatattttattcatatatataataatattaaaattttcggttttagtttagtattaaagttatataattttatattaatgttgtgttataattatttaataataaaataattatttaacctgtgttatatcaatccaaacccatcctgctatatttcatatcaatctaaacccgtcccgctatatttttcgtctcatgatattttaattttgttataaatttaaatattagttctggaattagttgtgattgtgattttatgtcgaaaaagttatggacttttatttctatggaatattcaaaccaagataaggaatgtttttaggtgcacatatacttaggtttgctcattttatgggatcgtaaatgtattttggtttgtttcacaatgttggttttaatttattgccgaaatttaatacaaataattcaaatagttcaaattttggttgttttaagatttagtaattattgtaagtaagataaggagaatataatttattatattttacgtggcatatgggattgccatatatttcgaatctttttagtttattacacagttaattgccataaaaaatttaaatctagtgacaactattgtaaataagtcctaactccgggatttgttttataaaatagctgtaaaaatgtatatgtaaattattatagagctacacaaattttatatgtagagaaaaaaagtcgtattaaaagagtattcaagatatttataaattatagtaaaatgttttagctggaaccatctacttacctaataaagaaactccttttgctttattgtggtgaggtggtgaggtcagcgaaaaggagaattgtctgatttgtaacatatttagtaactaaaattattcaatgccgtgattgcgggtaggattaatttatatttttacttccatggaaagtatatgaataaggaaaaggtcatcacttgtaaagataaacatacataatcaaattgaataagtaatatttgacgtgaaaagaaagactaatgataaaagtggatttatgttgcctccactccattgattaaaatttaaactaattcgtacacacgagagatcaaagggaaaatatttacaataattagcatataaaatttgaaccggaactatattaaattaacgtaattatatttataaacgtttttaactaaatgtttacaaattgttcttaacaacatataaaattttgttgtaaatagaaacaatcttaagggagtaaatataaaaagaattgttaaaaaaagattttttattttattttttatttttttgataactcaaggttaatttccgaatctgtggaagggtacatgattaatccgtggggagagggtaaaattatatagatatatctttttgttttaatatattaatttgcatatctatattttaaatttattgtaagatttattacaataatatagtaatgttgaactatcaattaccaaaagtttcgtcaaatactcattattattattattattattattattattattattattattattgttgttgtaattaaatctcaaaaatcattcttacataaaatatgatttaacaacttcttcagaaaacgttttacatgcaaacaactgatcaaactataatcttatttacatccatttgcaaatctactatctattttaccactaaaaatatgcttttatactaaaggtatctctatgacacttaagctaactatatgtttctatgttttatacgtccaactatgtgtctctttaccaacgtggatcgaggagcttcagggatctccgagtcggagtgatagtatagatgtactctacaatatcccttcttgacaaaccatttgtttctattcagacaatagatatgtggattctttccaaacaacgaatggttgtcaatcgcttctccatctcagcaatgcacttcttactgttgagctcctgcttagaatgacgccttggagtggttaaaatttctggaaaataaattggtactagctcctcatgttgtgtctgttctggttagtgttgatcgacactagatgagtgtcgctcgttagtgtcgggtgatgaacgatcctttatgttcctatttgacactgtctcgtcagctgattcgtcccagatcgaattgccttgtgtcaatcgacactaatgtgtgtcggtcgacagcaactctgcagcagcgagctccaactcgtccttaacatttcattctttccagctttcctccttagctctgaccatgatcgcgttacagctcttccttgtattagtatcaggggtatcaagaagaaaaccctcttgtctcttgataaactgaacagtttgagctacttgaacatccagtgtcttcatgtgagagctcaaattgtcgatcttcctattaagatctgtgtagatagcatcaaacttcccattgaactcgacaactagcttggactgacccttaagaatctgctcaagcattgattcaatcttactctcagcagtgagcggaggaggggtttggtaagaagaattaccataagtcctagtgaagttgttctaaggaaagatcttctagaaggcaggttttagggtgaaacctaaagaactctagttccttgtaaacttgttgccctatggctgtccaaatttcttataaactcgaccttgagtgaaggcagtcagcttgtttcgcagctccttagacttagtatcatcataaaagttattcaggaaggctatcttgatgcttctccaagtagtgagtaaaccagccttcaattgcttcaaccaagaagcagctttcccagcaagtgaggtaagggaaaagcttacacagtaagtagttttcagagactccattagctttaatgctcattacaaggccctcaaaacgctcgatatggtcaattggcttttcatgagataagtcatggaaaggatgcttgcctagtagtgcaaagtagcaaggcttcagctcatagtcgtatctctgaaagggtggggggtacgatcgctgatcggttggaatagaacatgttaggcttgttgaaatccccaagagtacgaagcggttcagtagctagtggattagctgcactaagattttgtggttggtgtcgatcgacatagagccgcaccccctttccgaccaacaactctaggatgtgttgggactcctttaagaatgttttatggtgttttggatgttgtgagatgatgtgagatgccttgggcgtcctcccttatataggaggcgaatggatgcttcccgaagcatcacatccggtccttgcacccttccgaaatgtcacatccgttctttgcatcctttcgaaaggtcacatctattccttgcatcctttgggcgatgcaaccgttcgttggtacccgctcgaccttacaccttttggccgagacacctcttcactcgtgagctaccacagtccaccagctcgagtgtcagctgaccggaccacccagctgggtcagtacttgatcagctcaccgagctcagtcgagctgtcggtcagctcacctagctgagctagctagtcttacagctggtttagctcacctagcttagctagctagttcatctagcttgtccagctcacctagctggttcggcttgaactttctcgttcttcctactaagtattttggtccgttcctcgaccatgatttagttttctcctaaaacaaaccggccttttttatgaacgcgggacgcggtcgttacaggtatcctagcctattcggatggttaacaagcgcaatcaagctatcccttgacaacaggttcaacaacagattaattcactcccgtgatagaaatccttaagcaaagctagcccagactaattctcattaacggaatctaactatgtaggcaataagaaccgactgataaattcaactaccgctctaaatggccaatcccttgggatagagacgagtatctcaggaactagtggatcaagcattccatcaaacatcttctaccaagcatttcatcgaacaccttctaggtgcgggaatgctttggatcgaattccagttgatccgacagaaacaagcagtaaacacaactagtccagaagggattcaatcaattctaaaacttaaccattctacagactatggattccacaaccattctatcccatccttaagaattctaagtcactactcagacaacatactcaaagacataatcgtagataaacaagtatattgcataagtaagaagataaagagtagagaaacaagatgatagacgaaatcaaatgcggaatctgaataacttggaaaaatctcgaattacaagttgcagaagcaaagcggcgcaacaagagtaaactaggtaagacataaataaaaactgaagcaaaaactggatgtaaaatggatgtcctgggtcaaaaccatcaaaaacctatttatacaaaatgataggagatgggccgggaatccaatcgaccggcccatagaatgataatgggccaaactgggccttgtgatcgggtgaagctccgggccgcttccaaacacttcttcttctcctcttctctgccttatgctcagcttgtctgtttgagtgcggatttgagaagactctgaaggtgtgatcaagtgcttggtctagtgatttgatgggtggtgagtgatgatactcgacaagggggtcgagtaatgtggtagagtgaatggtcaagtggttgtcaagtggtgtgacaaagtgttgcttgccgatgcggtcgagtggtgtcatcgagtaacctggagtgtggttactcgaccatggggtcgagtgattggcaagaacggctccaatgttactcgaccaaggggtcgagtgtggtgctggatgtactcgacctgggggtcgagtatgtggcttctggtttcggctttcttcttccaatttgctcgccaatagctccaaatcacctgaaaacaactcagaaatgtgatatgtatgcaaagctatcctaatcatgcaaagtatgccaaattgatgaggaatgatataaaacagtgatgaatgatatgaaactagactcaaaacgatgatgaatgaatgcagaaaacatgcaaattatagacatatcaactcctccaaacttagtgtttgcttgccctcaagaaaataaaatgacatagctgaaggagaggtttgaagttggggactcagaaccaaagcatcagatacaacataaaaaatcaatgtccaagttggtagttctaagatgcgatatgatctaattctactcaaaaacgttagccatgccttgttatgattcaatccgtctcttatactcgacctacacatgctttaaaatctaccaaaccctttaacattctttagttctggaacgtaaatcaagcaatgcatcatcaatgaactcatttggctaaggtgaaggtcaagagaaaaagatggtcccttaaagaataggctttagtaacacgggatctctcaagaatgattgagctttagtagaatgctaaaggtaagtcccaagttaagcgtacagagataagatcccatctacccaaagtatagcaaatgaagctctaatagtaatcccatctccaatcccaaaagaagaacttaattctaccctttacattcatgaatcttttaaaccctttttcagatcattcttttcttttctcttaactctaggagaagctttctcaacactttgatacttctagcggttttggatttctttaacaactaaggttcttgttttaatcttttaaaactaagggctttttacccttcttctttagctaacaagaaccccattcttttctttaacattcccaaaacctttactagcctttttgtttttctaacttctttagcttccttcccctagaattcttttccccttttctttcttttagacacatctcaacccataatatgagcgcctacctagtcttatccagcccggaaaacgcgaactagaactacatgagacactatctctgacgttacgaacctaacactttctaccaagctcaatgagaataagacctcacggacactcacaagtgataaagggctttaaagaaggtttaggtttagtgtcggggttaactcctccaataaggggagtcagctacttgaactaacatgagtggttaaaatgagtaaggaagtccaagtattttagggtatccatgagttctaattcgatgctaagacatgataattgtaaatcagattcaggtttcaataatacaaaatcttttaaggtaggattttctttccatatttatttaatatttcgtgttttactacatatgtcgtaggaaatacgatagaaatttctttcattaatctgacgaatatatttcgacggaaattcgaaggttttggtaagtgttttttcttaccaaagttttggtaggaatttggtcggaaaacactatgttttcttgtaataatatcatgattttctacgtcgttcttgatttttatgatacttttatattcttgaaaaatcatcagagcagtcaattacatgatttatgagtgagcgatatatatatttttgaaaaaatagccaaacgttttataatttttaaattttaattatgcataattttcaattcaatagtcgaattggctatttaaatataataattgaggctactattcataaatttgaatttatgtatatcacttatatatgtgaattcatctttaatgtttgttatttattgataaaacttttatttttcttctaatattaaaagttcaatatttaaaaagcattagttttatttagatcaaattgttttacctcattttttaaaacttctgtataaattaataaacattataaaaattaaattacactataaattgataaatattaatttatacatcaaataatcctatacaattatttgggaagtttataatagaaagtaaccttgtcatttgtaggttattacattagaatcttattggaaataaaattctaagaaataaattaattcatcttatcaagaaaaattctttctaatgccctttttatgatgccctttttcgactctacccttttattttatccaattttatttctagcctctttaaatttttaatgaccattttacccttatttggaaattgttttaggttaacaaaatgaaaaattaatatttttttgccaaaaatattccaaaataaatttccggccaaaattttcccgccaaatatttttgaaaaacaatttcccgccaaattttgttttcaaaaatatttttccccccaacttttttttttggcgggaaatagatttacaagggattttaaaagagttttaaaagatttacaagggattttaaaagggttttataagatttacaagggattttaaaagggtgatttacaagagattttaaaaggtttttaaaagatttacaagggattttaaaagggttttaaaagatttacaatagattttaaagggatttaaaagatttacaaaggtcttttaaagatttttaaagggtttaaaattgttttaaaagaattttataatatttacaaggaattttaaaagggttttacaatatttgcaagggattttaaagggctttaaaagatttacaaaggatttgtaaagatttttaaacagtttaaaagtgttttgaaagatttacaagggatttaaaaaccttttaaaattacttgtaaattttttaaaacccttttaaaatccctggtaaatcttttcaaactcttttaaaatctttttaaaatcttttaaaacctttttaaaatctcttgtaaatcttttaaaactcttttaaaatctcttgtaaatctatttgccgccaaaaaatatttacaaagattttaaaaatcatttttttggctgaggaaaaatttgtttcgaaaaacaaatttggcgggaaattttttttttggcgggattttttttttttgtcgggaaaaaagtttggcggaaaaaaattggcgggaaaagttcagtttccaattacatgtttctattagatgagggtaatttggtcattttgttcaagggaaggggtatttttataaatggacaaaataaaagggtattgtagcaaaatggtagtaaaaaaatggtagttttataaatctccctcttatcaaggataaacaagtgaaatacgaattttttttaatttaattagtttaattaaactataataaagaaaatacattattattttcttaacttacaatgaacatataagatttgaaataacttatcatattaatttattattaatcattatacttcacttctcatttttataagattctatttttcttaaacaaataaatcatcatatcatccatataataacaaagaatagatttttctgtatataacatgatttggattttataaacgtatataaatcattaatctatgaagaaaaaattataatgagtcaaaatttgagacttgagtaatatatttcttatttttttgtgggcaaagaagctttcattaaactaaatcctcaaaagaggtgggttcatacaacttaagcttaaaacattacatgaaagacaaggataaagattccatgagttttcaaagatgcataacttcaaaaagattgcaaaggctggaagatctattgggacctgtagagatttaaatttgaaggctagcttctagaaatcttggatcaacttgtgatcataatgagctcgtgcgatcgacgcataagagctttcgttgaaatgctccatggaagaggctgcggtttgaggcttgttctcgggttcaaaattcagggaagatatctcgttagaggagtaaggtttgagggaaggtatctctttagaggagtaagcttgatgcattcggcaaagaaggttacaagtccaaaacgcaatcttctaatcaaaagactgagattaggcggtttaaatagttttgaagagaaagttgatcgagcaagccaaagcggttttatccaacaaatccaagaaggttgagatgcatcgcccaacaaaagacatggggcggtatgagtaagcgtgatagtgcaaaggtttaaactcgttatgtcacataagagagtagaggcgtgagccgcgtcacaatgcctatggttcgagattaaacctatttcactaagcttcaatacaaaacttgcatttggtggcaaccactctactctaagcaacaagtttcaaaaattctaattgcaagtctcctctaaaaataatgttcccacgattgaaaggagtccataaccattcgatatcgtggagcaatgttttagagggagattaggcaaaggtataaaaagatcaaacctggatattgtaacgcccgtgtcccgagttagggagtaagcaagattttacacccgctgaattcggacgccgagacgtccgggactgggtctcacagatatgggccaaattaggtttagagtttgttggccgccaaaaggagtgaggcccatcccaccaaaccctagaattgctgcggtttggagaagggaagaaagatcaatgtcgtcgtgtaactctgagatgatggtcgacggtgaagcacaagggggaaccacctgccagcaaaggagctcgtcgtgtgtcgtcgatgttcttaccggaaaaagcaccactgatggtccaagagattttcctgccatcaacgaaatccagtgagaagggactaaaggtgttgtcggtgctattacaaatcgagagccaattgatgtgttggtgaaggactgctctggaatttaggagaaaacggtggtggagtattgcgaatcttcttttggcgggttccaagacacagctacgtccgagggatgattgggggcagagctggtagagtatcgattcactcttctgtcgcatagaggacccacaaagaagaagacccttagggaggaaaattttggatttttcaagaaagaaacgcttaaagaagaagataaaaggaaccaaaggattgagaagaactgaaaaagattaagagggtatcccgacgccggcggcaagaagtctcaccggcgtcagaagacatgggtgtagaggatgtctcattcctgtgtctgggagcgttttgacatgtgtgttaagttgatagaaaagaacacaagaaaatgagtaatatatttcttacataaacaaaaatactgactgattaacaaggaaaacttttcatatatttcttttttaaatttcctaattttatatactactataaaaagttatatatttacatttataccattcaaatagtttaaatgaatacatttttaaagaatatcataaatattagtagaccaaaaagataaaagtataaatactctaatttgattttcttaagaaaaattgctaagaatgccactacctcttttcaattatacccttttctattggtcattttcatttctaccatcttctaatttttaatgaccattttacacatacttttaaaatgtttttaggttaacaaaatgaaatacttatcttcccgcctaaaatatttcgaaaataaatatcccgtcaaaatttttccacaaaaaaaaataattggctggaaatagattttcaaggatttttaagagatttttaaaggatttacacgggtttttaaaggatttaagaactttttaacactcttctaagtttttttaaaaccttttgtaagggttcacaagagattttaaaatggttcaaaaattatttaagggtttacaagggtatttaaaagattttttaaaagatttatagaggattttaaaatatattttttggatgtgattatttttttttttgtcatctgcttaattaattatgttcaaatgagccatccctgagaaacattgtttacataagggatatgatgcggttcggtacaaatttttcgtgtcaaagaatatgcttttacattcgcactacaagaaagtaaagataaagataaattagataattcttccttgtcgatttgaatctcgtttagatatactgagaacgctagccattcgtttggggaacacaccatcttcactaaatctgaacattctgaaagaacgatacgtcttggttgtcagctccaacaatacatctcatcacccagagaaaggcttctacttcggtatgaagtggggataggcttcgccgggtgttagcggctcccattatcggcggctctccattagctgactgacaataccaccctaaccctgaaaacttatcactatttttccaagaaccatcaacgtagcatttaactccattcaaacaagtcgaaacagcaactttatctcgggtaatattttccatgtttaaaaatccatggttttctgaacatagctcagcttgcgctgtttgtcatgcttttgcttccgtgtccactaaacgtaggagctcatattgagatttatcaattttctcatgaatcttttcattttgcgctttccaaatataccaacttatccatggaaaagtagaagatgaatttatatccgagggtattcgccaaaatatgtgatccatatctgtagtaatagagcctgttgggaaaattccaggcaccattggaatttggatagtgcccaagtctgtcgcgatggggggcaaaaattacatgagcaattgtttcctctggatccccacacctcccacaagatgaatcaaaatttattcctttctttcgcaaatttgttgtcaccgatacacaacctgataacatttgccatagaaaataccttattttcgggggcaatgtactttccagtgtgtgattgcagcggttttatatttagaccaaaaaattgttttgaaacgatctcttgatccctaaacgtgacgtacaataccctgatttaaccgtatatttacccgttttcgtaaaatgccaaccaatagtatcctccattgttgtaacacctaaagatatgacattaattatcggtacatcctccggaacaaaaacctcttttagaagatcaacatgaaaaaaatatgttacggggaaaaaaaaaattggcgccaaaaattttaggcgggaaaatttcattttctaattacctgttctcatacgatcagggtaatttgatcattttgttcaagagaaatgatatttttaaaaatggacaacagagaagggtattgttgcaaaaaagtaatagaaaaattgtagttttgcaaattcaaacatatattttaaaaatatttatagcaaactgtgtgttaaataatatgtattatatcatagaaagagttatgatctgtataagagacgacatgttaagaatatatgatgagatgtgtcaaataaggtttgacacttctaaatatttgaaattttgtttctgcatgcaattttgaaaatattgaatgatggattgcgcacgcaattttttcattgcgagtctaaattgaaaatatagacttcatgcacaggttgaatttgatatatatatttttattttttcctgcaaactgaattttatttatatatgtaattctttacaaaggaagtgtttgagccacctcggctgaattcctgaatatgattggaacacactagttgtgtagataggagaggctaactgatgtgctatactattacaatggttttttgtgaattgaaagacaacagaagaaaacatcaaagcccaataatccacatctcgaagtaaactaggtaattcacatctagtagtcttgccattgatagcattgatgagaacctcgcaatctccctcgaattgtattcttttgtatcctcttatccaagcttgttgcattgcgaccaaaagagcttttgtttctgcctccagagcggtgttaacgtagctatagttgataatccccatgctttcgctaaggcttcatgatctctaatgatccatcctccgttgctttgagtccttgttatattgaaccctgcatcaaaattaactttcacaaaggaagacgagggtttcgtccaatgtgtattgtagttgatgttgggctttttgtgataggaactcgtcctccctgtctcatgttttcaatccattctttgacttctgcttcagtttgtgcgattatcttcgaaggactctctctgtacttgttaaaaacaaaattgtttctagctttcaagattcaccaaatgagccaaattggcattattttttgttcctttgttaaattattattagaagaagaatcgataagaaaaaagatttttgcttccacatctggtgagaaggaatgtccagttaatattggagaatttgataacctccagattatagatgcgtaaggacaattaaagagttcatgacttattgactcttcttcaatttgacaatggttgcagattggatcgatattcatgcccctggtgattaatcttaaagctgtaggtaatgcttttgaaatagtacgccagagcatgtattttatttttgggattatagaaattttccaaatcttgttcttcaaatccactgacccatggggagctgctggtttaatttgacaatatgtcagatcatgagtgagtaaccaatatccggattttaccgtatactctcctgaaggagtgtagtaccaaattaagttatcctgatgtccttcccgagagagatgaatgcttttgaggtgattgtggtcttcaggacttatacgttgagaaataagattatcattccaataccggtgtaatccgtttatggaaatctgattttccattgatgtatttctatcaggtgtaatgagtttgagaggtctaggcaggtgcgttgcaacaatattgtctttaccaatccgaatagctttaccggttcctacaatatatctgcacccttaattattacgttcaaacccgcaagcatagacgttcacccatatgattgatactttcgagctttcgcatctaggatgttgtcatctctaaaatatcttgccttcatcactcgagccaacaaagaatttggattttgaatgattctccatacttgttttgcaagtaaagcatcattgcatttagccaaatctctaaaacctaaaccaccttccgatttagaatattgtaacctcttccaagctatctatggaattcctcttttttgcattcttttcccaccagaagttcatgagtcgagtttcgatttctgagatgataccaatcggtagtttgaaacaggacatggcatagaccggcattgccatagctaccaattttagcataatttcctctcctgctggtgataaatgtttcgcactccagctcgatgttcttttcttcactctttcaataatgtaattgtacatttcttttttttctgaccaaattgttccggtaaaccaagatatttccctccaccttcatggctttgaatttgtagtatgctttttagccgattttgaatgaccccatgcacctttgatccaaaagttatcatagacttgaccatatttattttttgacctgagtagtattcgtatatgtcaaagacatcctttaaagcttgacaattacgagcattagcttggcaaaagaataaggaatcatccgtaaactgtaaatgagtaactccaggaactccattccctatacgtagcccgtcattatctccatgtgataccctagaattaataagatggattaagatgtcagcacataatatgaaaagatagggagataaaggatctccttgtcttattcctcgttgtggtttaatagtgccgtgtggtatgccatttattaaaactgagtaattaactgatctcacagtgcccattatccaatttatccattgctcgctaaaaccaaatagcctcatcgttgtctcaaggaagttccactcaactcgatcgtaatctttgctcacatctgttttcaccgccatataggattgagaaaccctttttcttacttttaatgaatgcatcatttcatgcgctatcatcacattatcattgaccaatcttcccggtatgaaggcggcttgaggatcagacacaatcgcatcgagatgccgttttagtcgttctactaggcattttgagattattttgtataggaaattgcataaagctataggacggtaatcagagagtgttacaaggtttgttatctttggaatcatacagagatttgtgtggttcattgattgtttcatgtatgatgtcctaaaataattttttacctctttaattacatcttgtcctactatatcccaataagatttataaaacctagctgtaaggccatcaggtccaggtgctttgtcatctccaatttgacttattgcattgaaaatctcacaatcactgaattcctttgtgagatcatcattcattgccttggtcacagttgatttgaaacctgcaaaatcgatagtagaaacaagacggccattgctttcatagatatttgtaaagaagttttgtgcatgacgtcctatatctctatcccctataaaaatcgttccagcatcatctttaatggaagttattatgttcactgaaaatctattcttggtgcaagcatggaaaaaacatgtgttgcggtctccctccttcatccaactatttcgactttttggttgccaatacttctcttcatcattgtatgctatggtaagctttctctgaatttgcggtatgagttgtcgttctgttctcagcatacttgcatgactctgtttagggattattgtagatgtttaatccgggtatgtgaatttaggtttgatttgtgctttagtgatgccatcgcttgtctgcagtttttaacttgatctgtgatctgttttctttgccctgtgttcactctgttccaaccattcttaacgtaatttttgaaatgcggtacgttgatcagcctttcatcaaaccgaaaaggtctcatctttgttgtttttgatttttctagagacagaagcaatggtttgcggttagatccagtgaaatcaaggaattcgagttcagcagatggaaaggaagtcgctccttcagaatttatgaaagctctgtccaaataacatttgactgtgtgagaatgacgctctccaacccaagtgaaacgatctccttttgagcgaatatcaacaagatcgcaagaagctatcatgtttcgaaaatccctaaaagtccactcatctctttgtggccctcctatcttttcacagtttgaaaatatctcattgaaatcactgatcaaaatccaagaatcattgcatgtaagtgatagattttcaaagtgtttccataaatggtgtctttcactttgacaaggatgaccatacacacaagacaagtagaaattgatattattagtagcgatatgtacatcgatatggcgttcatcctgacaaactttggataaacacacataatccttccacaacaaggccaagccaccactatgaccttgtgggggttgtgttattacattagaaaatcctaatacacatgctagattactaacaaagtcacgcttatttagagtttcaataagaaataaaacatcaaacttaagtaatttacataggctactaagacgtgattgagtcatcggcgcaccgaggccctgacagttccaagagccgattctcatggaggctgtggggataccaggccccccgcgcctccgtccattgaaagtggagatgtagtagatgttgcaaagctgactttcttttccttcttgcggatgtgacccaaaaccgccgattcctctgctgcctccgcttgattgtataaagtttcaaagctgactctctttctcttaacaaaagcaaactcattcatagcattgttagagacttcctccaacagccctgcttctctctataccattaaggattcacgtagatgttttgcatgaagatacctgagtctttcagcagtgagttctgtgtcttcaaatgcactaaccatatctgatggaacagaacttgaagacccctcttatttaatgtttgtagcggcatgactctgtagatccggaatcaatgtggtgaaatcaacactaggcagcgactcatctcctgtcatctcttgttcatcagggttattctcatggtggtcatcgtcatttccatcatttacatttgccggttcagcctcctcaaacgccaatgcacattccttaacatcatgcttaagagaaccacacttggtacagaagttcctcaatctttcaaatctgtatttgatggtggtgttctcattcggttggaattgaatattcctctaaaaccaaagcggaccatccatgttccaagatagtttgactcttacaaaacccagttggtttgtgttctcatcaaaactaacatctaaaacataccccaaacggttccctaccgccctagctgatatagctcaaattgtcttaagcttactccctcaaataagagatcgtcattagcacttaagggtcgaattcaactgagctctcaatgttcacacaatagacttatgatgtattcaaataagctagacaaagtaaattaatgtaaagacaataaagcaagtaaacgagttgtagactcaagcgattaaagcatcgggtctaaggaattgtctcgagagatagataaatcgtagatctagctaatatgagggttgttatcgtaccgttctcaaactcaaactatgattttagagtaactagtggtgttccgcgaaactctctatacttagagctaagataaccggagaagtagagaaaccctaaactaaagcatgcattatatcaagtttgattagttcacctagtatctaaaccagagtccttctatgagcctacatgttctttcttaaatgcctaggctcatctatgatagttcaaataacaagtacctatggtgggcatacctattatctgatatcaagttctaggtgatcagtgtaaaactagcagtaagaataagcaagatgaagaaccctaaaaataaccctaaggggttttcgatctactaatccatctaaattcgtattaagactctttaaatccaacaagatgattactcagagatgataaccgaaacacaaatcataatctgaatagtttgcattgatgaattaagagtaaagggtaaagaagttcagaatcctctctacagggattgagttcttctctccaaaagtgtatctcaaataataatacaaaacttcggtctaacaatgaccaaataattaggtatattcgtgactaaaaacgtgtagggactactttgcaaataagaaaaacttcagggcttctcaaagacttggctaaaaatagaaattccctcagccgaaataagggtgtcgatcgacataggtgtggtgtcaatcgacaccatcgcgtgaaaaacgtctttgataatcttcattactgaaaagcttccattgttcccagatgcgtaagtatactgaaaatgactcaaaacatacgaaaaagactagaaagactctaaaaaccattctgaaactgtgttagaaataagtaaaaaccaggacatatcactagccattgcattagtcaaattgagaattggaataccttggatgtgaacaactgctaaattccataattagctcaaacaaatctatattttaacaaccaaaaatttacaaaaattgaaaaaagaacttcctaaatcaactcaaattaataactaacttacttaattaaattctttaaacattttttgttttgttataaatatatggcataacctaaaaagcctggaactaaaccgaaaccaaaaaaccgtaatgttgtaaaaaccaaattgtcgccaaaccaaattatagacggtttctatatggtgttagtttttgtaacaccaaagaaaatgaaccaaaactgaaaaggaaaaaccaaacacatagttatataaaattttcatacaactaaacaaacttgaaaataatataattttaaatatcattgtattatgtatagaatgattaaaattgtactataaacaatcaataatccaactttaaataaataatatttaagttttacttgtgctgctcaaatatagactatgatctagtatactataaattaatcaaatatcataatcctaacattattaatttttagaggttctactgtatttaactatttatcattttgtttaatacgagtatacgagaacacagattgtgaacccaaaaaagaaaggttcacacctattactagtctacaacctttgaagccattcgcatccatgtgagagcatatagaatattcaaagaaaatagttgacttcctttcttttaggatctcgttctttacctgtcattattgtacattccattttacaatcacttcttgcgttgttaattatgtcgtctgcacacacataaacacgactgtgataacataaatattattaccactttaacacctaaaaacaagataattctttttagggttgtatacacatgccgaaccaatgtttctatgttttcttagatgttacatgtacaactgaaaaattatgtctttttcgttgttaccaatttctttttctaagaaatattctctcaaaactagttgtgtctccaatattatccggtaaaagttctaaaacgggatgcctgacagctttcgtgagacatctaattgatatgttgatgtgacatgcattacccataatgaaatgatattttattaaaaatgtaaagtttagttgatataaaagtacatgttgtggctaaattgtctaggaaataatagtaacgtttaaaaaaagaaattatcaaaatagataatgaattcaaaacaaaacattgcaatagtgtttgctactaatatcatttttgagtgctgacctggactggcgactccaaaggcgatttagttttttattttatttttcttacacgtatgatgtcggcggcggtaaatccgcctccagttgggttggtttttgagtcggaaaaaggattgccttctctggtagccgagggtgaagttgttacgagtcatttcgcgagctcggagagtttggaggttttggaggtttctcaacagggagatttaagggtactagaaactttggcaagcgttgggatcgagaaagagataaaatagaattcaaacaaggaggtgggtgtaacccggtggttacaacttcggcttccagttcggttgcagtgttgaaaaaatcatgggttcgcgctgctacaaaacatcttttcacgaaacaggaggttgtggtgtctaaggttgatggtaaacaaggagtggtggtgccgaaagagatttttgcagatgcaaaaccggtgtgggaagattttcttgtagggaaatttcttaatgcatcggcaccacatattgaaaaaattcacatgatcgtgaacaaaatatggagacttggagatactacttctcttattgatgtctttgaggtcatgagactaccgtaaagtttagagtttggagtgagtcgatgaggagaagaatattaactagaggcatgtggaatattataggtatcccaatgctaatatcaaagtggactccatttgctgaggaggcacaacctgccatgaagtccattccattatgggtgacattaaaaaatgttcctccttcaattttcacagacaagggtttggagtttctatcaagtgcggttgggaaaccagtaaagcggcatccaaaaacagaggcttatgttagttttgaagaagctcagattttggttgaagcggatctcactaaacatttaccaaaggaatattatattactggtgaagagcaaggcaagttagatgtagtaaaccaatacttttatccatggttgcctccacgctgtggcaagtgtaaaaaatggggcatcaaactgaagtttgtcttgcagtaggggtgaaaatactacagcccaccacgggtgaaaatactacagcccaccacgaaaaaaacgtccaagtagaaatagtgaaggaagtagagaaggtaggagatgtttccgttaaggatactgagaaggtaacccaaaacaaaactctatcatcgatgcaaaaagttgatgttgaagggatgggagacaaggaggaaggtactcttgaaattgagcaggatggaggatggattactccttctaagactggtcgtagtccaggaaaacagatcgttggtctaaaatatggagaggtttccatattatctaactcttattcagctccaagtgagaaggtagcggatgaggaaaaaagtgaaaacttagaagatgatctccatgcaaatagcagtagtgataatgaacaacatgaaactttaaatgcaagggctgcagatgtttcagtatattcggtattagcagagaaggttgtgcaagcaaaaagggaacaaggctacgaaagaccgaggtcttcctccacgcaacatctccctcgagactcaaagtcaactcataaatttttcccaaaccgttcatctaaatatgctagggatttccctagagacaggagtaatggttccacacaaaatctttaaatgttgagcttcttctggaatttttgtggtttaaataaaaggtcaaaacactctgttgtaaaggattgggtagcaaaagcaaatttagaatttggatgtcttcttgagacacgagtcaaagaaagaaaagcggatggagtatttaaaacagtgtttccagattggtcatttctgtataattatgattctcattgattaggtcggatatgggttgtttggagttcaaatgtgagacttgcccctgttttcacaagcggtcagatgattacagtatcagtattaatggaaggcatggagaatgaatttttctgttcattcgtttatgcttccaactttgtagaggaaagaaagatattatgggaagatttacgtgctcaccaagcttctcctctgttttttaataaaccatggatgatttatggtgattttattgaaacactaaagattgaagaacactctctgtctcagaataatcctttaatcaaggcaggaatgaggaattttcaagatacagttcgatactgctctcttagcaacatgaagtttcatggccctttgtttacatggtgtaataaaagagataatgatgagcttatctgcaacaaactagaccgagttctagttaatgatcagtggattttggattactagcaaacatatggagtttttgaagcaggcggatgctcagatcatcttagatgccgaatacaattgggggctgagaagccacgcactcgtaaacctttcaaatttacaaattttctcgcaaaggatcccgattttttgtagttggttgaggaccattgggggaacacaaatgctctattccattctacggtggcgatgtataagttctcaaaaaaaaattgaaacacttaaaaccaaagataaaagctatgggaaaggataagcttggtgacttgacgacaaaggcaagggaagcttttgcacaactctgccaatgtcaaaaagatactatgacgaatccatctcctggcgccaagcgaaaagaagttgctgcttatgctagatggtcacatgtttctgcactagaaagagaaatttttgaagcagaaatcaaagctacaccggttaaagattagagatggcaacaataaagtgttccataaagctggaaaggttccggagatcagaaatgttgttaaagaattaatatactcggatggcacgactcttgacacacaggaggaggttaaaaaggaggtagaacgttattttcacgagtttctaggctacaaacctgaaaattatcaaggtatctcagtggagggtataacaaagctaatataatattgttgtcgagaagcagatggggaaacacttttaagggatgttacagaggaggagatccgtcgtgttctgttttcaatgccaagtgataaaagtctgagccagatggttacactacagagtttttgcgagaaacatggccggtaataaagaatgattttgtggtagctgtctatcttttttctctacggtttcattcctaaaggtgtgaatactactatcttagcacttataccaaagaataaagaggtaaagcagatgaaggacttcagaccaatttcctgctgtaatatcatctataaagtcttctctaagcttattgcaaatagattgaaagtcattctcccagattttatcactatgactccgtctgcttttgttaagaatcgcttattgatggaaactgttctcctcgcatctgaaattgtcaaagactatcataaagattcagtctcagctcgaagtgccataaagattgacatttccaaggcatttgattttgtgcaatggccgtttcttctcgccactctctactttgaatcttccatcaaaatttaccaaatggatcgagctttgcatatttatagcctcattctcggtccaaattaatggtgaactatcaggcttgttccgcaatgcaaggggtttaaggcaaggttgttccttatctccctatctgtttgttatatgcatgaatgttctttctcatatgctggacaaggctgtggtggaacgacaaataggctaccatccaaaatatcataatctccatttgacacacttgtgttttgtagacgatttgttggtttttacatatgggagaaaaagctcgatggaaggaactctcaatatcttcatacaatttgcagaaatttcgggactgcaaattagccttgagaaatcgactttatatatggttggggtaaaagcgagcgataaggaagccatcctacatgcatttccttttgcttatggtgctctacctgttcgatatcttggtctaccacttttaactaagagaatgacttcaaatgattatactcctctcatagacaaaatcatagactgaattggtaaatggacgacaaggcacttatcctttgcaggccggctccagcttattagttatgttattcagagtctcactaccttctggatgtcttcttttcatttaccaactgcaggcattaaggagattgacagattgtgttcggctttcttatttggtcttgagtggagttaaacgctaaaaaggcaaaggtggcattgagtgatgtatgtacatcgaagcatgaaggaggattaggccttcgttcactaagagaagcaaacaaggccagttgtctaaagctcatttggagaattacatcgtcaacttcactttgggttcaatggttacacttatatttgttgccgaaaggttctttttggtctattaatgagaactcgaccttagggtcttggatgtggaaaaaactgctcaaatacagagagttagcttctggttttatcaaaacagagatacaaagtggaagatcaacttccttttggtttgataattggtctcatcttggccgcttgattgtggtcacgggacagagaggttgcatcgacatgggaatatcacttcatgccacagtttctgaagcagtaatgcaacacaagaaaaggcgacaaagagttgatatcctaaaccaaatagaaaaagccctagaaggctctcgttctaaaaggctcatcgaaacagaggatatagtgcgttggatgggaaaagggaacatattcaagacaagattcagcaccaactaaacttgggaaggtactcaggaatcaaagcctaaggtagcttggtataaaggtatttggttttctcacgccacacctaaatactcatttctagcttggctcgctcaaaaaaatcgtctaaatacctatgacagaatgcaaagttggaatgttggagctgatcgcacttgtgttctttcccaagaccctctagaatcacataattatctgttctttacatgtccttattcagcagagatttggtcgggcctcactcgaaaaatcctctcctcaaagttttcaacctgctgggatcctatcatcaagattatctcagacacaactcttaataaagaaaacttgttcttgataagatatgcttttcagcttgtagtaaactcaatatggaaagtgataagtatgtattttgcatgttttgagcatctatttgtcatcactttagcatcatatcatcactgttttataccatttctcatcatttgtcatcactttacatgtttaggataggtttgcatgcatgttgcatatttgtgttgatttcaggtgatttggagttgttgacgagctaattggaagaagcggacctgatcatgacaaatggctcgacccagaggtcgagtaggagcttcaagatttcaagagaccactcgacccccatgtcgagtagaagacatcaccacatcacctcaccactcgaccacgaggtcgagcgtcttcatctccatcacctgatcatcactcgatcacatcactcgaccctgaggtcgagtgtcttcaccgccattacctgatcatcactcgaccacatcactctacttggaagtcgagtatcaccttcaccaccactcgactacaccctcgatggcaagtttcagagtcttcttcattccgcactcaaccagacactcgagcacaaggaagaaaagaagactctagttattcactcgacctcccactcgaccacttgggtcgagtacagttcttaatccgtcccaatacttcgtcgttttgagtattagggtttcagaatatttggctataagtagcatgtacttcacattttcgcagacaagtttttatctagttttattccgcagaccttgtgttctagaccttttgtaatccggatttctctttatctatttagtattcagtattcagcttttgttcttgatttcgtttactgttgttcattctgttatcatcctgctgttacactgttgttatcatgttttcaacttgtttaacgtttatgctttctgttatgatgtctgagtagtgaataggtttctgaggatgggttagagtagtgtagaattctcagtatgctaggtgattgagtattgattgatagatcccttctggattagttgttcttaatgtctattgctttctgatcaactggaatttgagccgagacatttccgcgtccaaaaggttttcgatgaaatgtctgaaccactaattccagagattcgtgaccctgtaccatggtattggttgcagggagcgttttggctttaacttgttgattcgtaatgcctgttaggttagctctcgtcaatggtgattgagtctgggactaggttaacttgagggtctctgttgcggtgacacttagatttggttaatgaacttgttgtctagggttaatttattgagcatgtcaatcacctgtaaactgagaaaacgaaactactcaattaccccatcctcgggaattctttatctgattgaattctttgtttactctactgttgtttactgcatcttgttatgtgtcgcttaatttatgcagttctttcttgttactcgacctcatattcgaccacccagttgtctggcaacagactatgcagtcgagtatctgtgttttattttctgtctgttactcgacctgtcactcgacctcacctagtgctctgcaaagagctgtgttggtcgagtgttttattgtttctgcttgattttctgttttctgcatgttcactgttagaacacaccaaaacctgttattgcttggcttgacttagtgacttctgatcacatcttgattgttagcatcacacccatttggattgacaacctgcagtattacaacgacaagatagtgctttaggtttaattgattaaaaacctattatcagaaggaaagaaatggccgctgacatggaaagcacctattccatcaactcagctcatccacaaaatcgataagcaagttcgaaacagaatctcatccattaaagagcaaggagacgggagatacgatggttgtatggtgaaatggtttggttcgagataattcatccacttcaatttgttttaatcttttattttcaaaatttgtatattaaccacacgctgcatctaatgtacccacgttttcgaataaatttttttaaaaatatagtttttcctacttatttatatccgtgttataaaccggataagtatggatgtgattatccatctctcatctctgtctataagatatggattatgtttatccattacttcctccctaagatatggattatgtttatccattacttcatccctaagatatggatgatgtttatctattacttcttctctaagtaatttacttcctagctaagtaagctctactatatatagctcatttcattcatttgtaagttacagagaaaacagagagaaagaaaagagaaagagaaagcaataagaaaactcttgtttcgagttttattctctctagtattcattcttctttcttactttgatcttttataacacgttatcagcacgatcgtctctccgggagttatctaaccaactgatcgtctatttgatcaagcatcttttgaggtaacatttaaattatcttaaattcatcttaattcatttataaaaaattatatgctttatattttcggagtatgaggttatacctcctccttaatcgaatggtaagctatgcctcttcgaaatgccataaatggctcattaattgaatgattatttatttctatagataatcatgtcaaatctagctaagctcgatgtcgttgcccttgatgtatctggtaaaaattatagtcatgggcatcagatattaagatgcatcttagatcaaatgggtttcttagcaccataaatgcatctgaaacgacatcagatgagagcaaagctaaagccatggtatttctacgccaccatctccacgacaatttgaaaaatgaatacatcacgagagaagatcctgtggatctatggtaatcacttaaagattgtttcgatcatcaaaaatatgtgattttgccaaaaaccagacatgaatggctaaatctccgggttttggattacgaaagtgttggtgattataattccgccatgttcagaatcacctccaagatgatattatgtggtcaaaaagtgagcgattatgatatgattgaaaaaacgctctccacctttcatcttggaaatgtaatccttcaacagcaataccgggccaaaggatacactcgttattccaagttgatgcaagtcctttgggttgctgaataaaataatgaactcgtgatgatgaatcatttatctcgcccacctggatcagctccacttttagaagtgaatgttgctacatccagtgatgataattggcgaggacccaaaccttgtcgaggtcgtggtcgtgggagaggtcgtggtcatggccaaggaaaaggaagaagtttccattccaatgatttcaacacggaaaaaaacaacaaaaataatgttggtcgtgttaagaaaaggcatgttgaaagcacttgccacggatgcggcatgaaatgacacttctaccagacgtgtcatataccaaaatatttagtcgatctttatcaagcctcataaaaggcaaaaaaaagggatgttgaaactaatctcatctgtgatgagtcggaaccttcctttaatggccaagatgatgatagtcatcttgatatggcagattttctcgattaatcatgacaacgagaaatcaatgtaatatattatagccatatgtattatcatgctatgcatgacaagcattatagatgcttttgtaattctggaataatgttatatattatgacatatggatagtctatgtcaaagtttcatgaataaatattttattccagaaaatatgttatgacatatggatagcctatgtcaaaatacgagattgaggatgaagatatatgtctggcggacagtgcttatacgcacactatcttaagagataaaaagtacttctcctctctcaaaataaaagactccgctagaagcgtgagtactataaatagccatgcaaagataatattaggctttggcgaagccaattttacaatgccaaggagaactcattttaaagtaaatgatgcattatattcccctaagtctcatagaaacttgataagtttcaaagatatccgaagttatgggtatcatatagagactatgaataaagatggcattgaatatctttgcataaaatccgagagacaatttatattagaagaattgccaatgctatcttccggattatattgcacaaaaataaatatcatcgcatcaaatgttttagtaaactcgagtgtcacactacactcaagtgagtttactagtacatttaagatatggcatgaaagacttggacatcctggttcagtcatgatgcgaaaaattgtgcaaaattctaatggccatccattgaaaaaccagaaaatatataaatctggtgagttttcatgtaaagcatgttctcaaggaaaactcataataaggccatcgccaaacaaaattaggaatgaaagatttgaattcttgtcgagaagtcatggtgatatatgtgggccaattcacccaccgtgcgggccgtttcgatattttatggtattaattgacgcatctactagatggtcacatgtatgtcttttgactacacgaaacacggctttcgcaagattcatttctcaaataatcaggttaaagacacaatttcctgattatgccataaagaaagtcaggcttgataatgctggagaatttacttcacaagcctttaatgactattgtgtatcgatgggaatcgatatagagcatccgctccctcatgttcataaacaaaatggcatggccgaatcattaattaaacggttgcaactcattgcaagaccgtgaatattgagaacaaaactcccaatttctctatggggtcatgctatattgcatgttgcggctttggttcagattagaccaagcgcagataatgaatattcccctttacaaatgacttatggtcaagtaccaaatttatctcatctccgcatttttggatgtgcggtatatgtgcctatagcaccgccacaaagaacaaaaatgggtctccaaagaagattggaaatatacgtcggttatgtatcaccgagtataataaggtatcttgaaccacaaactggtgatttgtttacgacacgttttgccgattgccattttaatgaagatgaattcccagctttagggggaggaattcatcaaatgcatatgcataaagatatagaatggtgcgtaccatctttaaaatatcttgatccccccccccacgaagcatcgtgagctggaagtacaaaagattgtacatttacaaaatatggcaaatcaattaccagattcgttcaccgatacaagaaaggtgacaaagtcatatatccccgctgcaaatgctccatcaagagttgaaattcctagtgagctggaattagatgggagcaaaattaatgaacctaaggttcaattaaagcgtgggaggcctattggctgaaaagataaaaatccctgaaagaaaaagaaattgggaaaagaaaatgaaaaggttcttcaagaagaaccaagtcctcgggacgatagagaaaagtatgagatttccattaactatgcccatgatggtatcatatgggtagagatgatattgatgatgataatggaatattcttcttttctttatctaaagagatcgatcaagagaatgatgatccagatccaaagacattatccaagtgccagaaaaggccggattgggagaaatggaaaaatgtcatgcaagttgagttgcactcccttaataaaagaaatgtctttggacctattgtcactgcatctgagagtgtaaaacatgttggatacaagtgggtattcgtgcgaaaaagaaatgaaaaagatgagatcacacgatataaaacctgacttgttgcacaaggtttctctcaaagaccaggagttgattatgaagaaacatattctccggtcatggatgcaattacattcaggtacttaatgagccattcggcatctaataatttagatatgtaccttatggatgtagtgacaacttatttatatggatcgcttgataataatatatatatgaaaatcccggaaggattaaaagttcccgaggcattagactcatcaaagtctaaagatatatatggtcaaattacagcgatcactttacggattgaaacaatccggacgcatgtggtataatcgtttaagcgattatctacttaagaaagggtatgtgaataatgaaatctgcccttgcgtcttcattaagaaatccctttgggattcgtgatcatcgctgtttatgttgatgacctaaatataattggaactccaaaggagattgatgatgcgcgaactcatatgaaagaagagttcgaaatgaaagatcttggaaagacaaaattttgtctagggctccaaattgagcatttccaagatggtatatttgtgcatcaatccaattatacaaaaaggattttaaagcgctttaatatggataaagcgaatcctttaagtactccaatggtcaatagatctttaaatgttgaaaatgatccatttagaccctgtgaggataacgaagattttctaggtcccgaagtaccttatatgagtgctatcggtggacttatgcatcttgcaaattatactagaccagatattgcttttgctactaatttgcttgcaaggtacaattcatcccctacacgaaggcattggaatgggataaaacacatcttccgttatcttcaaggtactattgattttggattatattatcctagaaaacccgagtttggtctagttggttttgcagatgtagggtatctatcagaccctcataagtctagatcacaaaccggatatgtttttaccattggaggaactacaatctcgtggcgttctcaaaagcagactatagtcgccacttcatcaaactacgcagaaataattgctcttcattaagcatctagagaatgtgtttggcttagatctatgactaatcatattcaagaagcaagtggattagtcatcaaaagagagccaacaagaatatatgaagataatgctgcatgtgttgctcaaatcaaagaaggttatatcaagagtgacagaacgaagcatatccctccatggttcttctcctacactcaagaactcgagaagaacaaggaagtagaagtgcaatacattagttcaagtgacaatgcagcagatctattcacaaaggcgcttccaacttctacatttagaaagcatgttcaaagtattggaatgcttcatctacgagacctgtgaagtctcttcgagggggagctcacgtcactgtactctttttcccttgtcatggtttctatcccaatgggttttccatgataaggtttttaacgaggcagtacgtaactcatcaaaagtgatggatactcaagggggagtattataaaccggataagtatggatgtgattatccatcactcatctctatccataagatatggatgatgtttatccattacttcctccctaagatatgaatgatgtttatccattactttatccctaagatatggatgatgtttatcaattacttcttctctaaataatttacttcctagctaagtaagctctactatatatagctcatttcattcatttgtaagttatagagaaaacagaaaaaaaaaaggagaaagagaaagcaataaaaaaactcttgtttcgagttttattctctctagtatttattcttctttcttattttaatcttttataacaatccgatttttatagacaaattacttattttgttcttataaccatgatatcaggtatgcgccgcaataaacaaaaaatacctaatctactatttttcttcaattgaaacgtaggctaatttttgaaatgagaaattattattcaaaataacctcttttctaagttgaatttgtcaacattcactgtgtctcaagctacacatcacgaatatataaactgtaatagcatggtaaaaagataatcaaatatataacgtacgagatgttgttgtagcgagcgattacaataaatatatggattagttagacttagataaataataaaattttggttcaaatttgaccaaaaaagaagagagtagtaaatttgtaattaagcgagataattttattgcgagtgatatatatatattgtgttatatttggagataaaatgtactattgaaatatatagagttgtaaaatataatgtcatcgaataaaaacaactttgttttgacgggctataaacgacactgttttgataaaaaagaataagcacaaattatatttctttttttttgttaaagggttaagcaaaaaatatatttctctaaaataaaaattcgtaaatttgaagatagagtgtttaaagcttacatattgtgttatttcatgtgaatatattagtttgatatatcaatacatttaggttacaactacaaataaaaggaaatcgtaagaggattgcaacgaaagacaaaagatttcagatacaagaaaagagaaaattagaatgagaatatatatcgacacaaaagataagcaaaccctttaaacgtagcagagtcttttaattattttccagatatgatttcaccaaaccaagtcctcttgcttcttttgacttcaaccgacgttaatcactgaacgaatattaaaccaactaaaccaagtcgacatcacggtaaaccagtaaaattggatcactccattaacaatacctataaatattactatgtgtttagacagatttgattctggttagttgcccttcacggagtagaaattaagtcaccgttattttaataacaatgcagatatgtatttaacctatgtagaaagcacatgctcaaattcacgagactcaaaccatttaaatccaccgactagtaactaatgctctcaactttaaaaaataattttcacagaataataaacgaaattttttggtcttgactttaatttatagaatatttttaaataaatagatcaagtaacacgaggacgtcaaacaaaacaagcctacatatgaagaaataaaagcagccaacgaaaccacatgggaaacagatccacccggaagctcaccaatttccaccgacactaattttttcttaaaataaaacagattgtttaagattagatttggcaaatataaattgctaagaaagttttagccgtaagaaatatcgacagaaaattcgtacatatacttttttgttagaaaatacgtacataatcaaaaaggtaaaattacaaaaataataaatttactacgatgtttaatatgaaacagatgaaataagtgatagtaattatatactttttatttttttattctcttaactcttttgtttctgattagtaacaaaatttatttcatatcaattatgtaaataatatttttcaaaattggcttttttaagctgtaaataaaacctgattacaataaaaaaagattagtaagaaaattaacactgtttaattttatttttttgggtgattaatgttggaaaagtttttatacttttgataataatgttgtagccatttgtcctttctttttactcttagacacccttgtagcattaataacagtccgtgtttataatgaaaaacatcaataattttaatttgtaatttaaagttcaaaccacttacctactcaaattgctcactaactataagatgaaaaggaaatttattcaaatcaagaaaacacgtagaacagggtaacaaagtttgatttcctaattataagatgaaagaaagtttggtaatacaaaaaaactgctaaattacaaaaattaaataccaaaaatctgaacgatggttgtgaaaacagtcaatgcggttttacgacgaaattaactaatattacttcgattaattagattattttcttgaaaaaataagaattcaaattattcttcacaatttaagtcaacgcagtaatttttttttaacttgtatcaatgtatttaaatactcaaatatttatactactattttttttttgttggggccaagtctatgaactccactcgtctctccctcgacgcacttaaatttacataactaagtgtgtgtctattcatatcactcactctctctcttcctcacacttacattctccctctatttttttttctctctctccacaagaaacgccgtcgttcattaaaaatgatggcggtgggcagatccggaggcaccatcctattgttctgcctatcattcttcgccgcggtaaccgcggagagtccataccgattctttgactggaatgtaacatacggcgacatttacccactcggtgttcgtcagcaggtttttcattttctctactccactcacatttcatttcatgttagtaacttgatgttacaaaaaaaaaaaaagaactctttgtttaactctttacgtatagactgcatattacttctttacttgtgaaaaaaaaatgtatcttcgagatgatttttgttccttaaagtgtatcatttgtgtaatgattggtttaaaatgtgcagatcaatactttataaaataagttactcttttttatattgtgacaatgaaggttagatccggtgaactgaattaatcgatgatgctaattgtttttttatattattggtatatgaaaaatagggaatattgattaatgggcaatttccgggaccagacattcacagtgtgacaaacgacaatctcatcattaacgtacacaacagcttagacgagcctttcttaatctcatggtaacatctctttttttcgttatttggaactacttactttgtcctctttgccttctgtggttatatgttgttgacttgtcgaagttgaatagttttttttttttttaacttgaataagaaaatacctttattttttttgtttttatccattttttgtttaaattgtttttattttgaagaacctaaaccaaataaaagatcttcatttcctccattagatattattatctactatcatctccgattcactaagaccatgtgtactaatatgtcaactgtaggaatcagatatttactttgtaatctagattgttagatcacgaaaatcacggatagaaaatttatgtatgtaaaactgaaatggaaaaattaaaggctcatctagcaaagaaaagtctttaaaatgcctgaaaacagttttgtttttgcttttgctgacaaaaattaaaagataaaaaaaaaacttttacggctgataacgtaaataaatatttgtggaaatgcgcactattacgaaagcaaagcatgtgaatgttataaatgtagacttggggcaacttgaaatggtccataatgacgtatgtggcatacgtctataaacaattaccgaaaatctagtaggagtattaaaacagtttcctaagaaagactaatcaaagataactaatagtgagactgggttttgccattaatcgggtggcaatcaattctttattttttcaatagtatgcattctactttaacaaaaaagatagtgacatcaagtaataatgatactaatacatattactatgttatatgtttttgatattactaatatagatatatataaatttatcaaagtagatatctgtaaatattataaaattttttaaatatttaaatatttagatatttaaaaatttattaattaaaataaataagaaaatcaattatttaattaaaaaaatcgaataattaaaatcattaatttttaaaatatttgttttctgtccattcctaaacattagcgacaataatatgtatatattttcctttttttaaaaaataatagtacgattttatgatgaaacaacaatgataacagaataatattgctctccacattttgccacgtctctccctaatttactagctgtcttccaccggaccacccctttcggtgaacaatgtcggcgatgtcgtcgaatttacgttgtcttttagaataggtcccacccacatccactaactaggccatcttcatgacatttttcataactaacaagaaaaggtcacaaagggattgaaattattcaatgcacatgctttagttttaccttgtagtatagagtttctaaagttttattatagtatagatttttaacgaatcacataagataaaaacaaaaaaaaaatagaagtgtgtgaattatattcgttttttattctaatgaaaaaaattggatggacaggaacggagtacaaaacagaagaaattcttatgttgatggaatgtacggaaccacgtgtccaattccaccgagaagcaactacacatacattttgcaagtgaaagaccaaattggaagtttctattacttcccatctcttgcctttcacaaggcagctggtggattcggaggtatcagaatccttagccgtcctggaattccagttccatttgctgaccctgcaggagattacactgtcctcattggagattggtacaaatttaatcacacggtaataatatgaatatatgatcctaaacaaatatacaccttttcaatctcatgcaaacggttttttattttattttatttttaactcatgcatgcaaacgttattgataaaaatactcacaactatttgttttttgttttacaggatttgaagtctcgtcttgatagaggaaggaagttaccttcgcctgatggtattcttatcaatggccgaagtaacggtgctaccttaaacgttgaacaaggtgtgttagcatttgatgtttgtcaatctcctacaatttttgtccttccaaaattaaaaagaaaaacgtttttttttgtgtatgtggttgtaataggaaaaacataccgattgaggatatcaaacgttggattacaagattctctgaacttccgaatccaaaaccacagaatgaagcttgtggaagtcgaagggacgcacacacttcaaaccatgttttcctctcttgacgttcacgttggccagtcttactccgttctaattactgctgaccaatctcctcgtgactactacgtggttgtttcgtctcgattcacggataaaatcataaccaccaccggggttcttcgctacagtggctcgtctacccctgcttctggtcctattcctggcggtcccactattcaggttgattggtccttgaaccaagcacgtgccatcaggtacttatctttcttgcatatgtgattaagtgttttatgctcctctccaataagtgctatgaataatttttctttcgtagaaccaatttgacagctagtggaccaagaccaaacccgcaaggctcataccattatggtcttataccgctcattaggacaattgtgttcggtagttcagccggacagataaacgggaaacaaagatatggtgtcaatagtgtgtcatttgtgccagctgatacccctctaaaactggctgacttcttcaagattagcggtgtctataagatcaacagcatctcagacaaacccacatatggaggtttataccttgacacctcagttttgcaagtcgactatcgaacctttatcgagattgtattcgagaaccaagaagatatcgtccaaagttatcatctcaatggttactccttttgggtggtcgggtatgtctgtctattttcacgctcttcatttattattttctttgttttcttacgagttaaacaaagtgtgttgtggttggatcaactgcaggatggatggtggacagtggaagacaggaagcagaaatggttataatttacgcgatgcagtttcacgttccacagtccaagtgagccctttttttttccccctttcattgtcaaattaacacattgtgttttcttgttctaattataaacattatccatttacgggaattcaggtgtacccaaaatcatggacagccatatacattgcattagacaacgttggaatgtggaacttaagatcagaattttgggcaagacagtacttgggacaacaactttacttacgtgtcttcacgtcatctacgtctttgagagatgagtaccctatcccgaagaattcgcgtttgtgcggccgggcaagaggacgacatactaggcctttgtaaggaagatatacgagcttacgtgaaattcgtcatatccatacacgtttaagtatttcttgggaagacttgcaaggttacaaacaatgagagaggatatatgtagtaacaatctagtttgacgtgatctcagctcgaggtctaaatttttatgtaattcgaatttgaagttccagtttttctttatatgcttttgtcattcatgttcttttaattttctttcctttttctacgaagttataaacttataatattaattgaattttactcatttggatcattatgagtctatatggtaagacattcagccagattcagaaaatctgcagtcaccaattccataaaactaaattaatctgttttttttttcttttcttttttcttacgtcgttattataataaatcaaataaagagaatacataagagaaaaacagagcatggtagaacaatctattacaaattcatgacaactaatcttttcttgaaagaaaattcttcattccaagttaaagcttccaactccgattgtagagggaagggcacctccgaagacactttgcaccaaataatattctatgattattctttgaaccaaccactgctaagtgataggttttacttgttttatttagtcttttatcaaagaacaaaccattcttcgtgtttataaggctttttaggaattc

SEQ ID NO: 1000 - DNA, 108061 bp, Arabidopsis thaliana
  modified_base (58203)..(58203): a, c, t, g, unknown or other
  modified_base (58205)..(58205): a, c, t, g, unknown or other
  modified_base (58210)..(58211): a, c, t, g, unknown or other
gaattccaaagctgaatataacctaagatttcaagaacataaacctaagaagatttcaagaacacaaacctaagatttcaagaacacaaaagactaagctttctttgcaaaatcatatctttgagtgggtagcaaaacaaagagatataaacacagatcaaagaagacttacatatgtcttcgttagttcaaaagaatctctgttcttttttttcttttttttgatctctctgattttctttgctgttttttctcagtttagttagctaaccatttcttgtttgtaaagagtcgcggatttcaagactttatttaaatacagcacaattttatgagcttgccaagattttttgtttagattttatattttgtaaaaagtaattttatttgtgattcttaatcagtaaaaatacattccattattttgtatgattcggtaaccaaaatgacacgagttagattggcttgtagccaaggtgttgaagggtcccccctattaattcttctttctgaaattgttaaagcatagactaaagaacaaattttgttacaatggtatttttaacaagtaggaaaattaagtttaaaccaacaacaaatggtatttatagaattgaccaacctttactcgaagttcaaatcctatttttgcacccccactcaattgccatatttttttatatatcaatcttattcttcttctatcaatttcctgaatcctatattaaatattttcctaatatatcaaattttggtaactggttatattattcccctaaaaacatgaatttagatatacaaaacaattaactaatgtgggtactaatccttacgtttagataaacaaattaaaaatttcgaataacaaaaaagatgtataccatttttcaccaaaattttagtaaatttttaaatagaaaatgatgaataacatgtgactactcgtgtatttaccacaaacaaaaaattaagtatttctaaagttacatagtacatactatattttgtcggaaaaacaacaataatttatgaagttacaacactagtgatatcattttttgttctatttttttatatagaaaacttgttttataaattttttttaatagtatttagatatatatatatataatataattatttaattatatattaatattgatctccgtaatatatatttctgccttcgccactaagtactcatggacggtggatttaaggatgtgagattagatgccaaaaactggctaattgtagccaaagttgttgaagggtcccaattaattctttttttgtaaaattgttaacgcatgtaaagacaaagtcttgttacaatggtatttttaacaagtaagaaaactaagttaaaccaacaaagtaagattattgtagaatctgatacaaccagatatgagaatctaatactttaattaaaaatcatttataagaaactttaaacgtgttgaatatgatgtaaaatgctattacaatacaatagattatgagaatctaataatattaaattaaaatcattttataagctaagaaactttaaacgtgttgaatattatgtaaaatgctattacaaagaagaatattttaagaaattcgttaagggtgaaaaaggtaatcattttcttttcctagttgtttagagaagaataaatatatacatgtggaaattgtgtgtaggttttcaactttaaaatttaatcttgaaataaggtaaatgtttttattttggtatgattcgctgaccaagggacacgagtactcatgcatagacggtggatttactaaggatgtggattagatgtcaaaaactcgctaactatagccaaaggtgttgatgtgtccctattaattctttctatgaaattgttaaagcatgtagtgacaaagtcttgttacaatggtatttttagtaagtaggaaaactaagttagatcggaaaaaagtatattctacatctagatatatgagaatattttaaagggaacgataaatagcttcaatttaggtagttactccttcattttcaactttttgagttggtgaatggctacaaatctactgcctctaatcgtcactaatatacccaatatgttacctcattatttaatcaataaaacattacgttgaggaaaagaaaactccacattaatatttacacattacatgaaaattagacattattcatatgataactgcgacaataaaagtatcaaaggacgtggaatatgggtgtactgatgccttttgagatgcaatcctagacgatgataacttcttctataatttctttttggctttgcttttcaccatatctttgtatttcctcttctttagttttaccccatagaccaaggtatagtccacacaccaacaacactgccccacccacactgcaccagtttatatccccaagtccaaacacaaacattctcaatatcaggttctaaagacatgtagatcggaacttatgtttacatactttagcaaaaaaaaaaaaaaaaaaaaaaaagacaaaccttccaaggtaaaatgtttccttgaaaaggaaagatgagacaatgcaagtaaggatgagagctaaaggagtgtatagtgcagtgaatactggccctttcttctctattgcccatacttgtaaccaatatgtcagtccagtcaccataattccctatttaattttctttgatcattcttttaataaacaagaagaggaacttcatatttagagattagagataggattaaacgtacacaataagccattgagagaagaggtaagccgaattcgattttccaaactgatgggtttctgttcaccgcgactgcccaaactgcgctttgtatgcaactgaacaagcattgaagtgctaccaatcgcaacttcgctggatattccttcatcaccttgctctaacaacacaatcaatcaaagttgttaaagaatgttttacttttcttttaacgaaaacaaaaattcagtgatgaaagtattaacataaaacagttctcttgagtagtagtctctatggacatatatttgatgtcatacctatgtcacgtctgtaaataatggtgttcttgtttttactgcctccgtacaagagacattacttatggtaattaatgatatgataaattatttatgcttaaatttgactcaaaaaatttgtctatccaatatagacgtaaactggttccaagtaatctctaaacagaaccctacaataccattactccattaccaaccattatgaaagtgtataaacgactagtcgtttttcataccatggtggaggtccaattacgtaacatcggagacttgctttcttcatatatagatttagtgatctttccaaaaatgtaatatttcatgaaaacgtttttttaagcgaaatataatcgaagtttatatgggtccgttgaaaaacatcttaagaatttgatattctatactttgtctacctaactaaaagtatcccacatataccacaaaagtatgtattttttaatttcagactacccacaaaagtacgcatatacattaaaaacaataatttcttgttgtgatatgtatagatatatgtttactagttatatctttaaagccaaacattttatattttattaagtcttatgtaactttttaattgataaaatacatgcataatttcattgaaaacgacattccgtttttatacgagttagtttataattaatatcctaatagtgttttccacactaatgagataaaacaaattaaatagaggaaacaaaggagcaatgatttaaaaattaggaggcaactagtgaagtgatgaaagtgaagtagtgagtggcatacctgcatgataatccacaaacaccagcaagtattggcagcgagcattgtgattgaaccttttacagaatttttggttgatggaacggtgccgtttgggatggtgctgctgttatagtggtttatcaaacttggcccttttacaaaagcaaacactaatgcgcccaacattccaaccattgaaccagtgactttggccactccgtgtgacttcttcaaggtcaccgtctctaatcttttcattatacatataaaatgtaacattagattcgaaatagtggttctaactaaagcttagataatttgattccatattttatttgacccacatggtattcaatattgaaagcgtagatgattcaatagtcacatccattcctttaacatttttctttatattttttttatcctcgttctttatttagacaaatcatttgagtcaaaactcaattcatgatagtcaatttgttgtttctcctgcttactttttaattatattatcataaataatttacttctacacaaagcaaaataacaacttggtatattttatgcataaaataaactatattttaaaagtaaccaattctcgtccacacttataattgacaaatgatataaaaataataatatggctatcatttatgctttaagaatataaaaagaaacaataaaatagattaaagtgatttttattttatttgatttttttaacgattctttagctttttatcacaaataatttaaaattaaaataaagtattatgcccccaacacccgatttgtttttataaaacaaacacaacctttggatcatcgcagggcttatatgaaagagtgagactcttttgtgtagtatacctgaataggagagccaagacgaatgtgatagaggggatggcgttggtggtggctgccgcgaaggtggcggtggtgttctcgatggccacatagtagagattaagactcagcgtgagtctagatttttagaacaatatttagttaataaattaactcaatgaatcagaatttccaatttttagaaacattagtcatatatacccgcataaggagataaagaatattttgagcagcaagataaacgatagaggagaggacttggagctgcaaaacaacgttaagaatttgagagcttatcgcagtttttttgtttatagagttatagaagagaagaacctttcaaggaagaatgcgaaaggggacaaggcaagagccgcgaaggcttgtctataaaaaacaaagacaaaagggttggttccttgagagatggctactttagagagcaatggcatgcctgcgtatacaatctgtacaaacaccattgccatgttggctttgtgctccatcatcatcgtgtaatagtgatgtgtgttttgtcttttgatgtgatgaagctcactttgcttctctcccgctatttatgcatttgtgttggtggcaactttaaagattttctcttcttttttttttttaggtcactacaacagtacagctaatatagacacgtgtatttccattgaaaacgtttcaatcaaaacagctcccacacatccatttttttgtttcctctcaagattttagtgattttatctccttataaaattgcataaattactccttatagcggtgcataaatgtcacaatagttgtcttatctatatctagcgaaacataagtacgttgcaactagcttgcaagtggtttcacctaattcaacgttgatatgattgagttttaatccaagtactaacctccacaagaactattctgttccaaataattaattatttggaccctaattattttgtaacaataggttaaaatctattagaaccatatttagttttgctaacactataaaccttgccatgaagggatcatacaatagttagtttatcaatactttaagagaaaataaagccgaagattcgaagtagcgagacaaataatttcgccacaaaagaaaagcaaaagcacacaacttcgcgttgataatttacaatatgcatatctgctgttcaactcttttttgttttctttaaatgtaattgtcgaaaagataattttatttattttatacactatacaattggtccgcattgcgtaaaaagagtttaatcttaatagtactgctaaaaatgtgcgacgtataattagttaaatatttattgctggttgaaataggtaattgataatagttgagagataaaattttaaaaattagtatagtataacttctataaatagaattgtgaatactagagttatatttcattaaaacttttttttttgtataaacccttgtgtttagaaaaaggtttttttatttattatataattaatattattttgaaccacttacaaggaatatttcctgtaaaattattaaaactgaagtctacgaagaattaattcaaatttaaagaaaaaacaatattagagtcatatttcagtaaattgttttacatataataaatatattctaataaatttgtaaaattattaatttataatatggataggatactagacactaacatcatggtagtttaaccattttcatagtaaatgtttgcaatgagaataccaaccctgatacctagaggtgtactgacggaaaatactatcatcacacctatatttgttttcaatttaaaaacagaaaaaggtatatatattcattattaattaaaaagaaaaaataacaaaaataaaatgataatccaaagaaatcaagatattagctaagagatgcaaccaacgagtctttaattgtgcatacacttggagatgctcctaaagatagttcaataataatcaaatgaactcttattcctgattccaatactaaattaagaagaaagaaaacagaacattaatatgcaattaaagtgaggcacgactagatcaaattatttataatgataatgtagcataggataaaaacaaagaaggttacatgtaaatgtgaagtttctattatttatcaaatagtttagatattacctcttgttcttaagatatataattcgatcaagccatctaaaatgataaattctacctcttcttcatgacgcattatgatattcctacatcaatatctttcaacacatgctccatttttcaacttttaaaagccacatgtgacaaaaagaatgtaatggttctaatgcaacgttttttttatcttcaagtaggtgtctaatcaaagggagataatgatatatcagctactgttttatgaaactgttgcaacaaatcagaactgaaatattttgtgttgatatgtaatgaaagaacgaccagtgagaactattcaactattattaacgcatgatgtcgtagtaccaattatgttgacctttcataattctactcatttcaacacgtgtgttatagctttttcaaaaacttaaattattgtttacatatgtggtcgttcctattggacttacaaaaaataagttaaaaatgtaagagatatatttggcagatttttttgactgtgtgatattttgtaaatgagtaggcatgaaatgtaattagccttcaacgatttgtgtcagtgcgatgtatgatcggtcaagacaaacgaaaaatagcattctttacagattgttcagatttggtgaaaatggtgtcattcccataagagtgaccagctttctcaacatccctgaaggcgatacagagcgacatggaagagtttggttttttttctttatccttacttctatgaagaattcgtacctatctgcatcatatcacctatgtcaacaatttccctcatcattgacttgcttgagttaatctaggtagatgtcgacaaaaaaaaaaaaaaaattgtatcaatgggaattagataaagtttactacaagaagtcattccaaattcctaacattattcagatcaaagtaactgttagaaaaatgtgacaaatttttcagccacattttgatagaaggaatattagttgaaattggtcataatttttggacaaaataaagatggtcggacaattgtcctataattatttcaaaattttggaaatattttttgatagataataaagggcgtcagaaatttgttggaccgacgagttatagactttacaattatcaattaatggtagtacaacgctttttagatgttattagaaattggtcgaaaatataatttatcaacttgaaaaaggtcaagtcaaccacattaaattattatcatcgaaaaattcaaaaaaaactaaattaaaaacataaacttttttcaactttggataatcagatttttaaattcgagcattatagaaatagagtcaaaacatgccaacatgataagacaaattactaaagcttagatgagggctttcacatttcacattcttcacattcttcttcttcttgtgaaacacatacagagattgtcatcattcctcaggcttatggtaagctacgatttgataagttttatgtcagttttgcggttatgagaaactaatggaaaagatgttgtaggcctattactggtcttgatggagcatttctaaagtaggagttaaaaggagagatattagcagctgttggaagatatgcggataaccggatatatcctataacatgggctatattgagaatagaggataatgatttatggggttggtttgttgactagctgaagcatgatctgggcttagggttagacaatgggtttaccatcatttttgacaagcaaaaatgattgataaaagttgtcacacacaatcttccaaatgctgagcataggcattgtgctaggcacatatttgtcaattggcaaaaagtgtatcgggagaatgactatgaacattttttctaggctgttgcttttagtggcaatgaaggtgactataactacaatatgagagcattgaagagttatgataaggtagcacatgaagatttgttgaaaacagaacctaggactaggtgtagagctttcttcaatagcaatgcagtttgtgaggatgttaacaacaacttgtcaaagagtttcaacaaaacaaccaaaaagtcacgaaagatgccaattatggacatgcttgaacatatcagaagacagaccatgcagcgtgtcttaaagaggtatgagaaagcaagtaagtgtcattccaagtttgcaccacggataatgaagttatattaggcaaaccgcacatctacaaagttatgcaaagttttaaaaattagtgagaatctatatgaggtacgagagggcaaagcaagatttgacgtgaatcttagtcagtgtcattatggttgtaaccagtggaacatcacatgaattccttctcatgagcacaaccgtgatccagatgaataagagtttctgatttcatttattttctcttttatctaatatgagtgatgtgattatgtgttaactctactctacaattgtatgtttggttagctatgtggataagcacctcttgacaagttggtggcaaaaaacttactcagacaacgttaaacctatgaggggtgaaaggatgtagaagtcacaacataaagaacctatttaggtacctgaaaaaaggaagcaaagaggaaggccaaagaagtatgataggataaaggagccttatgagtcgtcataaaatccagacaagctaacaagagatggaagaactataacatgctccaattgcaagagaactggacataaataagggtacatatgataaaccagatgttcacacataccctcaaaaaaaaagagggagaccaaagaaattaatatatatttaaataataattatgtattattttttgaatgctttttcaaaaagaaaattattaaataaatacataaataatttctgactaaactttccgacgaattttcgagtaggaaaacttttctaacttaagtttgtcaaaaatttatcggaaatataaaaaattgaaactcataatatccgacaaattttctgaccaatattttcgaccaaatagtaaaatgtgcagtgaacaaacatgtgttcaccggcttctttacgacaaagtttctgacaaaaataaataatcagaatttttccatgctttccaaagaatcattccgacgaagttgtggtcgtcagaaattttttctctttttccgatgtactttagtcggaaatggtcatgttctatttatagtgatatgccgctttctcctttactttggtcagagccaggaaggaaagaaacaaccgcgataaaaactaatgtaattaacttcatcttcatgtcttttaccttattatttccttctatcaaattctaatcttttatttttgattaggaaatgtgaaaatattgattattaattggatagggaagatatatatatagtagtaatgttttgcaataggcaaagtgtatattatttaggtagtgttcgatctttttgattaattgtttagtgcatttcatatgtacatatggcacatattattggaattaaactatcaaaatttgaaagcagttttttcaataaaaactgcaaataatgttataattacattttggatacgtgtaataataattatatatacatgtaaattgatggatttaattataagaaaataaaacttatcaattcagatatatatatatatatatatatatatatatatgtatatacattttagatatgtgtaataataatttatgtagaagtttgatctgaaaaaatgaaattcattctatgaaaatcttcaaatatttaattgtaaataaaaaataaaataaaaaaataaataataataataataataataataataataagtaaaatatctgcaaatctattaaaaataaaattatgagaaaataattttcatacatatttagaggttgtgtagttaggttagccgggtttcggttttaaattgtggtcaaccggggatgggattctagctgaaagtgtaaaatcggtgcctctcaaacatttagagaaggatattttaataattgacgcatgttttcaagatttatgcacttctcattagattctaactttttcatgacttttagttttctattttcaattcagtttaaatttgctcgtttgtttctaagaatgatgtttttttgtctgtgtcgattcttgttaaaacaaaaactcacttttaaaaaagttttatatatgtaatgtctccaaattcaaacatataccacacatatggatgtacaattcccgtaaggatccatatatgaacctttttacgagagagtacgaacaaggccttaccaaatatgtgaattgccaccaaacttaaagttaacgtgtatttctaaaacaatatatatatatatatattaatgagagaaattcccacaccgaaagttagaaaaattatcgagtgatacataaaggtttagggtcaatccaactcaaaactaattggcaataagtggattggcattaaccctttatattgataatttctccaacttttgatgtgagactttctctcattaacactcccctcacgttcatgcatgaacatctgaagtgtgagcatgtgtaggaactacatccactgggtgatgtgtggcttttacttcaatagcatcctccctcaggttaaagcatgaacatttgaaacatgggcatatatgggaacaacatccacaaggtgtcccaacgatcaagtggctctgataccaaaggaaggctcgattctgtcaagatagctagaaaagcattagcttgagcagaagtgatggattatgtcgaggttaatgggtagaagagccattatctcgaagggacatagtggagaaatatctcacattgaaaagatgaaaaggacttgagtagtatataagggacgtggacttctctacccattgctaattggttttgagtttgaaccccatgaaagttaacaaacacaaaacgaacaccatactgaattaagttacaccatcacattatagagtcccaatgatcaacattattacacatgattttgataacttcagttttaacattgataattattttctaaacatttaaaaatttaacacctaggataaggcataccacatgctgcaaatacttttctagctggttcaagatacttttcaatcgatggattttccatgtaatcacatagacaagacttttgtatttttaagtttttgcaacattccgctgatggtgggattggggtctctaacgctgataggcatacttgaagatctgtcacaatgcaagccacttttttgtcttcacttaaaactctaagtgcttgggtaggaactagaaccgacaagacaaaggcgatgaccattaatgtagtgatgaacttcatgtcttataactttagcagctgccacaatcaaactctagttcttcgtcttcttcttttttttgcttagaaaacgtttgagattttgttgaaagatggaaacgttatatatatggactaatgtttttcaataggcaagtgtactttaggacgtaaattttatctttttaattaaaattttagagcatttcacacctatatgacacattatctatattttaatattgtggaaatactttaaaaaaataaccttactctttgtaagatattattaaccaatgccattagaaaaataattttaaagattaaattagtttagctcattaaggataaacaagtcaatttacttaagatccatttgtttttctcaggggttacgaaatctatgcacatgttgttttagattttctaatcaatatatataatatttttaagatttccttaacaatttacataagatttttaagatttacttttaaccatatacataatctaaacaaattgatggggatttgatttacttccccatctatatttatatgacacattatatttaatgtattctacataatttatatgaaacattatctatattttaatattatggaagtacttaagaaaaaataaccttgctctttataagataatagaaccattgtcattagaaatataattttaaagattaatctagtttagctcaataaggataaacaagtcaatttacataacatccatttttttcttgtgagttaagaaatctatgcacatgttgttttagatttactaatcaatatatataatatttttaagattttcttaacaatttatgaagatttttaagatttccttttaaccatatacataatctaaacaaattgatggggatttgatttacttcttttcaattacttttttattttttgattatttgataaatattgattggttagttaaggcaatattagtaaaaacaattttccttagtttgtttatctttaatgtttttgattaagttgtaacttgtaaataaaccattgaaataaatattctgttttttgtaagatttaatcaatgattatatatataaaaaattagtttaatgattggtttagttttttctctatttgttatattttataagttggttagagataaaatagtaattagattttacctttttaattatctactttttgataaatacttattggttagttgtattcaatatttgtaaaaatgattttacctaaaattctgttctttaatgttttataataagttgtaaataaaatttttgagttatgtacttaatttttttttaaagattttatcaggaaatattttagcgattggtttaatagtcttactttatttatgttagagaaaatataatgatttgattttatctttttataattgttcatgataaattaatgagaatattacgtgttaaggcacttttctgaaagtttagccgtaattaggcacttcacaatcattagacactttttctatgtgaattgacatcactaccctctaactatctctcccttttatcttttcgttatctctcttcttttagaatacaaaaacatttttggcctctcttgttcttcatctctctttctagaataaaaattcaattttttaggacactctcaatattcaaaatcaaaatcaaaactgaatctcttaaggtttatcatcatcttccctatctctcaacaatctgttgcttctcttcttcttcctctctcgagatctttttcaaatatattctcaaatccacctttctccgctggatctgattccaaaacatgtgaaagtctctggtcacagaatttccgtcagaagtttcctcgaaaattataacaacactatcgacattctctctttcgattttgattccatgatcgtgaagcctctcccgaatttcaacaaccgcatcaaaattgtaaccatttgggcaagttacgtttctctctttctctcgaagttctagaccctatctattcgccgctccaacaatcatacctccgtcaagaggacgttatcctctcaaacgtggatctagctttgattctcttcacttatatttcgcatattagtttgttttttacaaaggattcgagataattttggaaaccatgaccaattaatctggttaatcttattaaatgaacaaaattaaccatacaattacatccacaaggttaatacattcacatattatactatataaactctaccataaaacgttggatatgtggacacacatcataatgacagtcagtgttgtggacaacctttgctaattttggttcatgaactttagcttcatggatacaacgtgagcctttgagaccttgtagagatcttcagtaatttcagtaaaattaaaagctggatttaacaattataaccatccacaaatgtgtgtatgtcttgttataagaatctatctttggatccaatacaaaaatgttgacaactaatgttttctcttttctgtctcttactaatcgttttatgtcgtcgtgtcaaaacaagaaactaaccaaagactagagagaatgagagtgaaggttctttttgtgcttgtgttaaaatgagtgagtgaagcaaaacattaaagagaaatgagagatgtaagagaagtgaacctctaaaagttaaataaaggaagaaccctaaaagctcaacaattttttatcgacgattactgttcatgtctaaatttgtgcattgatatgaaacgacatgtgagttactaggtgaccatttggacttgattttttggacactcgtcaatgtcctctatccaccgcgtttcagccactgttctgtagcctttgcagcaagtgttctgtaaccaccaattaatatggacataatcttaacaaaatcactacatatagcttgtttttgggattgttcacctattactcaaacatgaaacgattcacaaatctcactataacaatccataattcacaatccataataagccatccataatgcacataccaataacaaaagcagaccgagctacaaacacacttttatccaccaacaaagatttaccaaacaaatccatcaacgttcgatatatcaatttgggcttctctatcagttttcaaagaaattaaacccataacttcaaaattttcagaaaaaacatgattagcaaactgtaagagcctaatccactaattgttcgatttaatcgcaagtaaattcacgatgaacagggatctctaatctctgtaacatcgtaatatctagaatttcacgatgatataaacagaagaaattagtagagacaataacaaagaaacttattgttagaggattctgagaatcgcaaggatgatgatcatcttcttcatgggtttgttgtcgtggatctcaaacttggagattatgaggagacgacaaatcgaaagtttatgaggagattatttatggtataatgaagattggtgatttcttattgaaatgagagaaagttaatgggaacgactatgattttgtaaaaaatatacagaacgacaatgattttgaaagagagaattgaaaatgatgaaaaacaaaagaatatggaagagagagagagaggtgataaaaagaggataattcctcacccacacgatctcatcaataatgagtttaaaattattgcgtcatcactacttcaggagtaaattggtccaattttctctcaaaaagatggcaaagtgcccactccctcataagtgcctcaaaaggaataatattatcaaaaagtgcctaaacgtgtcacaatcccaaaaaagagaatattacactctaagacacttttctcaaacaatttccgagatacgacactttcaaaacacaaggcacttctaatataaaaattgtccattttgccctcaaaccaatttcggtttaattctctaattttaatttctatacgaaaatcaatttgtaagaaacctctctttctcacccaatcccccacgacgactttacaatttctgtttgtttcccttttctaatagatggttcatgcttctctttggtgatttcgctttcaaataatcccttggcatctacgtaattgttgttttctcacttctcaatgtcaatacacatcgatttctcctcccaataccgtttcaatttcctcgtactactcccttacgactgacaatgatcaatccttcttccattacttccaccatcttcttcgattatgcgtgacggctcaacaatgcaggtaagtgcatgcccaaataattttatccgatttcatcttctgttcttggtcattagctgcgaatctcatatttgtttactctcggtgaggactcgtcctcgatgcctgtaacgtctttgagattgtttctcttgttttgttgtcggatttgcgtttgtggaactcgattcagaaagctaatatgtctcatgggatatacgagaatgcttttgagctttacataggaatgcgtgaacgagatctcacagagtaattgtcatgtcttgattagattttgacttttcattgcatgaatcttaagtcactgtccatttatacattgttaaatgaaacagttgatcttatattctctttgattcaattatgcagatgattccttgcactacattaaattatatcacaaacgaacgtattgtgcatccatgaattcaacttaattcaaatgattggtgaccatagatgatagaacaaacaaatatggttagctggatgcttacttattgatgtcatccaagagaatctgtccattcagaagcaaacatggatattgtgctcattctattcactatataagtatatatgtttcttgttatatttaggattagtatacaattttggttataatgatgggagtttccatacacaagtgaataaatggtcaaagaaaaatgaacgatgatgtactttgaattggcgtttgaattggtgattattgttcatgtataaacttgtgtattgaaatgaaacaaccccgtaagtcactagatgaccacatggactagaccgcttgaacagtcatcaatggacacctgtgtctttgatttgctttaaatatgttttattcgtcggtaaaattaccattttttgtatgagtttagtgtttgtttttacggtttcagatttagtggagaaagattatgggttgagggtttgggtttaattttagggtaagtaaattaggatttagtgtaaaccgttaagggtagagggtttacacacttgtatgaaccatttttgaatataatcataagaatatcaccatacgaatgatcctatattttacagctcttagattgaaatgtcttagctgcacaaatagatacacgaaagatgagtaacaccaaatctaaacattgttcaccaaaatcaaatacaagaacacttcgttagttggagaacatatattcaaagagtaatggacggattcctatagctgacagtccgcaagtacgtgttcatatatgatatagtgtaaaacatgactgtgtatccacctagcaccgaacaaatggatatacatttttgtgtgtttctcgtaaacctttctagacatccatgagccaccttaatagatcggtgttgccaatcagatccctaacccaagtcccatgcactaaatcgaaaaacaaatccaatcaacaatcaaaaacacatataatcgagatccaattccacaataagaatacaaacatcgtttgaattggagttagagatgattcataccagaggacagatccatgacgaagagtttctgacgagaagagatcgaacggatttctaagtggaatcttgtaatgctagggtgtgtttaggagaatatcacaatctgaatgacgaccgacgactagaatctcttctacttcgccatcatcattgcttacagtggaaccgtttctctccggcgacgagaaatcgcgactgttcacaacgaagatgttcttgagaatcgcgctatttttcagaacggtgaacacaaggatcgtcttctctggcaatcattgctcttcctccattagtttctcttctttgacatccatgaataagtcttagatcgaacgattgagagattttcgaaaattgaaaacgaataatatttttttgacacgttcagttagttttattagataccaaatcaaacaaaatccctagaaccggttaatcaattgatggtttaatgtgggaaggatagaattgtccttttatcctccaaaaacaaaggaaagtgtctcatccctgaaaagtgcctcaaacggaataaattttcctaaaagtgcctattagtggcacattcccttaaaaaaacttgccaaaaaccaacggttatgattttattagatgatcggatcaaaactcgttaaaaccggattaggcaaccccggattttcaactaaaataatttaaatgagtttttataccctaaaacattcgccgaaatatttgcagttgcattatgacataaattcaactgtaatgattatttacaattaaataatcaacgcaattcacaaatctacaatttcatatgcaaaataatataataaaaaatatttctaaaaactttacattattataactatattaatttttttaataatattctctaccacataactataattattttctaaacaaaacttaatcaaatttaaaacagaaacaaaaaattatcatcgtattatgaaagattcattaaaatcgagtactattcaacaacaacaacaataatttaactaaattaatatttaacaagaataagatataaatttaattgtttactacaataacatcactcacgttttttaaacataaattcacaaatacgaatctgtaaaaaatcattaattcatgatgtagcacgggggtaatatatatgaatctagttatcttataatttcaaagaaatttacatgtgtatacacataagattttgttatttttagtacatatcatttttcaaattttgatttgaaaagatgatgacttgctaaaagccactctgctaaagttccaaaccagtcgttatattttgttggtaagacaagagattggttcatatcacagagtgggagtcggagtcatgaaatgtcgtctatgatgggaaatacattactagattgcttttagtcaagatgggctgccatattatcatatttcaattagtgaactgctaattaactctttctttttatatgatagttgatatgtttgtttttgttcttactaaaaaaatatgtaaaagaaaatgttcattttaaagaatcatcatctgaatagccattacatgacaaacttccaataatgataaaacatatcaaatatcattttgagaattataacattatgaacaattaggaaaaggtataccacaagcccttatgacccttttagcatttccaatatattgactaatcgatggacttatcaagtaagcacacaaacatgattgttgttcttttaacttttcacaacattcttctgacggtggacttcctgttattatttccggcttgcagacttgaaattttgtgaaatcgcatgtcgctttcacttcttcccccaaaatcaacgttttggttagagttacagatgacaagatggagacaatgaatactagtgtaatgaatctcatgtcttgtaaccttcacgactcccttctatataattctattacgattgcttgaaaatgtttgagattttaataatgagatgtcgagaaggatggtgaagctatatacaaaaggtattaatagatgaagtaatgttttgcttttcttgttaagcaaatgtgttttttagctagtgtcttttgtttttattttactttactaactctagtgcatttcaaatctgtgatacaattttttttgatgaaaatgtgtaaaaaagagtattaagattgtaacacatgttagcaattcttaaaaatacaattcaataaagacatatatatatatataattataataaaatatcaaaacttttaaaacaaatccatttttattaatttttactaatgtatatagaaatattattttaaaaaaaaaaatcaaaacttttgaaaatcttcaaacattaacttttattattaattataatttttaagttaataaatagaaaaattaaaaatcttgtcaaggttaatccaattacggattgaaaaaacctgaaatcaaaatatggttcgtgacgaatgacaactcattgcctttagtaaatgggctcacatgggccaatataaactgatgggtatcggatccaattaggtagagcgtgaacaaggtgttgcaattttaaccttagcaaattttcttgagctaaaacaatgtttgagatttttaattgtgagatctcaatgagggtaaagctatatacacactttttaggccgcgaattttgtttgtgattatattgaattgcatttaatatttatgtaacacatactgttttcttattttaaaaatgttttatttgtcggcacatataagtggcattgcattaaaaatttgatatgaatagatgaaaacttgctaattaagaagcactctattgatcgatttaaggttttatttgtgagcattacttttacgtaattcacgacaagactgcttcatttgcaaaggtaacgtgtcaattcagcttaaaatatctttttcatattttgttaagaagaagttgctataatttttggtaaaattgttaacatgtgacacaaactaatttttcgtttatatttttcgttaaactaattgttcaggttatttttctattttcattattagtccctgcacgttttaggtcaatatatatagttttaaaggtcattatttactttttaccaagtctttttctaagcctcttgagaagcaacttgttccaaagcactttcataagctatgcatcccctgttttcagagtttcatcagagatttcaataacattgaaaaaatcttttctaactcttttctctattaatctgtttatgctttcttactcatacatgttgtttgtttcatccttcatgtctgagtagtctgcttgttagggttagggtttctcattagggattcatatgattagtagattgcccccatcctaggtataatctgtaggattcttcatctttggttgttcttaatgctagttctaaagtaattaactagaacttgatcttaggtaataggtatacccaccataggtacatgttactggaactactatttgatgagccaatgtttataggcgtctcgaataagattggtctatctacttaggtgaacttatcaatttcgtttagaatgcatgtttaggtataggatttcacggcacatcaccgagaatcttagctctaggcatagtgagtagcacggcaaatcactggttactcaataattacggtttgagttcaagaacggttcgataacaacctggctatttctagatctactaatcatctgtttcctgataataccttaacctgatgttttattatcttgttttacaaccaactaaccttttatttgcttactcactttctttttattttttttactcatctagtttaatcttgatactttagcttattgtgtgaacaaaagaactttgtggaattctacccttaagtactttcgacgatctcttatttgagagagtggtcttaaggcaatttgagccatatcaatacccttacttcctatttaagaatttttaaaaataaaaataaagaaaacatgtagatattcaaaaatgtagttgatatgtaaaaataaattggtgatttagttgaacaagatgattttttgatagataatgttttgtctaaacttgtttgaaaacattttccgtgttctactaatatttgagtttttcttttaaactgatatttagactagagtttgttctaacaaatttagaaaatcggataacaaatttctaagacctttaaaacatgtattctatgcttttcttcatgttcaaatttttgtgtgaaaatgtattctacgatttactatatgttcttaaaatgttagaaaaacattttttacttttagaattcatattcaaaagaatttagattttagaattccaaaaagtttagaatttctagatatagaaagtgtatcattgaaaaagaaaactaaatattgattaaatattacgtttatatagtctattattggttaagattacaatctaaggggtttagaaccgggagggtaagtgctctgaagcacttcaatgcctctgtttttttcgccagagttcagagatgagtgttatgtttttcatcacgatgtcggtaatgagaaagaaagaaaaaaacaggtttaaattaagggtttaggagaagtctccatttcaactagagagtttgaaaacccataaatttatctggtttttgtaaataacttaggaaaattatattttttttagaaatttggttagttaaatttttgaaaaatagggataaaatagtgggttttattattaaaaaccctatttcaccaaattctttatatgaaggtatatatggatattttatccatagaaatcttttttatttccaagttccccaaacatatagaattaaataaactacataactataatatacaaaaaaacaatgcaatttacattcattgtaaatatttaattatcaatatgttggatttttacaaaactaatttatatataattttgatatgaaacaatgtttttttttttttttaagaatctacaaactttaattttatgtcagtaaacgaaaagaagaaaaatatatgtaaaggctattggtttaggttaaccggacacaatgagaatttattccagtcatgaaccttcaagtcacaaaaattattagtccctgattaatgttactttacttcataagttttgaattcgaaagcttgattttcgatatttaatcatgtacgcttatggtattcgaagttttggattttggcatacattatacaaatcacagacccgtttttgcatctaaaagttttagttatggatagtcagatttgtttcagaatgaaatttaagaattctttttcatctttgtgttggtggctattttttttatctattgaatgtgtagttgacgattgcttttttcatgatatctacgtatttgatgcatttgttgaacaacaaacgaatacagataattctgctacatgtcgaggttataagaaaatgaagattctattgaatcaggttaaatcatgacatcatattaatagactccaatgatcaacattattttatatgatttttataaattttacattattaatgactattttataaatatttaacacttcaacaattaggataaggtattttacaagccgctaagatttgtttagcagctgtaatatattgactaaattgtgggttttgcaagtaatcacaaaaacatgaattttgttctttcaatttttcgcaacattgagttgatggttggcttccgtctatcaccgatggtaggcatggttgcaattctgtcacggtgcatgccactttcttctcgccccacgaaactttaacaatccctccatatattggagccaccaacgatagaacaaagaaaatgaatgctaatgttgtaaatttcatgtattctaatataataaaagactcttatctaactgtagttttttttgtgcttagaaaatatatgtttgagattttgatgataagatgtttttgagaaaggtgaagtatatagatggagtaatgttttgcaataagccaaatataggtagtgtattttgtcttttggattaaattttagtgcatttcgtatctatgtgacacataattattttcaatataatttataagtaataaaaaatgtttaaaactttttttagtgttaaatatttttcaattaaactaaataattataattaactatccaaatctaaaagcaaatcatttacataatttggaaatatttgtttataaaccatcaatgcacacctaattttggatatgagaaaaatgatttgaaactatcaatgattaattatagataaaaagtaattttgtaaagtgagaaaacaaacttatacaaacgaataaaaatatctgtaaatcaattttgttgggttagggttgaccggttgtttgggtttaaccaggattcagagtctgggacttgaaaacaaactggaggctaattggattgttctttaaccaattggggaagtagaggtgtaagtgtttaacaatggtgcctctcaaacatttgaagaaggaaaatccaatcatcgacgcatgttttaggatctacactacatcgttataaacatactctctccacttgaggcaaagggacggattcattgcttcaaggtggattccgtgagggttagtttacagaacttgtaagatgaacttcgtgttctagtaaaacacaagtatgtccctgttaggcatttctttatccatgtcttgtgtggggaaaaaaaattcttcatatatactatttttcaagccttacatacacattgtgaattgtttcatttcaaatttttaagctgcagccaagaatgtaaaacatagattgttcctagagaaaaaaagttttgtctttgcttagcctttttgtactctcttttcattgtgtgatttcttctcaatgaagagttttgcatacaagctattgcgagtgtggctgagtcttgtatttagacactagttttgttagagaatcatcttgacaataattttgcatgcaaaccagcggtgttactatcggaaacctacttttggcattctcatcagaacaatggcgattgagaaaaatctagaaaagccaaaaaaatattgtttacaaattttgtagggtttccaatagtaacaccgctggcttgtttttcaatatggaccaaggttaaataagtaattggaaacaccggagacacattgttgtattactgaaaatactgaatttctcatcgatgatagttactaaatgtttattgtttggttcgcgtcctattcctatccagctaaaaatgaaaattcaatttttttttgttggaatattaattttgttgaatgaatgatcatatatattttaaaacatttttgtggtgttagcttaagaagagttaaaattttttaatgttttagttaatacaaattataaataacacaaccaaaaaacatctcgtgtaaaatagaagtttcgtgtaactatcgactgctactacgatgccatagtcatgctaatcatatgcaatgcgtcaaaaaatgaccttaccaaaaggttatgcatacgcacaaaaatgaaccaggagaagttggactagatataaaaaaatatcgatggaaaaagattggaagaggtaataacggattatgcaaaggagaaacaatcaaaacaaagagttatgttcgagaaaaagctacaagtcatcatcgagaaggtaatcaataattatcaaggagattactaaaggctattgagaatgtcattacttgtcgagaatctttgtaggattgacaaagaagtaataagtactaacgttaatatctttttttttttataattttgagaaataaggagagtatatcaagataaaacagaccatctgtttttagcttaaattagatgaattaggactaagcaaaaaacctgggatcgattatccgaactgaaacagatcaaaaaaattagaccgaaaaccaaacctgaactcgaagattttttttatttgattttaaattcctctatccgaaaaacccgaatccaaacatgatccgaacctgaatctaaatacccaaatattttatttaaaatctaaattttacgtaaaaccccaaattttacccaaaaaatcgggtatcaatcccaaaaaagggcttaaaaattcatacccaaaccgatattttggatttattctattaaatccgacccgacccgcttctctgaatgaccacctttaatattttgatgaacttattttgctttataaaaaaaaaaggaaaaaaagagtacgtcaaaaactcaaagaagagaaaatgacgaatctttttcttaaagatgaggcaattgtatcaagatacgaggacgaggttggtttgtttaacattatcccaaacaaagtttacggccaaacccgtcactgccacgtgtcatccggatctccttttggcttcgtctgaagacgttcgatgctcaccggtcgcgtctttatcctctcatcatcatcctcgaaacgtgcaacacacaaaaaattgactataaaagattgcaaatttctctctaaatatctgattcaaacgcatttggtaggctgagagaaagaaagaaaaagataaagatggatcacgcagcagatgctcaccgtacggatttgatgaccattacaagattcgtgttgaatgaacaatcaaagtatccagaatctcgtggtgatttcaccattttgcttagtcacatcgttttgggttgcaaattcgtttgcagtgctgttaataaggtaaaaagtttcgatctttagatgattttttgggtcagtgctttaaaaaaagatgtcgctttcgatttatgttgggtaaaaggtttgatttttatgggttgttgatgaatgatgatctggaaattctctttttctagatatgtggagttgtctcaatcgtctttagtgttatttaggatggcccattgagaaagttgtaatctttatggttgtttgttgcaggctggtttggctaagttaattggacttgcaggggaaacaaacattcaggcaagttttgtgtgtttcttcttcttgttattttggtgtctctgagattccattttttgtggtattagggtgaagagcaaaagaaacttgatgtgctctctaatgatgtctttgtcaacgctttggttagcagtggtagaactgtaagtgtttatgaagttgaaatgatatagggatgttttcattttgtgtctcctcactgtttttggctattgaaactttgtggtagtctgttcttgtctcggaggaagatgaggaagctacgtttgtggagccatccaagcgtggaaagtaagtttagaagtgatctctcattgatttagcttatgaaaatgttattgtttagcgtaatctgattattttttgttacctataggtactgtgttgtttttgatccgcttgatggatcttcaaacattgactgtggtgtttccattggcacagtatgtttcattatctaacccaagttttccttttttttaacattgaaagagggcttggatagtgaatcatgtgaaaaagtttgtcgttttgtgtttggtttcattgtgtgtagatttttggaatttacacgttggaccacactgatgagccaaccactgcagatgttctgaaacctgggaatgaaatggtggctgcaggttattgtatgtacggaagctcctgcatggtactgaaaatgagattcccaaaggcaacattagtatcaattactctgattagttgtttccaacattgttagtttaatgtgatcaactctcgcagcttgtgttgagcactggaaccggtgtccacggatttacactggacccatctctaggagagttcattctaactcacccggacattaaggtaatgggaactagtcaacataatgttactccctttttgtgagtttctcaaggttcattagatcttcttgtgtacagattccaaataagggaaacatttattcggtgaatgaaggcaatgcgcagaactgggatggtccaactacaaagtatgtagagaaagtgattaaatctgattcaagtctagcttgcttgatatattcatggttttcgttttcggtttcggtttcggtgtaggtatgtagagaaatgcaagtttcctaaagatggttctcctgcaaagtctctgagatacgtaggaaggtattatataagatcctttatctattttaaagctctgtcatagtaaatagcatatgctttggtccctttttggttcatttcattttgttaacagtatggtagctgatgttcatcgtacactactttatggaggaatcttcttgtacccggctgacaagaaaagccccaatggaaaattgcggtaagcttaggataaagctagttcaaatacataaccactaaaaggttgttctggttttgagatcgataaaccgttaaccccccgcagaaaacttaacactgttttggcttatatatgtggacagtgtcttgtatgaagttttcccgatgtcgtttttgatggagcaagccggaggtcaggcctttacgggaaagaaaagggtatacattttcctctataccctgattttattgtcacttgacagaaatttaaagattttctatacggtttacgtttcctgatgcaggcgctagaccttgtcccggagaagatccatgagcgttctccgatatttcttggtagctacgatgatgtagaagagattaaagctctctatgctgaggaggaaaagaagaactaagcttctcattcttcttttattctcttactgtctctgtctctcttatttctatatacagtatcttcttctgatgagaagaacaatataactcatttacaaaaggaagatctttctttatcattaaatgcacataaaaatcttctttctttcatatcttcaatttgtcttcagctaattctaacatccaattttagatcattccaagcttgtcttttgattattgatcccactttagcactttatgtcacaaagaaagaaagaactttatttcaagttttttaaaaagcttctattgatttatcagaagaaaagcagagatgaatgaagccttattaaaggaggtcactattgaggaaatacgtgaagcgcttttctccataggagcaacacgagcaccagggatggttttaacgctgcctttttccaacgctattatgagatagtgggagaaacgatagtctcaaaggtcaaaaacatttttgcaacttagtaatgcaaaaagggtggaatcatacaaatctctgttctccatagctgtcgatcttactctcacgtagtttccttgtttgaaggtaagattaagagctgggaatgggcagttgagaggatgaaaagtttacatgtacagaaagtgacttttggggccaatacaatggagataatcaaagtccttcataaaccaaaggactgtccatcacttgtaagtcatattttcccactgttatctatggctgatgggatggaagattggttcattttatttgaacctaatgggtgtaattagggggcctataaaatagctagaagtgttacttctgatataagagtgaactcttatgtggctcaaagttaccctaggtggatgaaagcttttttaatttaggagaaaagtattgccgatggttttaggtacttattttcattataggtttttatttctaggggatttataattgtagattttcttatttttctattgagttaattcggttttaggaccttcctatattttatatatctcagctattatcttgttagctgtaatgttggaattgtgaatcctagattaaatcctgcaacaagaaaagcttcatgagaagaagagaagaatagagaagaagcttcaagcgtaaagaaggagcaaaatgaagaagaagatgtcgtgacaagaagtcaacgaaacatgaagaggaaggaacaaagtcaacagaatagatgttgggcattgtgttttgttgtaatgggttgcagatgaattaggcccaagtatgtttagttaatgagtgttgtgttcttagtctaagatagagtctaagatgttgtgtaagagtgaattaaggagttgggagttccaacatagtagagtggctgatgtaagttttaggtctatgatgtggtctagagtctaagtatgtgtagtgtagcaagtggagcaaaaccactgtatgtatgtgtgtctttgtgttgtgtaagattatcaagtttattaacaatgtatacattgaagtgtttaaacgtgttcttgtatttttttgttttaacaagaacacaaacagaggttgtgagcaaaacagagagtttgtggtgagcattacaacatgtaaatatctttaagggattactttgaaaagatagaaaaaataaaaggtttagtttctctagacttaagcggtgggttttatgctttatactcaaattttcttgggttgagtcattaacttttgattattttataattaaggttattccctttcccttaatcggtaactagtagggtttctttcttttacttctgtaacttttagctttcatcatttcaacaaaaaaaagattaaaaaaaaaaacacaaaccaaaagatgagtgatgaattatggaatgacatccaacatatggaattgggtcgtgaactctttattccatatcatgcttatgctggagcttttgcttctaatagattaagtcatcttggaagaattcttaatcctcaaactcaaagtgttgaaagagctatactggagttaccttatcagtggggcctaggttctcaagttcatggacatatccttgatgacaggtgctttcaatttcgttttcgttctgaggcatacctacttaatgtcctaaggagagcgccatgggtgtataatgaatggtttacttcagagatgggaagattttgctacagaggatattcttacttatatagactataatttcaaattagaggaatacattcaccttatgtatcagagaggacaattgagttcattgcaagtactttaggtgaggttgtggctatggatttcaatgaagaaactacaacgcagattaccttcattcgagtcaaggttagaattgattttattgagccactacgtttctttagaagagtgcgctttgaatctcgagaaggggccatgaacggttttaattatgaaaaactccaacaagtttgcactaattgttgccgtgtaaatcatcaagtcagccattgtccgtaattagtgcatcatgaggatttagatgatgaatcagaagtgatggtaattccagagaggcatgatggtgaaggctccaacagcctcaatcgatgggatcaagagattaactcacaaaattctaatatctcaacgtattcacctctgcatgattttcctgttgtaagctggaatttttatactgcaggcaacctacctcatcgattctcatcatcttcaaactcatctactcctatagcttcagctagttttcttgcagcttcaggatggagacctacaactagacctacctatgaatttggtgagagttccaagcgaaagaaaggaaagcaagtgtgggaagatcctgaacgcaacatccgacagagacgtatggaactggggataaggttttatctggtggatggtgaggctccttaaattcttacatgaagggcttaatattagagtagaatcggttttatctactctaatgatacttgtttatgggaatcaaggtttcagtaagttactttaggtaataaagatccactttaaacaatagggtggagttgttacaaaaaattttgaaggacgaagatggttataagatgacaaaggaagatttgtatagcagctttatgatcttccatgactacattttttgacttgtatattactcataactcttatggtgagaagatggtgtgttcgaaggatccggaatcaagcaaatggtgaatggttattgacaccagttatgtctgaagactaagacgcatcttttattttcatcagttattaatagttacagctgttgtaatattacttgggttgtttttaaggttccggttgatgtaaagagtactatgtttctccaaaatggttctccattattggaagatgcttttaatgtcatatataaaaatggttttgcgtgaaaaagaaagaaaaaaacatattagaaactgttttcttctccctctccttttgacgacaaagaagcgactttacaaaactttttctctttggtttcacagtcgtcgacatttttcgatggattctttatatttcttagttaattttttccttctgtttctaataattatgatgggaagaatcctctctaaccaaattttgtctagatctatttttcattttggatggtgatggcttttgtggtcatgtttacaacagagtcaaataattgcaaaattcaagtgaagccattactagaattcaaataagaggattccagcccaccaatatctttcgtcacatatcatgtcaattcgattgaatcgtgagttattgtcaattataatatttgtttatggtgatctttttcatcagcgtcatctccggttctcgaccgataaatctactcctgatcaatgcatggtttgcagaaatcatttgggtatttgattcggggatcaatagacaaatatttttgatcgaaggaattggcctctatgatgacttcttttttctaaggatacgatcgaataatggtgacattctttttgtgccacatttgaaatgaataagttttatggaaaagaaaatcatggttactaatctacgacgatggatatggcgttacaaaagacatgatcgaggaccatttcaaacaacatataagtgtgtttgtttaatcaatgtgatacaaaaaacatttgggaatttcatctataagatgttagcatttcacgaatatataaagagaaaattttacagatttcatatgttgcgtgtaaaacttttttttgggaaacaggattactttaatttttgaaataattactaggatagaacacaattgtatgtttattcctaaaatataacacatcttttttttattactcacatgttttcaatacttgtgtaattacagttaacacccttgattagttttaattaaatattattattaaatttgtttttaattaaaaataaattaaaaacaatgattatccatgtcaccaatccatgtcatttaccctgatccacgtcatccgaaaccaaaaattctcctaaaacttccagtttctcattttttcagcatgtttcactgttcatccgcgcaaaaaaaaaaaaaaaaaaaacgtcgcactcttctatcgttcagtcgacggaaccctaattttgtcgccgttctctacttatctcgtctctttcggccgaaactccttcggtggtgtcgaatttcaaatcatcaaaaatcaaaactcaaatcaaagagatctatggtattttatatgattcgttacaggtttgagttgaatcaggaataactactcttttactttgattttatatgtttctcgtttagttttcctctcaatcgatctatatatttagagatatttttacttctatcaatgttttgattcatacggtttcgtcttccttctatgtatccctcaaacatattcttacatttcttaatttgattgttgttatttggccaataaatttcatattgtcttccccagaaaaatgttgatttcggatctgtattataaatcagccgtaaagtgatgtaactcagccgtaacgtgatgtaactcagacgtaacatataatttacacaacctttcgtcttccctgaatgataactcagccgtgacatgtaatttaccgaacctttcgtcttctctaaagcatataactcagtcgtaacatataatttacactcatctttcgtttccccttgaacatataactcacccgtgacatgtaaatttatagatgtcttcccttaaacaaataactcagccgtaatgtaattttaccgaacctttcgtattccctggaacatataactcagtcgtgacatgtaaattgactgaacgtttcgttctcttttaagcatataactaagctgtaatgtaattttatcgaacctttcgtctttcctggaacatataactcagccgtgacatgtaaattgactgaacctttcatcttcccttaagcatataactcagtcgtgacatgtaaatttgtcgcgaaacaataagagatgcaacatttcgtctaactttatcatcgagcgacaacttcacaagtttgtcgtgcgttgtttccgcatctatctgcacaagtctacaccctctttcctcagtgttaaatatgtttttgtgtttctatacccaattcccggaaacaacaattacggaaccggatcaaccatatcaggagaaggatgaaagaaattgaaaaaaataaggaaaacgatgaggaattagaagttccggtgatgtaaaaaactcaggtgaagaagacgagttgaaaaattttggccctatttttttgtcctttgatgatgctctcatggaatgatgacatggaatattacatccgacgtcgttttgaattgatgaggtgacaagtaagccaccaaacgaacatttgataactcagccatcaagcaaatctataagtcagtcgcaacatgaatactattacagtaattaaaaaaggtaagtcagccgtgtaatgtcgtaactcaactaactcagccgtaactgcatgctattatagtaattaatcttttgcacataagtcagccgtaacaaggctgagttatttagtaatcgagctctttacaactgatttataacactcgatcataactcaactgtcacatcatcccataactaagccgtccaaaaatataactcaaccgtgtcgaggtaataagtcagccgttttctcataactcggccataacgttatctgggttatgctataaattcttataactcggacaacattccttaactcagccatacagttacctgagttatcgtataactcaggcaacattttttataaaccagccgtaacgtccggctgagttatactcatactttgccgttttgttattactcatatatttttgtcgtaagtcagccgcaacataccgtaactcagccgtaactgccgctgtatcgtgttacggctgagttcatttaatccacgtcagcaatttctgacgtggcagtggcattccttgtaattacgtttttttcgtaatgtttagtaggagcacgctgggtattaaaaaaaagacgacaatatgacagtaataaaacaaagttctgtctgttattgtaataacacctaatttgtattctatcacagtaaatctctcttcattttttcgtgaaaattgttttcaattttctttatttagtttaatggttgtatttaaatggttttatgaatcatgtatcatataacacttttataatataatattattgatttggtgtttaaaaaaaaaaatggttgcccatttaagctgcccatcgttcttgattaatcatatacagtaaaacctctataaattaataatgttggaactccgaaattttattaatttagagaggtattaatttatcgataaattaatattttaataatttatagagagattttcctaatttggtaactttttaaaagtttctataagatttccttcatatagaaaatatctttctaaaaccagttacaagtaatatataataataatgtatagaaaaaaacaccaaaagttttgatacagtaaaatataaaaactatagtcaaacaaagaacaaatatgaatttaaccaaaaaaatattataaagaatttttttacatataatatatatatatatatatagttgatacatttatataattattaatttatgatattgatgggacaatagatttacatatgactttcaaaaaaattattatcttattaatttatcgatttatgtcattttttacattggtcctaactcgggaccggaagaatttattaatttatagaggttattaatttatagagtattaatttatagatgttatactgtatatgaaagttggccaactttctccatatgattgacacatcatcactttagcatttgccatgtgtctattaaataattaatgtaagctcttcaacttctaatttataggttaatgatatttttattatttaattttatatattatttaattttacatatttaattatactattactaaatttattttaatattacatgattttttaataaaactattttaatagttttctcatacttgaagattttttttgtaatccaaattcaaagtatgagtgtatcatagtcgtgaattacttaatgatttgagtaagtaaaaattatatttaaattaaacaatacaaaaaaattcgaaaaaaccgcggcgtatcgcggatgataaaaaaaagataataaaggtaaataaccacttatagaataaaccagctttcttttttcttctttttgcgaagaataaaccagcttatttaatatttttccatatttttttccttgtcgattttttttatttctttttgccctaaatcgttcgagaaacccaaaatccaatcccttgtctaattcatcgatgcccaaaccaaaattgaaaactttatcctcaagagattaggaaaatctcattcattatgttaaaaatcccttttggggattatatttatcagagaaaaagattcgaattgagtgtcttcatgatttgggcaaagctaatctgatcttgcggagacaacaacaaaaattgtctgttttttttaccaattcgtaacggaaagtgttcaaagttccaatctttggatcctccgagcaaaatctctatcttttcaatggcggatcatcaagaagacgaagatttgaaattggctcttaagatgagtatgcaatacaatcctcctgagccaaaacggagcaaacccattgaagaagaagaaactggatccggatctcaatctggtggtgaatcaccggaggcgaaatctcgtcggttgcagagagagcttatggctgctgctgctgagaagcgtatggttttgtttcctaagagtccttctcctgttaacaaagctagggttttgccaattagtgttgttggtggtgataaggatgaggaagttgtgggatcttgtttggggaaggagttgtctgtggaagagtctgatcagttgttttcgattgtgtttgggaatgaggtttcgaaaagtgttcttgctcaatggactaatcaaggcataaggtatgattcttgaatttggatttgtgttgttctttaaattttgtcattgggtttagtgcattcatatagtagctagggttttgaatttgactgtatatagtttctagagtttaagaagtatatctctttatctaggagagaaggtatggtgttggttgtgaataagtagctgagaattgagaagaaaagatttgtgattgttagttgtggtgatatggttgatgtctagctgtgcgaatgtgtgttggatccgttactgagccgttcaaaccctctaggtagtgatatcgttaatgactagttggcgcggatatgagttggattcgttagaaagccgttaaaaccccgttgggtggtagttaatacagaagctagactaagagtgagggtatcatatggacgtttaaggcattagtttaaattcagctatctgatattggattcttctcaacaccagagcagctagattaagagtgagggtttcttatggccttttgaggcaatagttttatatacgatgtgggattcttctcaacataaaagctagattaagagtgaaagtatcgtatggccttttaagacattagttttattatctgctatccgatatgggatccttctcaacacctaagctagattaagagtgaaagtgtcttatggccttttaaggcattagttttgtatcgcgccctttagatagtgacttacacgttgctgatagtcaactgacttgcattcttgttgggctctccccactgagccttttctcaatctagtcttctctatctttagctcctttccatccccttgttgcttgttgggaatcttttaatttcctgttagttaaatgaattgatagggtaaagagtcaaggaggaaatatttacatacatagaaattgtagaaaaagcatagaaattttccccacacggaaagcttcatgcagttggcaaagcttcctaacaagagatgaacgctcttatccctcggaagctatccgattatcaccctcttgttccctattgataataaacacaaccattatccctaattttttcgaaattatagataccaaatcagtcatatgtcagttaatatccagcaaatatttgctgcagatctatcatatcagattgatcttttctggagaatatgtttccatgaaaggcaattaaattttgatggctatacctgtaaacacgctctaattgcttatgattctttcttccttcagctctaatttcaaaaatcaaatcagatttgcatagtctccgaaaatgtttggttattccagacattttgttttctcgtaggtatattgatataatagtggaccataatctatttgtatcagacatgtcataatgtaacttatttcttcagtgaaatatggttcctcacgctgcgagtttccatgttttttttgttattgtatcgtatttcataattaacttaatgtgcccactatgtaactaatgttttgactccttatttatagatttagccctgatcctgaaactactataggattagtgcagcatgaaggtgggccctgcggtgttttagcagcactacaagtaattctcttaattttcttgttgtgatctgttcccgggaacattcttacagttgatgctgactgttcctttttctgtgtaggcatttgttcttaaataccttctttactttccgggtgacagagtagcttccccctgtatgggtgtctggacattatctaaagatcgtcatgttgtgtctgactccttctcttctgtaactgaagaagcaaaaacaaagtgatttttctcagaatagttaagactatgatttacttccgaaatttagttatcatgcttagtactcagcatatatcgttgtttgtcccgtattttgcagggcccttgtcagaagtatgtgtgagattctatttatgtgtggagacaacaaccgcgctgtaatagcaagtttcactaattttgaggattccagtagtaatcaaaaagatgaggttagttgaacttgagtagttcttcatatctggtgcaagcattggttttgctgcagtaatatatatgtggtgtccttatcagattccttctaatatattgttgcaggcaatggctggtgggctccccattgaatctgcttcagatttgcagaagatcttaaggttcgagacattcacaactcaagccagtgcccaaaataagctagaaggcacaataactgcttttcaaagtcgcatgggtgctttgctgttcctaatttctgctttactctcccgaggactggtatattgacgcaaccttgatccttattactcttttgtttgttaacatgtgtgcaaggaggcaaacctgaatgatagtaggggattgaacgaatttgaatcctttgatttagtcctgtggttgtgtgggatcctttgattagaaaaatgcttagatgtttaggtcgttgactagtttggggccttgagagccttggggtcaatatgctctaggattgattagtaataaagcaagattttgattcctgatcttaacagaatcattgtggtagataattcatttcatttctctaggtcagctcgatggatctctcctttgtttcttatgtgtctattactgcctaaaatagcgttaatggataattttgtgatgaacaggattcagttcaagccgacagggatgatccaaacctccccctagtaactgcaccatttggacatgcctcccaggtaatagaacaaacacatttcagaatctagactggttaattgtttctcctacttctatcctgtgttttgagttctactgatttttctctatgcctctttttttattaggaaattgtaaacctgctgctgtgtggagaagcggttcctaatgtatttgatggacggatggatcttggaggcggcatgtttctgaaaggcatatctaagaatgtagatgtgggcttcctcacgttgctcgagtctctcaacttctgcaaagtcggtcagaatctcaaatgtcccaaatggccaatatgggttattggcagtgagtctcattacaccgtcttgtttgcacttgacccatccgtccaagaagaaaacgaacttgagctgagagagtctcagataagaagagctttcgatgcaagagaccaaagcggaggaggaggtttcataactgtggaggcctttcaccaagttgctcaggaaacaaacatcagactcccaatcaagaagctcgacgacatctgcgccacgggtttcatcgtgtggagcgagttatggcaagttatcttggaactagaccaaaatttgggagggataaaagatgcaacaggactgatgggaaagaaagtgtttgatatctatcacttcaacggaattgccaagtccgatataaacggtggtggtcaagcaatggctgtggaaggtgggatggttcctatgcaaaggccaaggctgacaaaactaaacgtatcggttcctccaaaatggacaccagaagagtacatgacatgtgcactgccgccgagcagctctgagaaagactcagaagtgaatcagccaaaaccggtccaacatgcaccactggtggattgtatcagaactcggtggtcgcgtgccgcttgtagctggtctggagatcctccaagtatagtctgaagaatgttgtattatgagaaagcttgagcgtttattctggctcattggattctaaagaaagaaaacggaaactgctgatctgatttggcggttaacacgcgtctgaactttctttgcgttgtccgtttttttcatgttgtgtattgatgtagaatttttgttatctattattgaacattattgagacaaatgaatatttcaattgttggataaaattgctttcaataacattgatcatattctgatttaagactaaggtcttgaaatggctaagaaactatggtttcatcccaatacttaaacaattacatataaattttactttttgatcatgtatatttacttttgttattatatcgcggtacagcatgcaccacaatagtagatagtattttatgtttggtaaacatcttttaatggatttggttatacgcacttctacaacatatccaccttcttaattttttttataataaaaaaaaagtgtttccaaacaattgctgcttatttccattcaattagatcaaaacactatttttttcatttgctagcaatcaaagtcactatttatagataagggtaggaataatatcaatgtttttaaacatcatccagaaggcaaactggactaccttccggaccatcgagtcgaaccgcaaatcaattgatatttttatattatgtatttatagagattatatagttttataaatgaaaaataaaaatgagtgtgtcatgtttaacaaaaaaattgaaatctaacgagaacagtaatgtaatcaaaaattttaaatccaactaaaagttaaaaatatatattaaaataataaaaaatcaccaatgataaaaataaactaataaagaaaaaagactctccacatctgtttgtttttatcttgatttagactttgtaaattttttttgttttttttgtgctatgagtctaggaagattggttcagattagtgtatttgtatgtttggggttttcccatttggtttgatcattgtctctggaagtctacatatattcgccggcttaagtttctggaaggtttgaataccttgccggctattgtattccgatcttgtatcaccaatataatctatatttctaatgacaaaaagaaaaaagaaattcttaagagactaaatattcataaaagacgagaaaggtatgttggctcgtatgtggccgcttgaaaagaattgaaaaggttttatacataactgatataaaacaaaactttaaatattttcaaaatcaaatagatttcgtaaacaatcatccaacccgtttaatcggttcaccggatcattgatcatggatcaaatagatttttttttttttttttgggatttcccgttttagaattactgaatattagcagtaatcatgagcggttgttaattgaagttcttgtgtctttatattcgattagttacataattccttcaacttttgatccttgtagacacatgttacaatgtacaaaatataatctgttgaagtaaaccgaaacattattcaatgtgagaaccggataagattattagtattatttatttatatatattgtttttttaaaagtaaataagttggtaaatatcgagaatataggttttcagaccaaacacatcactttggtcctacttagtacttacctgcccctctcgacaaaatttcttttgtactttcacatttctctgtaataaactcggtaggtttgcgaaaacctcgccgccgggaaaaaaaaaaatcaatggaaggaggaggaagaggaccaaatcaaacgattctcagtgaaatagaacatatgcctgaagctccacgtcaacgtatctctcatcaccgtcgagctcgctctgaaaccttcttctccggcgaatcaatcgacgatctcctcttattcgatccttccgatatcgatttctcttctctagacttcctcaacgctccaccaccaccacaacaatcacaacaacaaccgcaagcttctcccatgtccgttgattcggaagaaacctcatcgaacggtgttgttcctcctaattctcttcctccaaaacccgaagctagattcggtcgccatgttcgtagcttctcggttgattccgatttcttcgatgatttgggtgttactgaggagaagtttatagctacaagttcaggagagaagaagaaagggaatcatcatcatagcaggagtaattctatggatggagagatgagttcggcgtcgtttaatatcgaatcgattttagcttctgtgagtggtaaagatagtgggaagaagaatatgggtatgggtggtgatagacttgctgagcttgctttgcttgatcctaaaagagctaaaaggtatataatttagtgttgttttttacttaaagcttgtaacttttttgtgatttgattgaggtttgaaatagtgttttgtgatgggtttttgataggattttagcgaatagacaatctgcggcgaggtcgaaagagaggaagattaggtatactggtgagttagagaggaaggttcagacacttcagaatgaagctactacattgtctgctcaagtcactatgttacaggtaatgttttgtattactttgtcattgtgtttatgcaattggtgtgactagtgaaggttggtgagtagattactaaatatctttaaagctttgtgttttacgaagctgatgtgattagtgaagattactctaaggaactatttctgatatcttgatttgagcttggcagcttgtaagcttgtattgttgcttagtgtgtttaagattgcttcttggtgtatagagaggacatgtgtttgctactaggaacaagtatagatgcagtgttataagatatgttattctcatgttaatttagctgattaatcaacatgtgagatatgtcaatagtgtaatgtatacacttgcaagagtgtaagttttgtttccactttagtgataaaagcaacataggagtaagataaaatgattcatgtctcttgcatctctaatctgtgctttttcttatattgtgtagagaggaacatcagagctgaacactgaaaataaacacctcaaaatgcggcttcaagctttagagcaacaagctgaacttagggatggtaaagccattttctttttcattgggtcgttctcaatatgtaaaccaaagtcctcattacgatatatattgttcggtgtaattttcagctttgaatgaagcgctgcgggatgaactgaaccgacttaaggtggtagctggagaaattcctcaggggaatggaaattcttacaaccgtgctcaattctcatctcagcaatcggcaatgaatcagtttgggaacaaaacgaaccaacagatgagtacaaacgggcagccatcgctcccaagctacatggatttcaccaagagaggctgagttcgtgtcacctatatatgtttgctgagttataaatacgttatattcatttcgggctgcaatatttgatgtatgtaaaaagtatgtatgtatccatgtataatggcttttgtgttgttagcgtctatgcagatatgttcatggcgacatcggtctatctttacaagtagtatccattgtaatatactacccaaaaatctttatagtaagcacttttcctaggcattaagcaccgatcatcaaacacgcagctaaatcagcggcttaaggcacatacttgctgttacgataatgctaaaactcggtaaacgattgcgaacgacgaagtgaaggttgatcatgctccagattgagctacaaattgtaaacactgtttgaaaccttaacttgtaaataagagaaactgacaaaattttacgatgattgaaaccaagttcaggaatacagtgatgaggaatttaaactagatgtggcttactagaaaacaacaataccaacaaatgagaaatggtgccgtcacttgtgagctggacagatgcagttgttggttcctacctccgatgcaaggcaaggaggctgagatccatcctcgtaccagatcaatctgtgtttgacaaggtctttcaggaaattatcaagcttctcgattgtaacacttggcataaccaccacatgagctatatcaccttggcaagcaagctgccaccttctaacaaactcttcatctttaggccgttcaaagaccacagtgctgctaagctcattaagcatggcgctaatcccagcttcacgaagtcggtctttgaggtaatgcgcgtttctcaagcatttctgaacttctttctggaatcctttgtaacctttcctgtttaaggtgtaccagaggaacaaaggagcatgcccgttacgacttcccatgattgttgcatcccttgaagcaaggtactcaacgttactggagaggactttgatatgttccattcttgttatctgaacaccacatggcattggacacccgacaaatttgtggcccgatacactcacactccctatcggtttattaaacgtcactttcggtgcctacagaggagataaaacaacaaatctcagagcagaacaaagattatcataacgatttcgcttagactgaagactatacacttacacgtttgacaaaaggcatcataagtccaaacaaagctccatcacaatgaatatagaacctatcatgtgagaaaccacactcttcaagagttttgataacaaggtcaagatcatcaacagctcctttaaccgtcgttcctaaagaaaacaagatttcaaccattagcaccaatcctaacacaacaaacaaagccaaagtactaaaacataaaccaacctatgttaacattaagaatcgccggtttatctttattagccaacaacttcttcctcaaatcatcacaatcaatctcccctgacataagcgtatcaaccttctcacactccattcgatacattcgagcagctttaaacaccgagtaatgcgattcacgcgacgcatacaatatcccatccggaaacatctccctcctacaaacacacatcaaatcaaacaccgttttttttcggtttttcgaatgaatcaaaacaccgatgattttcgaaaaacgtacccgactaaaatgccatgaaggttgccttcagtaccacaattggtaatgtaaccccaataatcatctctctcaatctcccaaagacgagcaaaccaatccaacacaccaacttcaaaaggtcttgagtgtacaccatagttactttcaataaacggatctccaagattattaatcgaaaaatgttgtaactgaccaagcgcaccatagtcgaaatccaagttataaggataacctacaccagattccgattcagattccgattccgattcaaaaaaaaagatcagatcagatcaaattttacctaaatggtttttggttcgttcaaccaaagttttccggtaacgagcaagaacactagccatataagcttctttatctccggtgaattcatcgttaacctccggttccgttacagcgagtgacgttgtgtgtatattcctaccgagaaccatctctctttctcctcctcctcctcctttatcagctccgattccattagttaccggaggaggtaacggttcggtgactacggcggttggatcgaagtcgtcagataagatgtcgagtttttcgattaaggtggccattgaaagagtttgatcagattccaaagatccaaccattgttgttttaaaggaatctgtagatctgagtgattggaggagaagcggtgaaaatggtgggacaaagagagagacacacagaaaacgagagcgacgcttcgtcgttgatttgatttatatagaagaggcaaaatttgattctctttttggtttttgccctttcgtagtcacttgtgtgtgttgttgttgttgttcgtgagatttttatatttttctttttttataataatgttttttaaaggtagtcatgagatttgatttatttctttatgtaaataaattaaaaggttaccaacttgccatgagattcatacatgattatttttttaattaattactaaaactaaatcgagaagagttttttgtttaacaataattaaaactttggtccaaatttcaaaactagtgatttgaaattaatgtacgtttagtttgattagatatgaacgtttaggattttagtttatggtaacaacaaaaaaaaaaaaaaaaaattgaataacgaaaaacattttatatttcttaataaaaattatattaatcgatataattacactatgcaatatttttttatctccaatttgaagagttttatgaatctttgagaaagttttaaacttgaactttagatttcattcatttcccttaaggtttcatgcggcttacattttggtatttatataagagacattataagcttctaaatcataggtaactctccagatttcttcatcctgtagtctctaagtcatcaagggctgagaattgattagcaagctgtatcttctccttacaagctttcgtcacctctgttctgtttcttttgtctttaagcgagagtggagaagaccgttgcacagtgcacgacgatgtttctgttttggccttaagtgttctgtggcccaattcatttgtttctgtcgcaggcccaactgatgaagttgacaaaatgctgtcgttttgaagaggttgtctgatactccccctcaaacgcggtgtgggtggcaaatccacgtcaagtttgaacctgagatcacataaagctttaaatgacaatgacttggtgaacatatcaactatctgttggtgagcaggaatgtgtttgacaaccaaagaccccaaagcaactctttcacgaacatagtggtaatcaaattcaaagtgtttgcttcggacatgaaacacatgatttgctgttaagtagacagaagaaaggttgtcaccataaagctcaggcgtaacggtaagaggtatccctaactctcggagaacatgacaaatccaagtcatttcttgagcagtttctgaaagtgatctgttctctgcttcagtagagctgcgagagacagtcggctgcttcttagaagaccaggaaatgaggttagtgccaaggaacgtacaatagcctcctgtagagcgacaagtttctttacagccacccaatcactgtcagtgtaagcttgaagattgaaatcagactccgtttcaggctccttttcattgtaagcacgaagctgaaagtcagagtttttggagaagtgaattcccatggctagagtacccttgacatatcgaaggatccgtttaagaaggttgtaatctgaaactgtaggttgatgcatctttagacacacatagttgacagagaactgaagatccggtcttatcaaggtcaaatactgcagtttccctacaagacttcgaaaataagtaggactagagaaaagttcttcttgatgaggaaccttgttgagttgaagtggcagaggagtaggcattggggagcagtcctccattgctgcaatagtgagaagatcctcagcatacttttgttgagagaggaacaaaccattttcatggaaatgagcttgtattcccaggaaatagtgcatttgcccgagatctttcatccggaagtgaatgttcaaatcctctagaagtttagccaatgttgcagagctgtttcctgtcaacaccatgtcatcaacatagagaagcaaaagtataagatcattccctttgatatagatgaataaagagagatctttaacactgcaactaaaaccaaactcaagcagatagttgctgaatttatcaaaccaagcacgaggagcctgcttgagaccatataacgctttgtgtagatgacagacatgagtgggtttgttcttgtccacaaagccagcaggttgaagcatgtacacagtctctgtaagatctccatgcagaaacgcatttttaacatccatttgtttcacatcccaacccatgactgtagcaacatgaagcaccattcaaactgttgcagatcttaccacaggactataagtctccaagtaatcgataccctcttcttgatcaaaaccttttgcaaccaaacgagcttttagcttgtctaaggatccatctgcattcagtttggtctggaatacccatttactgccaagtacattcatatctggagtgtaagggactagactccatgtttgtgcctcttgacagttgtcatactcttcatgcattgcagcagtccaccccggatgtttaagagcttctgtaacagtcttaggctctgcattcttgactttatgtgtaagaagtccataccggggattaggcttgatgatgcctttctttgatcttgttaccatcggatgtgtagactgagttgcaggagctgctggcatggtagagctagtttctgactcagaaacaactggtacacttggtgaggatgctgtagagcttgaagcagaagaagtatcagtgtgattcgtcctgttactaagcaaagaagagttgttgcctataggtaagagatcagtgctctccgtacactcagaactcttttcactagcaacagtggacaacactaaagagttcttcactgaagacaatggaggaaaatcagtagcagggaacaaaggtgtggtacttgatcggatttcactgcaaacaaacggagaagcctgtgtgcctgcaacacttaaagaagaaggtctatttgaagagtcatcagatggagctgtttgtttcggcatgaagctttgctgccaagatgaatctttgagaaagctttaaacttgaactttagatttcattcattttctttaaggtttcatgcggcttacattttggtatttatataagagacattataagcttctaaaccctaggtaactctccagatgtcttcatcctgtagtctctaagccatcaagggctgagaattgattagcaagctctatcttctccgttcaagctttcgtcacctctgttctgtttcttttgtccttaagcgagagtgcagaagaccgttgcacagtgcacgacgacgtttctgttttgggcttaagtgttctgtggcccagttcatttgtttctgtcgcaggcccaactgatgaagctgacaaaatgctgtcgttttaaagaggttgtctgatacaattttcgttataaaaaacgtgtgtaaatgtagcatttgatgtgtacaagaattgagtgtgaaaccttttttgccctttcgtagttacttgtgtgtgtcgttgttgttgctcgtgagatttttatatttttctcttataataatgttttttaaaggttatcatttttttaatatacagaaattaaaaaattaccaacttgccatgagattcatacatgattttttttaattaattactaaactaaatcgagaagattattttgtttaacaatgattaaaacttggtccaaatttcaaaactagtgatttctttcggaatatagcatgatgaggaatatagaaactaatgtacgtttagtttgaatatgaacgtttaggatcttagtttatactttaaagtaacaacccaaaaaaaaattaaagaaaaattgtaaaacgaaaacatgttatatttcttaaataaaattatagtaatatatacaaaaatgacaatttggggacttgaagtcgggttagtatggggcagttgttgctggaaaaccatttgagctaactgaattacaatgtttagtagtagcttgtataatatttaaaagagttagtatgggacacttgccccacctgcctccaacgtgggtccgccactggttatgtatgatgactaaattatattctgtttaatgaattattatttagacaatagatttactagagataatgagacacccaagttagatatattttttatgaaaaaaacttagatatatttttctctatatcagaaatcgtttaaaaaataaagcaaaaaactaaatttattttaaccaatcatcattgtttctatttttactttacttgctttataaaaagactaatcatttgtttggttgttttataggtgaataatgttttttgtttacagttgaaacaaatgaaatcgaacactgttctacacattgtggaaaaaaataatttattaactcgttaagaagtcaatggttcaagaagcccatgatgagactatggtccgaatgatacccgcgatttttgttgtatggggaaagcgttatttcagtgcggtacagttcaactgcgatacgtgcaagaggaatataggtagtgattggcgacaacaaaaaaacggtattaaaaaaaaattactttgaaaaccgcattgggtaccaatcagcaataaaactacatagtacatttttccaaaaaaaaataataatataaaaagactgcagatttcaaagataaataatgcaaggaacgcttatcaaaacgcaatagcctctaatatccaacggtttctgaatttccgcaatagacaatatatatatatatttatttttttctagtttcacttgctaagtatatcagtagaatctgttggagaaaacacagatacacaagcaaatcgaaactgtgatacattacttttttaaatctttttttttataaaaccttaaaatgaaaacaaatttttttttaaagaaaaagtttgatatcagaaatctttgaaaatgcaagtcttctgtatcatcgacttcagagtttggtccggtgaaattagaccttcctaaatatttctaaaaggtaattagttgtatgtaacttctttttaatattttgtaatgacacaccactatatttagtgtcttatacatactccaattattctcttttattcataagttcacgagttttattaaaagaacaatttatcaataatttgactaaaacatgcttatacaactaatagattaaaactaaattcttgtaaaatctcataataccaattacataaaaacatttgttatatcttggagtactttatgtcatccataattgaaagtagtaatctaatttaatatttatcaatcaaaaattttaaatgtaaatcttactgtagtaataagttatgtgttgtatttaaatagataaatataattgacatatatagtattttaatatatgtgtatgttgcatagtaagtatttttaatttcattttgaaacgaatttgttattacaaaattatttagtgtcaaagttaaattaattaaaagattgtttttcacattcttatttggtgtcttataaacacaattagtattatctcttatttatatattaatagattaataaaacaattataataggttatgtattttaataggttaagtattttaatttataataggttatgtatataataatttataatagattatgtattttaataatttataaatagataaatataatcattatctacagaaagtttgtaataaaaatatattctaatgatagtttattcaaaatcttaatgttaattattttcataagtttaatttaatattatttacaaaacatttattagtttattcataaaacttttattctaatagatatataacaaatatttatatacttgtttttataatggaaaattatacaaaaccttcattatttggttttgcaactgcaaagtttattttttggtagtgtatagactagcttagtttgtcaaataaaattaatgatctatatcgtactcttatatataaaagtgttgttgtaatatgtataaagttataaaaaaagaagagaaattgttactacaagactaaaaatacgagacatacgtatgtaataatttattttctaattcataaattgttggattttattgaatgtagaatgacgtccaatcgtcgatggaacacaaacccttccagatgaacatattcaactcatcccactgaaatttctactcctcccacagaaacaacaatacgggtaaatttagtaatatatatatatatatatatattaaaaatttacttaaattcgatagaataaataacattgtattcacgaaatttgtagaacaaagacaagtacaaatggacgtacattcatgaaataacattaattcagttgttcgacgaagcaattgccatgaataattatactctcaagaatcctactgctatcggtagagagtatatggttgaaaagttcaatatagcattcaacatgaatataagttatagtttttttcaaaaacaagcttgatgaattcaaaaaaagttacaagagatggaaagcttttacgcacaaaacatgcatcacagttgatcttgatacatctttcataaatgcaactgacgcatgttggactgaacaagagtttgtaagtacatcaaatctttgtattaatcaattatgtttcaaaattttggtatcacgtatctaattgattttaaaattacagggatgcaaattaacaaaaagcttgaacggaaaatcgcctgagttttgagacgtgatgcaacgatgtctcgtattacatgatgttcaatcacaatctcaacattctgctcgtcaaagaagagaacaattgatccacgagcatggagttgatgaagaaggtgaagattactcagacagtgatagtggtaacatgccagaagccgaggttcctgaaacgcaagaagaagaagaagtgtatcgtgttaccattgatgatgatgaagtattccaacattctgctgctagaaggcaacaatgaggtaggccaaattcgcagtcaaccgctagacgtggaagtagtgcacaaagatctggaggaagctcactagtttctataggaagtggttcacgaagaagtcatagacgacaatcctttgaaacaacaatacaagacagcatcactggcttcagagaattccaacgacaaagttttcaacaacttcgtcctggtgcttttgatcaagatgattacgatgaatttaaaaaggcggaagcgatatttatcgcgctaaatcttcctaagcacactagatttcattgggcatgcattaatgcacttaaggagctagtattttggcgtaagtatttgattgatataactgcaagcaccgacgaggataaggtccaactgttagaagctatgactggtgtttcacgtaacaaccaagatgtgccaaaacagttaggttcaagccattcatttgggagtccacattcaggaggtatatcatctggaagtccatcctctgtgggtaattgggaggcaaaattcacccagtttttggggtcccatttatccatagtgggaaacaccaccaaacgttgcacaatggaaaacaccaccaaatgcacagtgggacacgccaccaaatgttccacagtggggatcatcaccaaaggctccacaatggcggcaaacagaaaaattttaacaaggtggttcaagcggaacgactccaacaaatgttcaatatggattttcagttggaagtcaaggagattgtgtaacaactgaaactccaccgatcattcaacaaacatcatcatctggtctcggtttcacaaattattttgaaactggacaaataccacaaacacctagaccaggaggtctttttaatatttggggaactgcgcaaggatccaatgcaagtcatcacaatgatgtaggagatgaagattagtttgtgttatttgtggtttatcaatctcatttatgttttgaaatgatttatgtattttttttagtttaaggttgaattttatttaatttatgtttgtaaaataatctatgtctaatgcaagaaattgtttgtattgaatttcaggcatttcgtatatgtcagttgcgatcacaagaccttacgaagaaagaattgaactgtggaatttggaaaataaacaatttgaagagttagtgattcaaccagcgttgaattattatgaccgatattttcaaagagcaccagtccaaattgatagaggtttgggatggagaaatatatggcgtcgactacagcaagatgctgctgcttgtcttcagttattacggatgtcacttccatgtttcacaacattgtgtaatatgttgcaaacaaattatgatcttcagcctacattgaatataagtattgaagaaagtgttgcgatgtttctacggatatgtgggcacaatgaagtttatagagatgttggtttaagatttggacgaaatcaagaaactgtgcaaagaaaatttagagaagttcttacggcaactgaattattagcatgtgattatattagaactccgacaagacaagaactttatcgaattcctgaaagacttcaggtagaccaaagatattggccatattttagtggattcgttggagctatggatggtactcatgtatgcgtaaaagtaaagcctgacttacagggaatgtattggaatcgacacgataatgcatcattgaacatcatggcaatatgtgatttgaagatgttattcacatatatttggaatggagcaccaggttcatgctacgatacagctgttctgcaaatagcacaacaaagtgattccgagtttcctttgcctccgtcagagaagtattatctggttgattctggctacccaaacaaacaaggacttctagctccttatagatcgtcacgaaatcgagttgtgagatatcatatgtctcaattctattatggtcctcgtcctcgaaacaaacatgaattgttcaaccaatgtcacacatctttacgttctgttatcgagagaacttttagaatttggaaaaacaaaatggaggattctttctgattttctaagatataatgttcatgttaaaaaaagagtggtaatggctacaatgggattacataattttatcagaatttcaaacttctcagatgcagattttgcagatgtaatgacagagacaaatataaacaacagagattttgattatgatttagatgataaagaagcaacagagattacagatggagaacatataacgcagataggagataatgttgcaaatatgttatgggaaaatcaaagtaatagataaaaaaattttttattgatttttacgatgaaattagtcaacgcatgtaacgatacgtatgttacaaaattaaatttatatttttataaatttttgtattagtgttttataaatatctgttattgtttatttattaacacaaaaaattaattaattattaatatatatatatataatctataatccgcaccgcaagtagttttttcaccaatcaaacattattttgtaccgcttattttgtacaaaccgcacttgtcttgcaaatatatttctccctcacgtaccgcagttgaaccgtactgcactgtaataacgcttttcccgcacaacaaaaaccgcggttaccattcggacccatatatgcgggacaagtgcggtttgtacaaaataagcggtacagaaaaatgtttgctgaaagaacttattgagtatatttatgataacattgaaaatgtgattatgaaacaaattatgaaaaaatatttaaccttcgatcgttaaaatttgatgaacaaacccgtaaaagatgaatgaaaaacaattaacagaatatagctaaagtaaatataaagagagaataatacagaaagttttttttttttttcttaccaagtatgagaatccattatataagagagaaaagatgtatatggctacaagaattttttttgtgaaaaagagtgtgagggaaaagagggagagaaatgatgtatatatagaaaaatatatatatatatatatatatatacataatgatttataacattaaaaaaaatcaaaagtacataagtggctattgtccattgcatttttcagttggaccgtagggtaaggacctgacttcattttgaaatgcggtccatgccattttatccctttttttaaatccgcagtttacacttttttttaaataataaaacacagatttctgaaaaggtgttgaacggtgacatatatgcggttttcaataataaaaatatgaaaaacggcaaaacgcttcccccattcacaacctatgactttgaatggtaacaacgttttagagagtgcgggacaagcgggtatagaagcgtggtgcggttttaccagaatgtagttaactaaaacgtagtatgttgaacaagtatggttagtgtggaacaaacagtgcagcataatgtatgaatggtaaaaaacgatatgtggtacaataaaaatatgtgaatggtaaaagccataataatcggtacaaatatattataaatatatatttcgaaaataaaaatagattagtgatattattattatgataaagtaaaagttatggttttgcgtttaattaacgattgttttttatattttattacgaactttaaatataagataatttaaatatttgagtttagaattttattaaaaaaaaaatatttcagaaattaggtgaaacaataattatcaaaacacaagcaaaataatattaacgagtattttgagttttgcacaacatgtctgcaatattgtctcttatttgtttcataagttctccatctgctacatcatttgcttctttgtcatctaactcaggctcccaatctgtattgtttatgaaattgtgtaatctcattgtagtcattaccactctcttttgtatttgaatattatatcttgcgaaatctcaaagaattctccatttcttcaacaaactccaaaagttctcttaatactaaacgtaatgatgcatgacatcgattaaacagttgtttcttatttcttgtaggtagtccggaatagaactgcgacatatgatacctaacacttctacatcttgatgagctgtaaagagccaaaacattttgtctgtttggatagcaagaatcaacgacgtagtacttttctagcggaagcaagggaatatcagaatcacttcattgtgtcattgtaagaacagttgtgtcgtgatatgatcccattgcttcattcaaaatatatgtgaataacatattcaaagatgcattatcgtgtcgattcaaatacatttcttgtaattcaggcttcacttttacacaaacatgagtcccatccatagctccaacaaatccactaaaatatggccaatatctttgatctacttgaagtctttcaggaattcgatgtagatcttgagttattggagttctaatataancncatgnnagtaattcaattgccgtaagaaattccccaaattttctcttccatggtctcctgatttcgtccaaaatgcaaaccaacatctctttatgaacttcgttatgcccacatattcgtaaaaacatagccacacttttctctttgaactttgttgtagaccgtaatttgtttgtagtagaccgcacaatgttgtgaatgctacgagtgacattcgtaataactgaagacaattcataataaccgaaaacaagcagcagcatcttattgtagtcgatggcaaatatttctccattctaatcctccatcggtttgcgctggtactctttggaaatatcgatcatagtaacttaaagttggttggattattaactcctcaaattactcatcaagtttttttttttaaacaaataatttttattcatgttaaatacttggttaaatttctcaaccatgtattctcgaccaagaggcgtaggatctttaaacgtataattattcatggaaattgcatgatcaaacaactaaataaaagttttttcttcttcataagtcaatctatgcttcgatgttctctacaatttttataattttttgtactaattagtttaatatattttcaaaaactatacttaatatgcatatgtaaaaaaaatattttaataaccaaatttacccttgttgtcttttcggtgggaacatttgtgtttttttgcctggaagaatttgtgtcggcctctagacgacatacctacatttaacaacacaatacaatataacattaaactattaaaataatttatcattagattatatatattattggttttttcaatgttaaggtatttattatataaatgtttaagattgctactaccgtatatattatttacttaaattttttgttatatatcttaaaataaaaaatgtaaattggttttaatatttggatatggagagatttttatttttattcttactttaagtaggagtttataataattttatgtaataatacacatatatgtgtattaaaaaaagaaacttacttatgaaaacagatggatcggtgaatgcgtattggatagaaaagttacttgtgcaaatagatagattggttgacacgtacttgatagaggagtgttttttttttgtaagatggtagaggagtatttttaaagtagagaagaatattgtatgatgtattgtgaatagcacatagagaaaaaggtgttatatagtataatttttttagtacttttactttttttttaaaatattgtcaactatctacagtcttaaaacacacctcttccacaacttgtacttttgaagtatggttctacgtgtatcggtgtacaattgtcctgcaaatggtgtgttctttttctctgattttttaattaaaaaaaatagaaaacacatctgtaaatggtgacaaaaaattaaacataccctgcgatttttgaaacgcctcaaacattcagggcctagaacgtaatatccatgcaatttaattaaattcttataagaaatcatactaaaaaaacatgtaaaatagtcgaaatagtacaacctggaaataaatattatgatataatcataaatagaactaaggacatgaaggttagatctgagaatgaacttgaagttgaggataagcttgtatcgaaagatgatttagagccaagaaattcaacaaagcagtaggaggattggttaatcctatttggaaacaatcaaatcacttggaaaattatggagaaggtcttattaaaagtttcatgaacaccacatatttgacaacgaccttgatatcctttaccttgagagccacgattgttggagcgggaatgttgtgtttgattctgctgtcactggttgttgttattaccacgagcagaggagcgattgttacagttgttgttgttattgtaggagactacgttagcggtaaccggagtagaggaacaagggatcatcgcttgaagtttaagctcataattaatgagcttctcgtgtatcatagttaatgaggaacacgtccttcaatttgatcgatgacgcgcttgtagtcatctttgagagaccgcctagtatgtactcgatttgatcttcatgtgggatggcgccataaattagtgccagttgatcaaaactagtagtgaggcctagaacatattcatcaatggaactagatcatttcttccattgtttgatttgttcacggatctgttgcttgtgtccacagctagggttggcataagtgtcaacgattttacgccatatctggacagaggtggtagcttggaacaagagaggttgaaccgcaacagagatagcaccgatgaggctacagtaaatgagtttatcctggcacttccagagtttgtagtccggattgggagaggtaacgccatggacagtgattgtggtggcaggttctttgaccgaaccatctacgtagccgacaaggtcatatgcacccaatagagcatgaacttgaagatgccacaggagaaagtttgttgttgtcagctttgtgacataggacatgttcacattgaggagagaggtggaatcgatgacggcaacaatttctgtggagaaagacatagccggatatgatgacgcttgaagaacaagcttgtagagaaagaaggggatcgagaagaagaagagaggtagaaaagagaggcggcgttttttgtttttaaaaatatttaggtctatatagaatcactgctctgataccatgtaatctgagagtgaattgtcttattatgatgaatgtgttacaacatatatagtacttagtctagggtttacacaactactaatgacaattatatccttaatatatacaacttcttatattccaaacctctttggttttgatagaagcacaagaagatcaacaaataggcatataattcatttgtactcttttttttttcttttctttgattttatcccaatgagttttccaaagaaaagtttaataaagcaaataactcattatgttgattaggctcaagagaaattcgaccattgaagtggaagggtcattttaaacactctactagcctttattacttgattattttcgagatggtcttgtgagtgtctttcaagacttttctcttctttataaacattgcacacaaaaatttcatgtattgagtgatagaatataggaatattctgttacaatcaagtagatactcgtatatattgtttcttgtatcccatattttgttgaacttctatgtaattcctttagctatttaaagtcttgtaaatcaatgaatcccttgagagaattattccactaacatggtattagggcctcatcgcttttgattttttttttcttcgtcttccgcttcatcttctctttcattttctcttcctttctttcttctttcttttttcatcaattaatttcaatagatgcccctgcggcaaatcagacacacgaacgtgcatttggtgttaccaacatcaaatctcacatcccactcatcctcgttctagatgatcataattatgatgtgtggcatgagttgtttcttactcattgcctcacgtttgatgttctggggcatctcgacaacactttgcttccagctgatgctaatgatgtcgcttggtaaaaacgtgactgactggtcaagctttggatctatggcacacttgctccacctctgttccgatcttccttccaaactggtgacgcatcacgttatgtttggatacgagtagagaatcagtttcaaaacaataaagaagtaagagctattcagcttgacaacgagcttcgtacccaggatattggagattgatcgatccaagtttattatcagaagatcaaatcactcgccgatttgcttgccaatgttgatgctccggtcaatgaacgtaacttggtcatgtacttgcttaatggtcttagagaaaagtttgataacataattaatgtaatcaaacacaacgatccttgtccaacttagagaaaagtttgatgctggaactgtaggagagtcgtctcaaaaagccacaccaccttattgcaacccacaacgatcattcttcatcaaccacagctctcaccattgctcttgcaccgccagcgctttgttcatcaaatcaacaccaacagtccaataacaacaagggcaacaaaagcaacaacaaccactacaaaggtggaggtcccaacaacaacaactcacaattccaacccacattctcaaattgtgccacccctccatttttgcaagacccatttccagcttggcccgactactttggaaattggtctccttatcaacaaagctcatttcgaccaccgactccgtcgtcttcaccacatcaacaggttcaacaagcgcatctaatggaaattcaacctagatcacaaatgacggagacactgacggatcctaattgggattcttgggtcttggattccggttcaacggctcatctgtcttcttcgccaggtaatctccactctattcttaatcatagcaacactcaatcagtaatagtgggtaatggttccaatattccagtaaattgtgttggctcttcctctgttaaaagcctttcgagatcacttactctcaaaaacgtccttgtcactcctcaaattgtcaaaaatctcaattctgttagacaattcacaaaagataattggtgtactgttgagtttgacccatttggattttctgtgaaggaccttcaaactcagatgatactgctttgatgtgatagccaaggtgatctttattgtctcccatccttgttcaataaaacatctccaccatcaactgctctcttggcttctactccatctctttggcataaacgcttggctcatacaattaatactattctccgttctgttgtttcaaactctttggttcaatgtaatacagacaaacttccatcttcttgtgaaccttgttatttggtaaaacaaataaagttaccatttccttcttctcaatccaatgttaccaaactgtttgaaattgtgcattcatatatttggaccttgccggtttcaagcataagtgggattaagtattatgtcttattcttagatgaattcactcataatctacgggtttacccaatccgcagaaagagtgacgtttattctaagttccttcacttcaccactttaatcaaaactcaattcgacggtcaaattcaatcttttcaatgtgacaatgactgagaatacaataacaaccaattccatgaattttttgataaaactggaatcaaggttcgtttctcaagcccacatacctcccaaccaaatgggaaattctgaaaggatgattagaactattaacaatgctattcgagctatcctatttcaaactcgtctatctccttgttattgggttgaggcactaaatgttgttgtacatatcctaaacatctttccctccatagctttccaaaatcaaattcctcatagcctcttctttcataaaaatccaacctatgatcaccttcgagtttttgggtgcttatgttttccaagcttgaatcattcaaatctgtcaaaactatcaccgaggataacgccttgtctgttccttgggtatccatctcaacaaaagggtatcgatgccttgatttaaaaacaaacaaaattattatttctaggcacgtttactttgatgaggatacgttccccgcagctaatcaaaatttatctcaagtttcttcgtacacattcctagacacagttgatgatccttctccattgttcaaggaaattctccaatcaccactacctcaaaatcaaccaccaccacctcaaactctctctctgtgccacctccgctacctgtgccaaacacatcaaatgtgccttctattccttgttactcaatgaacacaagatcaaaatccgacatcactaaaccaaaaaagattttgtcacttgtcaccacagccaaagcgcctcttcctaaagctcataatcaagctttattggaccctaattagaatccgacaatgactgatgagtatgatgctatgactaaaactaagagttggaatttggtgccacgacctcctcaggtcaatattgttagatcgatgtggcttttcaggcacaaatatgatgcagatggagtgctttcttgacataaagcaaggctggtagcaaactgtaaatcataggaacacggtgttgattttacagagactttcagtccagtagtgaaaccagcaacaatacgtgatgttcttgacgttggagtagcgttaaacttgcccatacaacaactggatgtcaagaatgctttactacaaggtgatctcaatgaaacagtttatatgcatcagcctccaaggttcgtgaacaaggaatttcctaaccaccaaccatgtctgcaaacaagaaaaagccatttatggactcaagcaggccccacgggcatggaattcatggttcaccaaatttttaatgtagcttggtttcatcatgagcaaggcaaacaactctctgttcgtcttcaaacagggcattcaaatggcatatgttctgttttacgttgacgatataatgttgaaagcctcctcaccaagtctcattcagaaaatccttacacaactcaaaggcgagttcccaatgacagacatgggacccttgtgactttatacatacatgcagagttcattgtggattatgttcctttgacaatttctttccggtcactcaagattttgagcctttatcttgtgaaattctcaagcggtgaaatccttgatagctttctctcaggctaccctctcctggaagatctcttagtggttcgaggcagcaatgacaacgtgaaaactttcaatatcgcagttccttcattgcggattttaagcatcatagacttgaactatggttcacatggtctacgagatgatgttgggtttgttatcaaagctccttctatgaactcgttaacgattactacacatttttttggtattcattagtgaaaatgccttacctcttgaaggccgatatcaagcttagacttggtgactctaagaagtttgagggatgtcttatctcagccaaacatgtttccttgtgtttacaacaaccaatggtaatattatgtgcttttgctttcgcgtttgtgataatatattctctttatgattacaaaatagttcgattcacttatgatgtctcttgcaggattcatgtccaataggcgtcttcaatcagctagtgtttctaagtctttgtacatgctctttatactggtgtcgtcttgtactcaaccatacacctaagctccaagttctcagattcgaactaaaacaagcaagatcgcgtgctacgctaacacctcaacagatatgttgcagcaattatgttgatgtccaaactcaatgggagcagcagagtactgttccttaatgtttgatttcgactcttaaagctattgagtggattggttataaaggaattcaagtagagaaaaatgtggtgatgtatttattagagaactctccacagctaaagacaatggccattagatccttgaaatggagcaatgatagtgagaaactcaagatgatgcaagagctgtcgtctatgcagaggacttcaaccaaatatcggctttcgtttacctaaagttctccggcgaatcatatattgaaacagtcgatcgtttacatttttggagcatcattattagttatgtttgtttgataactttacaagttttcaaaaactttgaaaggaatggcttcttataatcaagacactttttctctcttttgtgtgtgtctaaagttattggtgtcattttgtaatcataagaactttaatttttagaatttcacccaaacgaaaatagtgttccactgtataaactttcaataaaatttgatcaccaatcgtgtcagatagtaaaggaaaactcagctcgtgagtcttgttagagtgtagatcagtgtctgatacagagccaattatactctggcttaggcttatctagctttctctcaactttaggaaaatgccaaatatattgtctacagatctaaaaaagaatcgacttagctttaaattaagtaaacatgaattatgtgtttaatatattaaatagatcttccaaaaaaaaattatgtttcaaaaaaaaagaacgaaaaaccagtagtaattgggtgttgttgtactcccaattaccaacggcgtcgtatgatcaagacgttatttttcctttttgttttcgtttttgtttttcttcgtttcttttttgcttctgattaggatttagggtttcccttctgattagaatgtagggttgctctttgactaaaaaaagacgacgaagttagaggttaaacctttctcgttgatttccaatttttctttagtatatatatatatatatatatatatatatatatatatatatatattctcctaagagtcgaggatggtttgattttgccttcttgcttggaaaattgatacggaagatgcttttaaccctttttagttttactcttttatcggcaacaaaatccactaaggcaaacttttgggatattgaagggttcgtttacaatggatatgatcagtttgttgctagatgatgtagtctttaagatattgtcattggttccaaccaaagatgtttttttttttttttcataaatttccattaaaaagaaggattacatggccaaaaagccttacatcaggcttgtaggcccccgaaaggcacgcaagcccaacaactaaaacaaaagcaaagaaactagaacatgcccaaaagcccagcagaaaccaaggagaagaaaaacaggccaaacagggaacggcccaagaaacaaccaaggaaggaaacctacaacacaaaaaaccacagaaaacgtcctaggattggaatagagagaaccaagtcctcagaacagaaggcgcagaaggatgaagttctgtaatgcgagagataggatccaatcgagcacgaatagtaagctggatgtccttcaggaccgaatcaaagacgcgagcgactccggtgtgaagacacagattcctttcacgccaaatagcataaacataagcctgaaaagctagcctgataatgagagtagtgttcttatccctcgagggattgagaagccagattagacaatacatgagctgcgcaggaggaaatagattagccctacccgtgaagaaccgccacacggctccacagaaaggacactcaaagaagagatgagctctggactcatcatgagagttacaaaggagacaaactgcaggaatcgagagcccccagctccgtaatcgatcccgagtgtgcagtctattccaagccacgacccaacaaatgaaagcatgttttggaacatgattcttaaaccagaccgccttataccaagggacaatgtgattctgcgggtggagagcaagcgaagtcttcgctgtagagaaaatgttcgaaggagcatgaaggtccgttttccagataaatgagtcgtcatgctgacaatcaatcaatccctccgcgactggaagaagattttgaagctgattgatgatcgggcttctactgcgactagattcgatccatcaggacctgttccttaacgcatctctaaccacagcatcaataggcagacccaccgtttgcggccctaacggaccaactaaatcaataagaggaccgtgtccagtccaattgtcatgccaaaacttcgcagtgaccccagacccaacatcacaaacaacaaaaggcctagccacttctctgagcttacacaacctcctccaaatccagctgtctgaagttgtagagttaagagtccaaaaattcctctgaccaagaaaattttcgactagctccgaagccaaaaggacgttttcacataagaggcgacccttaatgaaacccacctgattcccttgcaccacatcagggataaacatcttgagtctcttagaaatgaggcgagtaattgatacaagtgttttcagtgtgtcaattccctaaatgcatcttatgtcattgcagcatttaaggtgtcaatccaaatgggtgtaattgctatcaatcaggatatgatcagagaatactaagtcaagccaagtgtgaataggtttggtgtgtttctactaaacctaagcaacaagttaacatgcaaatcaaattcaggaataaaactatactaagcagaagataaaggactcaaatgacaagaacagaaagtaaaccaagcactaggtaaagcactcggtcgagcaaacgagtaagaaggtcgagtacaatactaaaaacaccaattttgcacgaaacgaacagagtactaaaaacacgagttttgcacgaataaactaaacaaagctcttaagaatggggtaattggtcttagtggactcctcaatccattaggtaactaacaaactcaatcaagttatccctagacaatagattcaaaaccaaatcaagccacttccgtgtgaatgattctcataactttagaacttcctaatctcaatttccattgatgaaacataataaagcaggctttaaacaccaatctattaaagtcaataagcagtctaaacatccaatgccttgggctagaatctacaaatctctgaaattagttggttcagacatttcatcaaacaccttttggatggagaaagtctgaaatcaattttcaattgatcagaaagaaaatagcattaagaactcctaaaacagaagggaatcatgcatataatcacttagctagctaaagaagagaggaatccacctaaacctaacccatcctcaagaactttgaagaacactactcaagaacactgaagaacatcatagaacaaaacccagaaaattcataaaacccagaaatcattataaacttagcaaaagatagatctcaatgagataaacaagtttgcagaagaaatcaaatccaaattctcaacacaacaaccagaaaatgcaaaagaaaatcaaagaaccctaatatccagcggacaaagctcagatattttgggcaaaaacataagaggtctatttataggcaatcctaggttgccctaattgggaataagacaaaatagataagtcggcgcaggagcgttcggccctaggccgagtagaaaagccgagtggcttggtcttggtcatacagctcggccctaggccgagtggcttggtcgagtggcttctcttcatccttaagtgcacaactcggcctccagccgagtgccttggtcgagtaggctccttgttcttcacgtgtgctccactcggcctccaaccgagtacataggccgagtatacttcaaatccttccttaggtcccccgaactcgagtctgtccatcccttgtgctagaaacctccaagttgagtccaaaagtacctaattcatctgcaaaacactccaaatgcaagtatgctatgcaatgcaatgcaaaatgtgcaaaagaaggaaaagagactaagaatgcataaaaagagacttgaaactaaactaaatgcatgaaaaacaagggcttaaaaaggttaaaatctagtgttatcaacacccccaaacttagctctttgcttgtcctcaagcaacaatagaactaggctaggagtgaggtttgaaggtggggattcagaaccaaaatatgcatgtaaaatagatagtctcaatgtccatgttgctagttctagagtgctaggttgaatgatctctacttaaaaactttagccatcttcttcacaacacaacctaatctttcacttagtctattcaagcattcaaatcagcatattccctttaacattcattaagcaagaaccatggatcatactatacaatgcatactaaactcatttggctaagggcaaagggtcaagagacaaaaatggtctcttaaagaataggctttagtaacaaggaatctctcaagaatgattaagctttagtagaatgctaaaggtaagtcccaagttatgcatacaaagataagatctcatctacccaaagtataatcaatgaagacctaatggcaatcccctctcccatcctaattaagaacttgactctacccttttgcattcataatcttttgaactctttcttaacccattcttttctttttttcttaactctaggagaagcttttcttttctctttgatacttctagcgggtttggctttctttagtactaaggttctgtttttgatctctattaagcttagggctttttacccttctttattagctaacaataacccaatctctttctttaacaatctcaaaccctttactagactttttctaacttctttagcttacttctcctagaattcttttcccttttcttgtaaacaatgaactcaaccctttttctattttaaactcttcacaacccatagaacaagtacccacctagtcctatctagtccggataacgcgaactagaactacatgagatactatctttgtcgttacaaacctaacactttctaccaagcttaatcgaaaatagacctcacaaacactcacaagtgatatatggcttgaaagaaggcttaggttagggtatggggaaactgctctaaaggtgagagacagctatttggatcaacaagagtggtgaaacgaataagaagatccaaatattttaagggtgaccatgagtttaacaaacaatgcatagtatgataattaaaagtcaaattatggttcaaattaatagggaatagcttcaaatcacagcaagtttcgactaaggaaagatcaaatatatgaattcaaaagatggtgcggttttacttcaagatcaatcggttaagcactagacaactaacaacaagggcattgaaactatctagtgaacattgcaaatttacaaggctatgatcatcattattccctatgcaagtgcaaaatgcaacaacctatatgataacattctaaaaacagtcctattaatgcaaatgcaaactatatgacactctatttttttggaatcattttcgaaaattttcaaatttttatgggttttctatgccttagatgatgcaaaatttgaataagaaaacatgaaacaatgttagatacatcttgaaccctccccctaacttaaattacacagtcccttgtgtaataaaaattcaaagaagaattcaagagaaataaccacacaaagcaagaaataaaagaaatgcaatgatatatacagtgaaatggagtgatacctcaacatttaaacgaagaggttctggacaaactcgtccaggcggtcttgtgtgtactcaggatcacgtgtggaggtgttggggttgttggggttgtactcggttgacccgtcgggcatgtagcccgggtagtactcctctcggcttgggttagcgttcagaaccaactggttcactggaccgggaaggcggctgttgaaacggcgatctgagaaggtggagctcctcccgagctcgtagtttgaggctcttggcgggtcgaaacgagcgtcccttcgcggtgccacactcgttgagttacttctcctgaactcgggtcgaggtggtggtgatctctgtcttcgttgcagctcctgaatctgaaccgtcatgccgtccattgctctcttcatctttctcaccttcttcttcaacccactgaacaacttcctctgaaacttgcccaaacctttgagcattcccaacttcttgtgaacttgaccgggatctctctcttgatcggactcagcataatcctcaaagaaaaactgctctgctgcagcttcgcacgaatcttcttgttcatcaaactgttcagcttgactgaactcagcttgttcaaactcggcctggccatactcggcctggccatactcggcctgctgaaagttactcggccgagtataggcttcctgccagcttcttcttcattccactctgctccttcttcttgagactcactccctatgctcggctctgcttgtaggggcgcaaggacattgactaagatcgattgaggaggattaaagtcaatgttgttcccaatcctaatggtggtgaacttcttgcaagggagtgctagcctagagagccctagcgtggagtgcttgaacttgaaatagagttgatccgcttgagcagacctatccaagtagcacttcctcttcaaatactccatatcgatgtaggttgctgtgtgagttggggtatgaagaggaactccaacggctattaggatgggcgtgatcactcctccagcacataagcttcctccatagtcggattggtggattccggctgcatactccctaaaaccaatcaagtgatcaatcaacaccaccgaaagggatgtatcagccctatccccttccatctctatcccattccttgtgcgccccaaaatgaagcataaggtgagatcaagcaacttcagctctccctcattaacatggccggttgtcttcttcgggaagaaagcacttgcaatgcaaaggtggagatacctaagcaccgggctccttatcaacgaactcttggccctagatgacttgtaggggagtggaccggcgattgtcaaccatagatcaaggagctcgtccttgctaaagttttggcggattccatacttggtggggaacttgaaaacaacatccaactgcctaatgggaaccgagtattgaattccaaacaccatgaatgtgatatagccaactcccttatgcagctctctctccctttcttcagcatagaaatgaagcttcaaagtggctaggaattggcagctctcagttttgtacccttcacacttgtaggagaaaaaggtctccagcttggccatctccatgaggttgtcaacatccctacatatccccaaagcttgcatggtagatctatggagatatcttgtcccctcaaaactcagctccatgagatattggtagtgctcttcaatggtaggttctttctttctcctcatggtgttccttcttctccttgtaggaactatcgggacctcttcatcaacttgcgcatcttcctcagatgcttccttctctatctcaggcacttcttcttctgcaactggctcggactccaagaccctcttgcctcttgctattttctcttgagcagccgcagaaagacccatagaggactccggggccatactcggccattgtactcggcctgtcatccgagtaaaaccaggactcgcagcttcctgattctttgactgattcttctcattaatcatctcataccctcttgccacggctcgagcagaggctctccttcttgattcctcgggattcatgatcttgggatgatttactgcaggtagtcaccacaaaataaccaaaggtaggtcaaagtagaagagaaattgatgtttaagaatgaacaaaggttgcaagagaggttttgaaaaggtttgtaacaagagattttggtaaaatttctgagaaatctagagaagtgggagtaagaacttgaaatgtttggagagaaggagtaaaattcgaaatttttgagcaaagagagagtgtgagtgacttagcttgttgagtgtggttttatagacaagaagatttgatcctagccctccaaacaccttagatccgcacccttcatttggtcaaggggacatgtctcactatttgcagaagaatctttgaagggctttggggagcaggatttgattggtggggccgagcaaattcgaattcaaatttgaatttgaattgtgttaacctcgcacgtgtgaactcggccgacatactcgacgcgcgtgtcgagtacagtgttgggcctgatgggcttctttttctgactcggcttcgggccgagtgctgcatcttgttgggcctttgaacagtgaggcccatactcgaccttgggccgagtggtgtggtccgagtactattcaatcttgggcctttggtcgattgaagcccacactcggcctacagccgagtagtacggtcgagtgtgacctgaaattctccagaagtctttttccctgaaacacttaaacaaaaacatcaaaaataacaagaaagcaatatatacaaggatagacatgggatttcctcccaagtgagcttgtttaaagtccttaagcttgactctcacaatgtttaggtagagaagagattgaggagaggaactgagaagtcctcatcctcacttgctgaatcctcaaagtctgaatcatactccgcattttctcttgatagctggagtgtggagtactcatttgatctttcctcaaagtaagcctccttctcatcagtactatagtcctcttttccaagatcggggttcctcaaagtattcatcaatctcaggacctgggtaacctttaatcatctccttaagctccaggatagcgtagttcagctcctccatcttgaggtccaacttttccatggtctctccttgagctccatactgtttcctgagctccataagctctctagcaataggaccaacatcaaaatggttccccttagtctcaacctctaagctaggtcctccttctatcataagaagctcctcgggctctcctaggtggtgagtcggaatggagtacggaataggattttctaacccactcaacaactcagcatctaaatttccttcttcaatgaagaaaagctgcccttctatagtgggcttcttcatcttcttagcaatgtcaaagctcatatggagattcttaccaaggttcaagtcgatcttacccatttgcacatcgataagagcgcccgcagttgctaaaaatggtctcccaagaatgagagggtctttcggttcctcatccatctctagaaccacaaagtcggttggaatctcaatcgatccgatctttaccggtaagtcttctagcatcccatgaggcactctcactgatctatcagctagaataagatgaatgctgctaggcttgaacttattaaatcacaatctctttgcaacagacaaaggcatcaaactaactgaagctcccaaatcacaaagactattgttgaacactaagggtcctagtgaacaaggtagagtaaaggaacctggatcacctagcttctttggtatcaccttcctttgaatgatagcgctgcactcaaaactcaattcaactatttgctgagcttcttggggtctttccatgattacttccttgggagtatcaaccaaaggtatcttctcttctaactctttgatacactttatgaacatcatcttgtgtttctggaagatccttgcattaacttgtgcaatcctttctggaaagtatggtttaggttcataggcaggtggaatacggattgggttgctcgggtcatatgctcgttcgacaagccaagcaaagaagtcgagttcaatctcctgtcttgatcttggtctcaaaacctccccttcttgaatcccactgtccgcagtggcagaagtactcactgtggtgatagcatgggcatactcctttggattttgaacagagtttctaggaagttgtccagggtgcttaggagctgaagtagaagcaatgtgtccttccatggtcttgactctagtgttaagtgcgtctatctttatattcaggtcattataagagcaatcaatcctggtggtgagctcagctagcttcttatccatggtcatggagcatgaggcctgtccttgcacaagctgatgaagtagagtcttcatctctgagtcttgtgctgaagtttgctgtggctgctgggtgaagcctggaggtccaaagttctgcttttggttgtagccttggttatagggtataaagggcttagcttgaggtggttggttctgtggggggtacacttgatcttgtgggtttgccacattgttgcttctgtaagagagattagggtgagggggtttgtagttgttgaatcccttgttgtagccaccttgattttgtaggtagctcacctcctcaatagtaagattctccccttcttggagttgtgtaagctcttcttctgtaatgtagtggacatttctctgttgagcaagcaccaatttgtcaatcttatcattaagagctttgttctccttttgtgcctatcctcagaatcgctactgcctctgttagtgcgatcgtagttctcattgtaattcccatcagattgtgctaggttttcaacaagttcccaaccttcagctacatctttgttgagaaagttaccattggaagttgtgtccaagagcatccggatctttggtaaggcacctcggtatagagtactgagtagggaagccttcttgaatccgtggtgcgggcactgagtgctatatcctttaaaacgctcccatgcctcagcgaatgattccgaattcttctgattgaatcccgagatctcattcctcaatctagccgttcttgagttagagaagaacttggctaggaaagccttcttgcagtcatccaaagtgtctacagaatcaacgggcaaagtcttttcccaaagatgagctttatctcctagtgagaaagggaataacctgagcttgaagctgtcttcactaactccattgatcttggtgagactacagagtctatcaaagttatcaagatggtccaatgggtcctccattggcagtccatgaaacttgttgctttgaatcatggagataagaccactcttgatctcaaagttgttgttctgaataggaggtgggacaataccagctctctgatggtggtttctaggtgcatcaccagcaccaatgttgcctggcaactcattagcattcacctcattagccatcactactgggtttgaagtggcttgttgttccctgagttcacgctgaatcctgtcgatgtcgtctctgtatagcaggagattaccagaaccttgagaacgagtttgcatacgttttgatcttactcggttgatgtactcgacgtgctagtcgagtaggagtacctgcaagacaaaaacaagcaaatgaagaaacaagtgagtaaccagaaagaaagaaatagaacttgatcttaataactcagaaatcctaaatgtaacaagaaaaacacccaaatggcaacggcgccaaattgatacaagtgttttcggtgtgtcaattccctaagtgcatcttatgtcattgcagcatttaagttgtcaatctaaatgggtgtaattgctatcaatcaggatatgatcagagaatactaagtcaagccaagtgtgaataggtttggtgtgtttctacaaaaacctaagcaacaagttaacatgcaaatcaaattcaggaataaaactatactaagcagaagataaaggactcaaatgacaagaacagaaagtaaaccaagcactaggtaaagcactcagtcgagcaaacgagtaagaaggtcgagtccaatactaaaaacaccaattttgcacgaaacgaacagagtactaaaaacacgagttttgcacgaataaactaaacagagctcttaagaatggggtaattggtcttagtggactcctcaatccattagctaactaacaaactcaatcaagctatccctagacaatagattcaaaaccaaatcaagccacttccgtgtgaatgattctcataactttagaacttcttaatctcaatttccattgatgaaacataataaagcaggttttaaacaccaatctattgaagtcaataagcagtctaaacatccaatgccttgggctagaatctacaaatctctaaaattagttggttcagacattttatcaaacaccttttggatggagaaagtctgaaatcaattttcaattgatcagaaagaaaatagcattaagaactcctaaaacagaagggaatcatgcatataatcacttagctagctaaagaagagaggaatccacctaaacctaacccatcctcaagaactctgaagaacactactcaagaacactgaagaacatcatagaacaaaacccagaaaattcataaaacccagaaatcattataaacttagcaaaagatagatctcaattagataaacaagtttgcagaagaaatcaaatccaaattctcaacacaacaaccagaaaatgcaaaagaaaatcaaagaaccctaatatccagcggacaaagctcagatattttgggcaaaaacataagaggtctatttataggcaatcctaggtttccctaattgggaataagacaaaatagataagtcggcgcaggagcgctcggccctaggccgagtagaaaagccgagtggcttggtcttggtcacacagctcggccataggccgagtggcttggtcgagtggcttctcttcatccttaagtgcacaactcggcctccagccgagtgccttggtcgagtaggctccttgttcttcacgtgtgctccactcggcctccaaccgagtacataggccgagtatacttcaaatccttccttaggtcccccgaactcgagtctgtccatcccttgtgctagaaacctccaagttgagtccaaaagtacctaattcatctgcaaaacactccaaatgcaagtatgctatgcaatgcaatgcaaaatgtgcaaaagaaggaaaagagactaagaatgcataaaaagagacttgaaactaaactaaatgcataaaaaacaagggcttaaaaaggttaaaatctagtgttatcaacacccctaaacttagctctttgcttatcctcaagcaacaatagaactaggttaggagtgaggtttgaaggtggggattcagaaccaaaatatgcatgtaaaatagatagtctcaatgtccatgttgctagttctagagtgctaggttgaatgatctctacttaaaaactttagccatcttcttcacaacacaacctaatcttccacttagtctattcaagcattcaaatcagcatattccctttaacattcattaagcaagaaccatggatcatactatacaatgcatattaaactcatttggctaagggcaaagggtcaagagacaaaaatggtcccttaaagaataggctttagtaacaagggatctctcaagaatgattaagctttagtagaatgctaaagataagtgccaagttatgcatacaaagttcaacagcaaaagaaggatagcttgatcctcagccaggataagatctcatctacccaaagtataatcaatgaagacctaatggcaatcccatctcccatcctaattaagaacttgactctacccttttgcattcataatcttttgaactctttcttaactcattcttttctttttctcttaactctaggagaagcttttcttttctctttgatacttctagcgggtttggctttctttagtactaaggttctgtttttgatctctattaagcttagggctttttacccttctttattagctaacaataacccaatctctttctttaacaatctcaaaccctttactagactttttctaacttctttagcttacttctcctagaattcttttcccttttcttgtaaacaatgaactcaaccctttttctcttttaaactcttcccaacccatagaacaagtacccacctaatcctatctagtccggataacgcgaactagaactacatgagatactatctttgtcgttacaaacctaacactttctaccaagcttaatcgaaaatagacctcacaaacactcacaagtgatatatgacttgaaagaaggcttaggttagggtatggggaaactgctctaaaggtgagagacagctatttggatcaacaagagtggtgaaacgaataagaagatccaaatattttaagggtgaccatgagtttaacaaacaatgcatagtatgataattaaaagtcaaattatggttcaaattaatagggaatagcttcaaatcacagcaagtttcgactaaggaaagatcaaatatatgaattcaaaagatggtgcggttttacttcaagatcaatcggttaagcactagacaactaacaacaagggcattgaaactatctagtgaacattgcaaatttacaaggctatgatcatcattatcccctatgcaagtgcaaaatgcaacaacctatatgataacattctaaaaacagccctattaatgcaaatgcaaactatatgacactctatttttttggaatcattttcaaaaaatttcaaatttttacgggttttctatgccttagatgatgcaaaaatttgaataagaaaacatgaaacaatgttagatacatcttgaaccctcccccaaacttaaattacacagtcccttgtgtaataaaaattcaaagaagaattcaagagaaataaccacacaaagcaagaaataaaagaaatgaaatgatatatacagtgaaatggagtgatacctcaacatttaaacgaagaggttctggacaaactcgtccaggaagtcttgtgtgtactcaggatcacgtgtggaggtgttggggttgttggggttgtactcggttgacccgtcgagcatgtagcccgagtagtactcctctcggcttgggtcagcgttcagaaccaactggttcactggaccgggtgggcggctgttgaaacggcgatctgagaaggtggagctcctcccgagctcgtagtttgaggctcttggcgggtcgaaacgagcgtcccttcgcggtgccacactcgttgagttacttctcctgaactcgggtcgaggtgttggtgatctctgtcttcgttgcagctcctgaatctgaaccgccatgccgtccattgctctcttcatctttctcaccttcttcttcaacccactgaacaacttcctctgaaacttgcccaaacctttgagcattcccaacttcttgtgaacttgaccgggatctctctcttgatcgaactcagcataatcctcaaagaaaaactgctccgttgcagcgtcgcacgaatcttcttgttcatcaaactgttcagcttaactaaactcaacttgttcaaactcggcctggccatactcggcatgctgaaagttactcggccgagtataggcttcttgctcagcttcttcttcattccactctgctccttcttcttgagactcactccctatgctcggctctgcttgtaggggcgcaaggacattgactaagatcgattgagaaggatcaaagtcaatgttgttcccaatcctaatggtggtgaacttcttgcaagggagtgctagcctagagagccctagcgtggagtgcttgaacttgaaatagagttgatccgctggagcagacctatccaagtagcacttcctcttcaaatactccatatcgatgtaggttgatgtgtgagttggggtatgaagaggaactccaacggctattaggatgggcgtgatcactcctccagcacataagcttcctccatagccggattggtggattccggctgcatactccctaaaaccaatcaagtgatcaatcaacaccaccgaaagggatgtatcagccctatccccttccatctctatcccattccttgtgcgccccaaaatgaagcataaggtgagatcaagcaacttcagctctccctcattaacatggccggttgtcttcttcgggaagaaagcacttgcaatgcaaaggtggagatacctaagcactgggctccttatcaacgaactcttggccctagatgacttgtaggggagtggaccggcgattgtcaaccatagatcaaggagctcgtccttgctgaagttttggcggattccatacttggtggggaacttgaaaacagcatccaactgcctaatgggaaccgagtattgaattccaaacaccatgaatgtgatatagccaactcccttatgcagctctctctccctttcttcagcatagaaatgaagcttcaaagtggctaggaattggcagctctcagttttgtacccttcacacttgtaggagaaaaaggtctccagcttggccatctccatgaggtagtcaacatctctacatatccccaaagcttgcatggtaggtctatggggatatcttgtcccctcaaaactcagctccatgagatattggtagtgctcttcaatggtaagttctttctttctcctcatggtgttccttcttctccttgtaggaactatcgagacctcttcatcaacttgcgcatcttcctcagatgcttccttctctatctcaggcacttcttcttctgcaactggttcggactcccagaccctcttgcctcttgctatttcctcttgagcagccgcagaacgacccatagaggactccggggccatactcggccattgtactcggcctgtcatccgagtaaaaccaggactcgcagcttcctgattctttgactaattcttctcattaatcatctcaaaccctcttgccacggctcgagcagaggctctccttcttgattcctcgggattcatgatcttgggatgatttactgcaggtagtcaccacaaaataaccaaaggtaggtcaaagtagaagagaaattgatgtttaagaatgaacaaaggttgcaagagaggttttgaaaaggtttgtaacaagagattttggtaaaatttctgagaaatctagagaagtgggagtaagaacttgaaatgtttggagagaaggagtaaaattcgaaatttttgagcaaagagagagtgtgagtgacttagcttgttgagtgtggttttatagataagaagatttgatcctagccctccaaacaccttagatctgcacccttcatttggtcaaggggacatgtctcactatttgcagaagaatctttgaagggctttggggagcaggatttgattggtggggccgagcaaattcgaattcaaatttgaatttgaattgtgttaacctcgcacgtgtgaactcggccgacatactcgacgcgcgtgtcgagtacagtgttgggcctgatgggcttctttttctgactcggcttcgggccgagtgctgcatcttgttgggcctttgaacagtgaggcccatactcgaccttgggccgagtggtgtggtccgagtactattcaatcttgggcctttggtcgattgaagcccacactcggcctacagccgagtagtacggtcgagtgtgacctgaaattctccagaagtctttttccctgaaacacttaaacaaaaacatcaaaaataacaagaaagcaatatatacaaggatagacatgggacttcctcccaagtgagcttgtttaaagtcattaagcttgactctcacaatgtttaggtagagaagagattgaggagaggaactgagaagtcctcatcctcacttgctgaatcctcaaagtctgaatcatactccgcattttctcttgatagctggagtgtggagtactcatttgatctttcctcaaagtaagcctccttctcatcagtactatagtcctcttttccaagatcggggttcctcaaagtattcatcaatctcaggacctgggtaacctttaatcatctccttaagctccaggatagcgtagttcagctcctctatcttgaggtccaacttttccatggtctctccttgagctccatactgtttcctgagctccataagctctctagcaataggaccaacatcaaaatggttccccttagtctcaacctctaagctaggtcctccttctatcataagaagctcctcgggctctcctaggtggtgagtcggaatggagtacggaataggattttctaacccactcaacaactcagcatctaaatttccttcttcaatgaagaaaagctgcccttctatagtgggcttcttcatcttcttagcaatgtcaaagctcatatggagattcttaccaaggttcaagtcgatcttacccatttgcacatcgataagagcgcccgcagttgctaaaaatggtctcccaagaatgagagggtctttcggttcctcatccatctctagaaccataaagtcggttggaatctcaatcgatccgatctttaccggtaagtcttctagcatcccatgaggcactctcactgatctatcagctagaataagatgaatgctgctaggcttgaacttatcaaatcacaatctctttgcaacagacaaaggcatcaaactaactgaagctcccaaatcacaaagactattgttgaacactaagggtcctagtgaacaaggtagagtaaaggaacctggatcacctagcttctttggtatcaccttcctttgaatgatagcgctgcactcaaaactcaattcaataatttgctgagcttcttggggtctttccatgattacttccttgggagtatcaaccaaaggtatcttctcttctaactctttgatacactttatgaacatcatcttgtgtttctggaagatccttgcattaacttgtgcaatcctttctggaaagtatggtttaggttcataggcaggtggaatacggattgggttgctcgggtcatatgctcgttcgacaagcaaagcaaagaagtcgagttcaatctcctgtcttgatcttggtctcaaaacctccccttcttgaatcccactgtccgcagtggcagaagtactcactgtggtgatagcatgggcatactcctttggattttgaacagattttctagaaagttgtccagggtgcttaggagctgaagtagaagcaatgtgtccttccatggtcttgactctagtgttaagtgcgtctatctttatattcaggtcgttataagagcaatcaatcctggtggtgagctcagctagcttcttatccatggttatggagcatgaggcctgtccttgcacaagctgatgaagtagagtcttcatctctgagtcttgtgctgaagtttgctgtggctgctgagtgaagcttggaggtcgaaagttctgcttttggttgtagccttggttatagggtataaagggcttagcttgaggcggttggttctgtggggggtagacttgatcttgtgggtttgccacattgttgcttctgtaagagagattagggtgagggggtttgtagttgttgaatcccttgttgtagccaccttgattctgtaggtagctcacctcctcaacagtaagattctccccttcttggagttgtgtaagctcttcttctgtaatgtagtggacatttctctgttgagcaagcaccaatttgtcaatcttatcattaagagctttgatctccttcttgtgcctatcctcagaatcgctactgcctctgttagtgcgatcgtagtcctcattgtaattcccatcagattgtgctaggttttcaacaagttcccaaccttcagctacatctttgttgagaaagttaccattggaagttgtgtccaagagcatccggatctttggtaaggcacctcggtatagagtactgagtagggaggccttcttgaatccgtggtgcgggcactgagtgctatatcttttaaaacgctcccatgcctcagcgaatgattccgaattcttctgattgaatcccgagatctcattcctcaatctagccgttcttgagttagagaagaacttggctaggaaagccttcttgcagtcatcccaagtgtctacagaatcaacgagcaaagtcttttcccaaagatgagcttcatctcctagtgagaaagggaataacctgagcttgaagctgtcttcactaactccattgatcttggtgagactacagaatctatcaaagttatcaagatggtccaatgggtcctccattggcagtccatgaaacttgttgctttgaatcatggagataagaccactcttgatctcaaagttgttgttctgaataagaggtgggacaataccagctctctgatggtggtttctaggtgcatcaccagcaccaatgttgcctggcaactcattagcattcacctcattagccatcactactgggtttgaagtggcttgttgttccctgagttcacgctgaatcctgtcgatgtcgtctctgtaccgtgtgaatgattctcataactttagaacttcctaatcttaatttccattgatgaaacataataaagcaggctttaaacaccaatctattaaagtcaataagcagtctaaacatccaatgccttgggctagaatctacaaatctctgaaattagttggttcagacatttcatcaaacaccttttggatggagaaagtctgaaatcaatttttaattgatcagaaagaaaatagcattaagaactcctaaaacagaagggaatcatgcatataaacacttacctagctaaagaagagaggaatccacctaaacctaacccatcctcaagaactctaaagaacactactcaagaacactgaagaacatcatagaacaaaacccagaaaattcataaaaccaagaaatcattataaacttagcaaaagatagatctcaatgagataaacaagtttgcagaagaaatcaaatccaaattctcaacacaacaaccagaaaatgcaaaagaaaatcaaagaaccctaatatccagcggacaaagctcggatattttgggcaaaaacataagaggtctatttataggcaatcctaggttgccctaattgggaataagacaaaatagataagtcggcgcaggagcgctcggccctaggccgagtagaaaagccgagtggcttggttttggtcatacagctcggccctaggccgagtagcttggtcgagtggcttctcttcatccttaagtgcacaactcggcctccagccgagtgccttggtcgagtaggctccttgttcttcacgtgtgctccactcggcctccaaccgagtacataggccgagtatacttcaaatccttccttaggtcccccgaactcgagtctgtccatcccttgtgctagaaacctccaagttgagtccaaaagtacctaattcatctgcaaaacactccaaatgcaagtatgctatgcaatgcaatgcaaaatgtgcaaaagaaggaaaagagactaagaatgcataaaaagagacttgaaactaaactaaatgcatgaaaaacaagggcttaaaaaggttaaaatctagtgttatcagtaatgattttatagactacggtgcagcacgaaacaggtctaaacatagagagttgatctactcctgtaactttaggaatgagagtgattgctgtagcgttgaacctcttgaggagatgaccagttctgaaaaattctttaacagcagcaatagtactatccttgaccacaaaccaagattcccaaaagaattccgcagtgaagctgtcaggacccggagccttgttgcgaggcattgcaaagaccgcagcagttatctccttatcagacgggagagcagagagacgagacgccagtgtatcattgcagcgaaaaggatggatatctttgattctctgaaccgaatcgggagtgagaatgtcgctgtcagagcccaaaaggtgggtataataggctacaatcatttctttgacctgagtaacattctccactcttacatcatcatccatgcgaagaaacttgatcagatttttagcctgatttgcaagaatgactttatggaagaaccgtgtattagcgtcgccatcttgcaaccatttaattcttgatttctgtctgtaaaaagactctagagcagcagcaaagaagttccactttttcctggcaacatgctcaactctaaaaagagaatcagaagggttggttaatagctgagactgaatcgattccaaagaatccagagcctctttggttttatgctggatattgccaaacccttgcctgttcaaaagcttacaacacttcttggcagcttttaaatgttcccctaaagaaaacatgtgagaaccaacaggaatctgctcctcccaagcaacagtaagggacaccaaaaaggtaggatgagttgaaaggaaggagaaatatctgaaacatttcttagatctctttgggaggttttccaggataataatacaaggagagtgatctgaaacccctgacagctcaaagacagcaatcgcactaggaaaagaagagaaccaatctccattggcaatagctctatccaacttccttatgatcggattatcatcttgatgatttgaccaagtgtaatggaccccacgactaggaatatccaccaaatcactatctcttaaacagttctgaaactcctctaaacctctcatggggattgaagtttgaaggacagaatagtgatcagaagtagcagctatctggtcaaagtccccaaccaggatctaaggagtgaagcaaagaggagaggacggtgataaagtagagatgtcttcctaaagggttcgtctctaaatctcagtgttcctaccataaacaaacgctaccgcaaaagatgtagcaagacccgacagcttaacactacaaaccatcaattgatccgtcttcttaaagaccaaaaccgaaaccgaagggtcccacacgatccaaatccgacccaactcggaacaacaataattggtatctaatctccaactcggaagggttgaatccaaaatagcaggggcattactctcagctacatgcgtttccaaaaaacttccaaccaacaaattatttttattaacctactgtctaacagcgcgttgacgggaatggctattcaagcctcttacattccagcaaaaaaccttcattattaacacaaaaggggaaggggaaagctaagctttcaagcacaggacgatccacccgagaccaaagctcgtggggaccctgagaccttagaaatatggtcagcagcgctgcttctgctgatattccacttatgacgccatctcttcctggattttgaagacatagcaccccaacccggtggataaggaaaggaatcctccgacgggatagctgacaccaaaactgattcaggaagatgggactcaggtggcttgacaggacttctagcaacacctgtagtcgacttcttgacccaagcagagcccttggcataggactgtcctgcctcaaccaaaacagtagaaggaacaatctcaatattcttccctttcacgcagttctgagaggtgataagccttggaggggtactactggagcgcttcttagagcgtgaacgaactcttcccttccaatcaaagatgttgtatccactaatattttgtcgaagcgaaggcgttatctctggaagcaagtgccaaagcttgagtatcttgatacatctcttgacactgagcattggagagcttcacgttttgttgacaggtttttgcaactacacgaagctcctgtcttggaaacaaaactcaattcgacggtcaaatttaatcttttcaacgtgacaatggctgagaatacaataacaaccaattccatgaattttttgataaaactggaatcaaggttcgtttctcaagcccacatacctcccaaccaaatgggaaattctgaaaggatgattagaactattaacaatgttattcgagctctcctatttcaagctcgtctatctccttgttattgggttgaggcactaaatgttgttgttcatatcctaaaaatccttccctccacagctatccaaaatcaaattcctcatagcctcctctttcataaaaatccaacctgtgatcaccttcgagtttttgggtgcttatgttttccaagcttgaatcattcaaatctgtcaaaactatcaccgaggacaacgccttgtctgttcctttggtatccatctcaacaaaaagtgtatcgatgccttgatttaaaaacaaacaaaattattatttctcggtacgtttactttgatgaggatacgtttcccgcaactaatcaaaatttatctcaagtttcatcgtacacattcctaaacgcagttgatgatccttctcctttgttcaaggaaattctccaatcaccactacctcaaaaccaaccaccaccacctcaaactctctctgtgccaatgaacacaagatcaaaatccggcatcactaaaccaaaaaaggttttgtcacttgtcaccacagccaaagcgcctcttcctaaaagtcataatcaagctttattggaccctaattggaatccggcaatgactgatgagtatgatgctatgactaaaactaagattagaatttggtgccacgacctcctaaggttaatattgttagatcgatgtggcttttcaggcacaaatatgatgcagatggagtgctttcttgacataaagcaaggctggtagcaaactgtaaatcaaaggaacacggtgttgattttacagagactttcagtccggtagtgaaaccagaacaatacgggttgttcttgactttggagtagcgttaaactggcccatacaacaactggatgtcaagaatgctttactacaaggtcatctccatgaaacagtttatatgcatcagcctccagagttcgtcaacaaggaatttcccaaccaccaaccatgtctgtaaactagaaaaagccatttatggactcaagcaggccccacgggcatggaattcatggttcaccaaatttttaatgtagcttggtttcatcatgagcaaggcagacaactctctgttcatcttcaaacagggcattcaaatggcatatgttttgttgtacgttgacgatataatgttgaaagcctcctcaccaagtctcattcaaaaaatcattacacaactcaaaggcgagttcccaatgacagacatgggctggctgcatcacttccttgacatcaaggcaaattttaacaagcaacgtatgttcttaaatcaacatgtttatgctcaagatataataaactgagcaagaatgtccgaatgtaagccatgtgcaacaccagttgatctaaaatcaaagctctcggccggtgaaggcaacccaatacctgacccgacatcttacagaagtgtcgatggtgctctacagtattaaacattcacgcgaccggatatatcatacacagtccatcagatttgcctatacatgcatgaatgcgctagaaaggataatctgttacttgcaaggcactaagtcttatggtcttcacttggtcaaagataacatttcaacccttacgacttattctggtgcagactgggatggctgcccggatacacagcgatcaacttcagggtattgtgtcttccttggtccaaacttggtgccatggtctgcaaaacgacagcccactgtatcacgatcaagctaagaggcagaatataaaggggtcgcaaatgctgtagcagaacttacatggctaaggaatctaatgctggaacttcatctccccatcaccaaagcttctctactgtgacaatatcagttcagtatacttggccacaaatctggtgcaacatcaaagaacaaaacatattgaacttcacatacactttgtccaagaaaagtagctattggtgaagtaaaaggtcatccatgtcccatcctcactccaatatgcagacatcttcacaaagggtcttccgacatttctcttcaacaagtttcgaaccagcttaaccatccgggaacccgatgcttcaagtgcgggagtgtgatagaatataagaatattcagttacaatcaagtaggtagactcgtatatattgattcttgtatcccagattttgtggaacttctctgtaactcctttggctatttaaagccttgtaaatcaatgaatctttcgaggaaattattccactaacattgagagggtaagatttgtgttttagatcactattgatgtgccatatctagcaaacaatcgctctctttggtgtgtaatatccaaaagataactcggtatatcagaagtctttttgcagcttctatgcgatctctcagtccacctcccttataatcagagcttcatggtctcgttgcagctaggccttttcttttctaacctttagagtactgattcttggggaatcatattaaactaaaacgagttttattatgaaattcatttagatataattattaatatagtaaacgttattaggtataattttaccatcgaaactaaacggacaaaacctaaaataaatttagtaaccccaaaaaaattgaggaaaataaaataatattttaaagataccggctaagaccaacacatgttttaatggataaagctaggcttggaatttcggcttaacccgagaaaaccaaatcgagaaaaccgaatgtttcggttctcggcgccaacagttaaaagggaggcaaaccgttcggcaaaaatatttttatgattcaaattacggtttggttcggttcggcgagctaaaccgatcggttttctcggtttagaggcacaccatataataaagaagaaaccctagatctacatcatttcatgtcatctcctttctttttctaatcttaatctcttcttctcgcacatccttcttcgatcttgtaattgtaaatttaacaattgagcccatcgttttaaatttagtctacttcggttcgaattaaccgaattaggaaaaaaatcggttaagtttggaattaattttaaacccaataaccgacccgaaaaaaccgagtaccaaacggatctaaaccaaaatttaattcaattcaattcgccagaattttcaagatccaaaaaacccgagaaaccgattcaactgaactgatttaaccgactaaaccggactcccaagcctaaataaaggcaagacatatttctgttcttgatataaccatccccaaatttatgagaaactttttagggtaagaaatttaataaccaacttcttttcttttctttgtcaaacagtaaccaacttctaatctcatgtatactaggtgagtgtccgcgcctagcgcgggattttgttgttgttttttttttgtttttttgtaatatatttagtttatcacacttttttagaaatgttattttataaaagagattatattatgaaggatgaaaactatatatttcttattaagtactgcatattgtttgttaatttttactcataggtagaagattttagtgtgttgacgaaaccgcatagtccagtgctgtttgaatattaacaaacaaaattacatatatatatatatatgtatatatatataatctctttattatgagcctaatttgtaggtatattatatatactttttgtttggtattggtaagttgtaaaggattatagaagagcatcattttagcttactcgtgcatattttaataaatttgattttgtttttaacattcgttttattctctttttttgttattttgtaaaattgtatttaaaaataactattgtttttcaaatgtttgctacttaatttgttcgtattttgatttcttaccccatatatatagttttattgatggatggttaacaattttaacaatatttttgaaactactctatgcaatgattggtaatataagagttgaattttattatatttaaaaattctttgcaacagcaagagatgacaaacatgaaaggaaaaaaaaaactacttgaatttatttattttgaagctttatgatagttcattgcctaaaacattattggtgctaattttaatgaaatgatagttgttgaccaaaactattgtaataataataatttttttaaaaacagtagaaatttattatttaattattgtgttgtgttttggtatttttgtgctttatccttctatcagcctttacttttttaatataccctaaattggtctgacacaaacaaagactttttatgcttcagccttcaagtagggatttgttaatcgtctatcgatctatgttcatatctaatttaatttgctttactgttgtttgacgaattttgtctcctcgaatggctttcgcaattctccgttgtttcttacgatgattaatcgtcaaatctattagttggaactaagccttcagtaaaaatgaaatagggaaatcaaaaaaataaatataaatcatgttttatatttccaatttaagttagtttgtgtatttttatgacaacaaaagagttcatgtgtttttttggcaaatactaaataagttaggttttttctaggaattttctgtaaataaaactaacagcgtttgacgattttgttaacgtcgttaacggtctgttacgacgaagggaagtaatcagaaaataaaatagatcgtgtattttatttctaagctaaattagttagtacgaaaaaagttcaggtagttttctgacagattttaaatagttcgtttttttttatagaaattttccccaatcgcctatgtctataatcataataatttaatatctttaataacaccgtaccaacatatatgaacttcatacgttaaaaaataacttgaaagaatcgcaatcgttataatttaccgtttatttttcttcctatcattttataaaacaactatattttctaattgatcgacacacatatttcagcagctaaatttgttatgaaatcaacatgttagaaaatttgttacaaatttaaggttaatcgtcctcaagaaaatatttaaaaatatagaaagagtgatggttgaagttcttacttatgataggttcatatgttaaattaattactaactatattttacttattttaagaagtttaggtggtaagctctcatgtgctgatctgagttgtgggagagagttgagctactttcatatatatgattagggtaaaactcttttggttttacaaatatgaaggcatggacgaattagagatacgaaattaagcgatcatttttttcagcgaccaaagctcatagattgattgatagagttttaattcttgtaatctttacttgatcaagaagagactatctgtcatcttcgtagactgtgacgaatcaattatttttgtccaaaacaaatgcagtaaaatatgaaacactaaacctacaaatacctttggtgaaaccaaaatttatcaaaacggaggttacaactaaaatgatccaaaattcatcaaaacggaggttacaactaaaatgatttgtgatcaaattagaagaagaagaaaatccaaaaatgatttaatgatctagtaaagcttatatacagaaatcattgggaaattcacttctcttagtatatttttcttactcagatggtgtatatacttgcttatgtaataatttgctttccgagaagtatgtaaagtttgtaatctcaatttgatatcaatgaaatcgttttcctcacaaaaaataaatgaatcccaagttatgttttaacaccaatcaatcattattcaatactctcaaaatcatttcttaaaatgtattatttttaactatgaaactcatctaaagttgtgttaaatacttaccacaaaaaataatctaaagttgtgttaactaatcgtatagtttcttaaagtatcttatcaattattcgtttaaaaaaaaatttggaatgtcttatttttcatcgaccctttgttttgtacatttagtttggtggtgtcttttcataactttcttctgttctgtaacagtgtagtgtaactttctgtttatggtcacattttttaatcatattttaactggttgttgaagaattaaaccccgtaaatggaaacattggttggttaatgggccgaacatgaaagcccaaattagttcataaccctaaaccgaagcaaaacattagctgatagtgatactcttcgtcttcttcttcctccgtcccacctttggaaaagttctcgtgagtcttctctaatgtctgtacatgtcaaggtacataatatattacttattcagggctgctttaaatcttggtttaaaactgatattttccatttcaggaacctgtttgtgaaacttgtggcgacataggttttgaagaagcacttgtcttttgtgactcttgtaagattgagtctatacaccggtgagttcaattctcgatttctcctatggtttgattgaattgtgttgtttataacctatttcacttgttctttagctattgcataggcataacaccgactccttttacggaatacataacttggatctgtgaggattgtgatgagagtgacagtgattctgattgtaaagaactggatcagactgctaagcttacacatatcttgaagaagagtgacaaaaagaagaagaagaggaagaagaagagtaaatatcttgataaatatattttaaaattacgtctgtttattgtaactcttcgtagaagtattactaactaataaatgtgtttctatagtctcttgtttgattatctttttaattattcggttttaacaaaaaaaattatgatcttttcaatttagaagttcatcttatttttatttttaacaataactaaacaaaaattatactcatttatgatggataagaaaaaaattgttaaaattttccataatattctaaacatccgaattcacaataatttttagcgtaaaagaaaacgtaattaaccaaatctaagcaatatagtattttatttaaaatgaatttccttagatttcataacctaatttaattaaaaaaaatcctaagatttcataacctaatttaatttaattttggttgaatgtaagtgaaagacatcaatttaaatcataagattggtgtgttgaaatgaaatattttgaactagcaaatctttagttatacacatatattttcttttgtcacttgaaattttattataaaaacttgttgttgaaccagagaaggaatacatatgcccaaataagggaaactcaagtcggcagacaactaaaagtctccgaagacattgccggggcaaaaaagaaattccccggaaaacaaaaccctattgaagggaaccagagtaaaatgaaactggaaatacaatgcagaaatgatcaaaacacaatcgaaagaggacgactcttaaaactaaaagcagaggcaacaaggcaaaaaccttaagaaaactgatagaactaagagaacagagaagcctcttcttcttttgaaagaccagcaaatgcgacttatcacggctgcccacggccaaaccagaaataatatctaccacctcctatcaagttgagaaccaatctctcgagaaccaaggatatcagaatccgccaagcaaagagcattcatagaaactcatagaacctcgaaaacacttctggatgcgacgaagaccgaagcgtcacttaacgtctagctagaatcctaaaaaaagtgatcagatctaaacagatcttgaaagcagggacaaggagtgaggcagaacctctcaaaaatcaccattcttcgaatgagagcgacaaaggattgagacagttaacaaacaccaaggagaagaaaactctgtaaactatgaagactaccgtaaccaaccaataaacacgaaacttctgcttagaaaggaagcgatcccaaagggagccaaaggctgagcgagaaatcaaagggagcgaggaaaggcaaaggattaggagataaactacaatccaaaaccaagtaaacttgacggcaaagaaacgttgaaaggctcaagagcagcaacaaactttaaggcaggaaagagcagagaagagacctcattctccgagccatagcgtagatcaaccaaattcggaattactaacatcttctctgaagtcacaaaacccaaaagaaattaccgcaacgaccgcttccacaaacccaaaatcaaaatcgaaacaaaccaaaagacttcctaatcgatggccacaaattctgcactcaaaaactaaacaactaaccctatctagtcaaagaaagagaacgactagaaggtcagcaaaaccgaccagaagataccaagaacccatggccacagaaccgagaacaaccaccgacgagaccctagccaaggcagaatctgacaatggcagaaaattcatcttctacaacccgttgggggaaggagaaggacgctcttgaagagaagaacaccgaacaaacctcactgtgaagacccgtctaactcgccaagcaaactaccttcaacatcgaacaccagaactagaagagggagacaagtctacaacaaaaaagaaagaagcagcaggggccctctcacggctacgatgaggagcgccgttcaccggagagggcgatttgaaatctggagatttttggcggcggctagggcaaccttgtctacagagaaacttttttgttttaattatacacatattatgtgacacatttccaacactaaataaaatgactaactaattcaacaccataaaaactctaaaagtctctcctgtgctgacacgtcacctttttcaagtgttctcagcataacacctcattaaaatcaacagccaattagaacatttcgattaatacacttcatttacgttgaccaataaaaacttactatttttccatgtcatctcatcaacttaacaaaattaaaatttgatataggcctaacccaaccaaactattttcaaaactaaaatttatataaaaacatgggcctaaaattcttaaatataaaacttagacctaggcaaataaaccgaaccgaatgtaccgaaccgaaaccgatgcaaaaaaaaactgaaccaaactgaaaatttaaaaataatcgaacggatattaaattctataaccgaaagaaccaaaaccgaatggatacaaatcaaaatattttaggtaaccgaaaatatctgaaatataattatatttcttaaaaaatattagttatttctaaactaaataattaaaagttatttaatagtataaatactcaaaataccaaaaacatatgaaaatatcaaaaataactgaaatatccgaaaatattcaaagaaaaatagctgaatgtatattaaattttaaaaccgaaagaaccggaacggaaccaaaaccgaaccaaaattttaaaataattgaatggatactaaactttataaccgaaagaaccgataaccgtatggatacgaatcaaaactgaatggataaccgaatacccatgactaagaaaccttatctaaaggtctgactggttgaaacacaacagttacagttgcgactgcatgagtttacgggattggacggtttcatattcaagcgttataaaacattttgaacgactggtttagcagttaaaaattggtgcatttttgagagctttatgactggttaacggatttacgtttaggatatgaaaattacggatttctatttttggtggaaaaattacggatttacgtttttggcggaaaaattacgagtttacttttttggtgggaaagttacaggtttacgtttttctggcagggaaattacgggttttacgttttttggcggaaaatcatgtgtttacgtttttggcgaaaaaatgacaagtttagttttttggcgaaaaaattaagagtatgtttttggcgggaaaattacgagtttatgaaaatgttatcatcatgatgaaaatagtatgataatgatggtgatagtattatgatattatgggaaactcaagtcggcagacaactaagggaaactcaagtcggcagacaactaaaagtctccgaagacattgccggggcaaaaaagaaattccccggaaaacaaaaccctatcaaagggaaccagagtaaaatgaaactggaaatacaatgcagaaatgatcaaaacacaatcgaaagaggacgactcctaaaactaaaagtagaggcaaaaaggcaaaaaccttaagaaaactgataaaactaagagaacagagaagcctcttcttcttttgaaagaccagcaaatgcgacttatcacggctgcccacggccaaaccagaaataatatctaccacctcctatcaagttgagagtcaatctctcgagaaccaaggatatcagaacccgacaagcaaagagaattcatagaaactcattgaacctcgaaaacacttctggatgcgacgaagaccgaagcgtcacttaacgtctagctagaatcctaaaaaaagtgatcagatctaaacagatcttgaaagcagggacaaggagtgaggcaaaacctctcaaaaatcaccattctccgaatgagagcgacaaaggattgagacagttaacaaacaccaaggagaagaaaactctgtaaactatgaagactaccataactaaccaataaacacgaaacttctgcttagaaaggaagcgatcccaaagggagccaaaggctgagcgagaaatcaaagggagcgaggaaaggcaaaggattagcagataaactacaatccaaaaccaagtaaacttgacggcaaagaaacgttgaaaggctcaagagcagcaacaaactttaaggcaggaaagagcagagaagacaaaggattgagacagttaacaaacaccaaggagaagaaaactctgtaaactatgaaggctaccataaccaaccaataaacacgaaacttctgcttagaaaggaagcgatcccaaagggagccaaaggctgagcgagaaatcaaagggagcgaggaaaggcaaaggattagcagataaactacaatccaaaaccaagtaaacttgacggcaaagaaacgttgaaaggctcaagagcagcaacaaactttaaggcaggaaagagcagagaagacaaaggattgagacagttaacaaacaccaaggagaagaaaactctgtaaactatgaagactaccataaccaaccaataaacacgaaacttctgcttagaaaggaagcgatcccaaagggagccaaaggctgagcgagaaatcaaagggagcgaggaaaggcaaaggattagcagataaactacaatccaaaaccaagtaaacttgacggcaaagaaacgttgaaaggctcaagagcagcaacaaactttaaggcaggaaagagcagagaagagacctcattctccgagccatagcgtagatcaaccaaatccggaattactaacatcttctctgaagtcacaaaacccaaaagaaattaccgcaacgaccgcttccacaaacccaaaatcaaaatcgaaacaaaccaaaagacttcctaatcgatggccacaaattctgcacacaaaaactaaacaactaaccctatctagtcaaagaaagagaacgactagaaggtcagcaaaaccgaccagaagataccaagaacccatggccacagaaccgagaacaaccaccgacgagaccctagccaaggcagaatctgacaaaggcagaaaattcatcttctacaacccgttgggggagggagaaggacgctcttgaagagaagaacaccgaacaaacctcactgtgatgacccgtctaactcgccaagcaaactaccttcaacatcgaacaccagaactagaagagggagacaagtctacaacaaaaaagaaagaagcaacaggggccctctcacggctacgacgaggagcgccgttcaccggagagggcgatctgaaatctggagatttttgggcggcggctagggcaaccttgtcgagagggattcttttttgttttagttatacacatattatgtgacacatttccaacactaaataaaatgactaactaattcaacaccataaaaactctaaaagtctctcctgtgctgacacatcacctttttcaagtgttctcagcatgacacctcattaaaatcaacagccatatagaacatttcgattaataaacctcatttacgttgaccaataaaacttactatttttccatgtcatctcatcaacttaacaaaattaaaatttgatataggcctaacccaaccaaactactttcaaaactaaaatttatataaaaacatgggcctaaaattcttatctagaaaacttagacctaggcaaataaaccgaaccgaatgtatcgaaccgaaaccgatgcaaaaaaaaactgaaccaaactgaaaatttgaaaataatcgaacggatattaaattttataaccgaaagaaccaaaaccgaatggatacaaatcgaaatattttaggtaaccgaaaatatctgaaatataattatatttttttaaaaatattagttatttctaaactaaataattaaaagttatttaatagtataaatactcaaaataccaaaaacatatgaaaatatcaaaaataaccgaaatatccaaaaatattcaaagaaaaatagctgaatgtatattaaattttaaaaccgaaagaaccgaaacggaaccaaaaccgaaccaaaattttaaaataattgaatggatactaaactttataactgaaagaaccgataaccgtatggatacgaatcaaaactgaatggataaccgaatgcccatgactaaaaaaccttatctaaaggcctgactggttgaaacacagcagttacagttgcgactgcatgaatttacgggattggacggtttcatattcaagcgttataaaacattttgaacaactcgtttagcagttaaaaattggtgcgtttttgagagctttatgactggttaactgatttacgtttaggataagaaaattacggatttttatttttggcgggaaaattacggatttacgtttttggcaggaaaattacgagtttacttttttggtgggaaagttacaggtttacgtttttctgacaggaaaattacgggttttacgttttttggcggaaaattatgtgtttacgtttttggcgaaaaaatgacgggtttacttttttggcaaaaaaattaagagtatgtttttgccgaaaaaattacgaatttatgaaaatgttatcatcatgatgaaaatagtacgataatgatggtgatagtattatgatattatgagagggtaatgatgatgatgatattgtgttgataatgaataaattgatgggtggatgaaactatttgaaaaaagattgattatattcaatcggtttagagattttgattaaactcaaattgatatcggtttagagatttaagttggtttaattcattttaaccaaaatttgtgggttcttattgcaatctaactcatttgatccatttaaccatttgacccaataacttatttgaagcatcaattcatttgagtaaaaaaaattaattcattagagttcatgggttgagttgaattggattgacccatgaaacttgacctattttgacaaccctaaaaatagtctataaaaaaacaattgtaaattgagtaagtatatttttcaacattatctttcttattagatacttataatagttttaatgtattgatgataatgaaggtcttcgatttttatattgttatataaacgatggtgtattaatgattatcaagattatggaaattttttattttatgtattactaatgtttatttttataatatatatatatatatagatacaaaaaatgttaagtacttccttttgtatatatttgtatcttttaattacttatatcaatggtatttttgttttaatataattgagtaaattcaaaaggataaattaattggaaaaattatgtgagaacgacacataagcatggcattttcgttaatcatccatgaggataaagttattttaaataaatatttctcaattaatatataagggatattggaaaagagagaatataatcatatttacaaaatctaacaacataaaaaacaaactctccagaacaaaactatgaccatggcccaaccaaaatcaatgattaagctggctgatttaaacaaagcgtttacggttatgaatacggaagtttgctgaagcggacgattgtaatttcaagtgtcatgaaacattttgaaccattggtttaatggttcaaaattaaaacgtttgcaagagttatatgattggttaaccaggaggtgctattacggttaaactaaaataacaaaatattataatttataaattatacaaaatataaaataccaaaaatattatattattatgataaatgtgaaatttaaatataactaataataaaattaaattcttcctaattattcaaactaattaaattttatactcaaatatgcatttgcttcataaaaagaacatcatcaagtaatatggaaatgacaaaaaaaaaagattaggacaaattaaaaaaaatattttcaatttttgggtgttctggattaataatattattacaatacttagttagtatcttatcattcttcagtttgggttgatactatgattttgatagagaaaaaaactaacattttgtgaataaaaattaccaccatatattaaagttttgaggaagaagcttacactgaaaagatgacattgttgatgtaatgtgtaaacaagcaaaaaattattacaactaagatgtcatttttgttctttaaggtctaattaaatttatctttgaggtatggttactctcaaatctccaataatcaattcgatttttgtccctatatttttttgtttaagtgcatctattatctatttttttggttcaagagtttatttctgaactgaatgaaatcttagcataaggtaacatcgaagaaaaaggtcaatggaagaagaattttaaagaagagacattaaagatttttgagtttcttcctcaaaatattcaaggatcttatcagatttactaagtgtcattgtggattttaatcaataactaataatcatctgagtacgttttatactcccaataaaaaaatatttaattttcaaattctgaaaaacaaacaaacatagcttttacctttttatgcctcttcaacatatgaatcaagtatgcatgtggaacattaaaaatcaaagatgataactccatataacatattcttaaaaatctaaaatgactttaacctcaccagaattagcaaatggtgattttttaactcttttcatttttagtttcttaatgactcttctaaatagatgttcgtaaagcaaaaaattagcttccaaaacttataaaggctatatagatcttactaaacaaaaataaaaaaatgcattgtgtttccaatcacttttttaatgaatctttttgtctacatatatcatgaatcatgacaaataacattcaatacctacatacatcttaacaaaattatattaaaaaaaaagcccgcgacttggcgcgggttttgccctagtcactttaaaaacatgtaagagaaaaatttaaacatttactgagatatgcatgtgatgtgggagaggtgattgtggccgaagacaattatagattaaccaatgcatttaaaatcccttcataatttaattttaacttaatttcagacgacttcttctcaaaattttatcaaattcttcgaacctaccaactaaacgaaaccctaaattgtttggaattatctttcttttggattttcgtatttttttgaaatcagtatagatgataatttaatcaagttggtaaagacaattcaaatatttttaagatatagacatataaattaatgtaaatcgtttgtaaacatttaattatgataaattgtctacatgttgatagtaaagacaatttagaatattatattacttaaaacaatttttatcaagttagtaaaaaaatagtttaacatcaagttaacatatataaatcgtctttgttagttttcttatttggttaagaaaaaataaaataaaattttataagatataaggacatgtaaaattaatataaatattaataagtttaattcattttgatacatataaaatcggattgatagatttgacacgtgttacgatcatgcaactttgaaaaccatactatatataattattatatgtgatattttagatgatttcaactatgattttcttctcatgaaaatattatgataaaagtcaattttacattatcaataacaaaaattcactatattactatttaaaaaatggaaaatgcagcaaccaaataatatttatgtggttgttgaataattaaacgggaatatgtcattaaaatccccaacttattcaaaatattgatttaaatcctcaagtctcgatgcaacaaaataaatatcaaacttaaattgactttccaaataaatactcaacttttgttgattttctaaataaataccaaaagtttattgatctgacaatattaggcatgacgttatgtaggttaatagaccctgttatcagagtttattgtgttttaacagactcgttaattgaaaacgataacgttttctctaataataaaacattatctttttgtcataacgaatcaattaagtccctagtttcaaatcatatggggatttagggttagggattttgctcggtttaggggtcttagattgatttggggatttattttagtcattacaacacaacgacgtggctctgttgttggaaactataatacttcgaattaataagatttattaatttagttaacagtatttctaatatggccacaacaaaaataaagtatttatttagacagtaaacataaatttaatatttattcgttttgtcgagaattggagatttaaatcaacgttttcaatatgtcgaggatttaatgatattttttccagaattaaaccctataattggagattaatggtccaaattgattataaaataaagaaagaaaaaaaaaaactaaaccttagcaaaattgttaacttctcttcgtcttcttcttcctccgaccttggaaaatctctcgtgactcgctagtcttctctaatgtctttacatgtcaaggtacataacctattgcttactttgataccaaatttcacttagggctgctttaaatcttggtttaaaactggaaaaatctgatctttttcattttcagggacctgtttgtcaaacttgtggcgacataggttttgaagaagcacttgtcttttgtgactcttgtatgtttgagtctattcaccggtgagttcaattctcgatttcccctgtgcgtcgatcaaattgtgcctattaggtttctcctgtggtttgattgaattatgcatatacctatttctcttgttcttcagctattgcttagggataacaccgattccttttacggaatacataacttggatttgtgaggattgtgataacagtgagagtgattctgattgcaatgaagttgatcagactgttaagaagaagaagaagagtagaaatcaaccccttgtggttttagctgaggacaatgtgctccaggaacctttggaggggtctaagagagaagaaagctcatgtagcagaaaacctcatgaattgacttgtttagatggaaatggagaatctgttttggaggctgcagattcatctagtgtgccagatcatagttcttgtactagcaaaaggaaagaagttgatcagactgctaatcttggacatatcttggagaggagtgagaaaaagaagaagaagaagaagaagaaaaagagcatcaatcattcgccaccggttttagctgttgaggaccatgagcttcagggtactaccaatgttgttgaacctgtggaggtgtcttcttcttcaccaactaaagaaacgatggagtctaagagacaagaaagctcagatagtagaaaacctcatgaattgacttgtttagttggagattcggagaccgctaattcatctagtgtgccagagcataattcttgtgctgtcaaaaagagaaaattaagttctggaaacaaacagattcagttagctgatgggagtagttcttgcagagtggctgaatcaaatatgcctctaacgttgacatctaggaactatagagcacaacctatcaaaataccgatatggaggtaaagaaaagaatgtctttagttgtaccgctttgcatcctcacttacttgaattc

SEQ ID NO: 1001 - DNA, 131692 bp, Arabidopsis thaliana
gaattccaaacaccatgaatgtgatatagccaactcccttatgcagctctctctccctttcttcagcatagaaatgaagcttcaaagtggctaggaattggcagctctcagttttgtacccttcacacttgtaggagaaaaaggtctccagcttggccatctccatgaggtagtcaacatctctacatatccccaaagcttgcatggtaggtctatggggatatcttgtcccctcaaaactcagctccatgagatattggtagtgctcttcaatggtaagttctttctttctcctcatggtgttccttcttctccttgtaggaactatcgagacctcttcatcaacttgcgcatcttcctcagatgcttccttctctatctcaggcacttcttcttctgcaactggttcggactcccagaccctcttgcctcttgctatttcctcttgagcagccgcagaacgacccatagaggactccggggccatactcggccattgtactcggcctgtcatccgagtaaaaccaggactcgcagcttcctgattctttgactaattcttctcattaatcatctcaaaccctcttgccacggctcgagcagaggctctccttcttgattcctcgggattcatgatcttgggatgatttactgcaggtagtcaccacaaaataaccaaaggtaggtcaaagtagaagagaaattgatgtttaagaatgaacaaaggttgcaagagaggttttgaaaaggtttgtaacaagagattttggtaaaatttctgagaaatctagagaagtgggagtaagaacttgaaatgtttggagagaaggagtaaaattcgaaatttttgagcaaagagagagtgtgagtgacttagcttgttgagtgtggttttatagataagaagatttgatcctagccctccaaacaccttagatctgcacccttcatttggtcaaggggacatgtctcactatttgcagaagaatctttgaagggctttggggagcaggatttgattggtggggccgagcaaattcgaattcaaatttgaatttgaattgtgttaacctcgcacgtgtgaactcggccgacatactcgacgcgcgtgtcgagtacagtgttgggcctgatgggcttctttttctgactcggcttcgggccgagtgctgcatcttgttgggcctttgaacagtgaggcccatactcgaccttgggccgagtggtgtggtccgagtactattcaatcttgggcctttggtcgattgaagcccacactcggcctacagccgagtagtacggtcgagtgtgacctgaaattctccagaagtctttttccctgaaacacttaaacaaaaacatcaaaaataacaagaaagcaatatatacaaggatagacatgggacttcctcccaagtgagcttgtttaaagtcattaagcttgactctcacaatgtttaggtagagaagagattgaggagaggaactgagaagtcctcatcctcacttgctgaatcctcaaagtctgaatcatactccgcattttctcttgatagctggagtgtggagtactcatttgatctttcctcaaagtaagcctccttctcatcagtactatagtcctcttttccaagatcggggttcctcaaagtattcatcaatctcaggacctgggtaacctttaatcatctccttaagctccaggatagcgtagttcagctcctctatcttgaggtccaacttttccatggtctctccttgagctccatactgtttcctgagctccataagctctctagcaataggaccaacatcaaaatggttccccttagtctcaacctctaagctaggtcctccttctatcataagaagctcctcgggctctcctaggtggtgagtcggaatggagtacggaataggattttctaacccactcaacaactcagcatctaaatttccttcttcaatgaagaaaagctgcccttctatagtgggcttcttcatcttcttagcaatgtcaaagctcatatggagattcttaccaaggttcaagtcgatcttacccatttgcacatcgataagagcgcccgcagttgctaaaaatggtctcccaagaatgagagggtctttcggttcctcatccatctctagaaccataaagtcggttggaatctcaatcgatccgatctttaccggtaagtcttctagcatcccatgaggcactctcactgatctatcagctagaataagatgaatgctgctaggcttgaacttatcaaatcacaatctctttgcaacagacaaaggcatcaaactaactgaagctcccaaatcacaaagactattgttgaacactaagggtcctagtgaacaaggtagagtaaaggaacctggatcacctagcttctttggtatcaccttcctttgaatgatagcgctgcactcaaaactcaattcaataatttgctgagcttcttggggtctttccatgattacttccttgggagtatcaaccaaaggtatcttctcttctaactctttgatacactttatgaacatcatcttgtgtttctggaagatccttgcattaacttgtgcaatcctttctggaaagtatggtttaggttcataggcaggtggaatacggattgggttgctcgggtcatatgctcgttcgacaagcaaagcaaagaagtcgagttcaatctcctgtcttgatcttggtctcaaaacctccccttcttgaatcccactgtccgcagtggcagaagtactcactgtggtgatagcatgggcatactcctttggattttgaacagattttctagaaagttgtccagggtgcttaggagctgaagtagaagcaatgtgtccttccatggtcttgactctagtgttaagtgcgtctatctttatattcaggtcgttataagagcaatcaatcctggtggtgagctcagctagcttcttatccatggttatggagcatgaggcctgtccttgcacaagctgatgaagtagagtcttcatctctgagtcttgtgctgaagtttgctgtggctgctgagtgaagcttggaggtcgaaagttctgcttttggttgtagccttggttatagggtataaagggcttagcttgaggcggttggttctgtggggggtagacttgatcttgtgggtttgccacattgttgcttctgtaagagagattagggtgagggggtttgtagttgttgaatcccttgttgtagccaccttgattctgtaggtagctcacctcctcaacagtaagattctccccttcttggagttgtgtaagctcttcttctgtaatgtagtggacatttctctgttgagcaagcaccaatttgtcaatcttatcattaagagctttgatctccttcttgtgcctatcctcagaatcgctactgcctctgttagtgcgatcgtagtcctcattgtaattcccatcagattgtgctaggttttcaacaagttcccaaccttcagctacatctttgttgagaaagttaccattggaagttgtgtccaagagcatccggatctttggtaaggcacctcggtatagagtactgagtagggaggccttcttgaatccgtggtgcgggcactgagtgctatatcttttaaaacgctcccatgcctcagcgaatgattccgaattcttctgattgaatcccgagatctcattcctcaatctagccgttcttgagttagagaagaacttggctaggaaagccttcttgcagtcatcccaagtgtctacagaatcaacgagcaaagtcttttcccaaagatgagcttcatctcctagtgagaaagggaataacctgagcttgaagctgtcttcactaactccattgatcttggtgagactacagaatctatcaaagttatcaagatggtccaatgggtcctccattggcagtccatgaaacttgttgctttgaatcatggagataagaccactcttgatctcaaagttgttgttctgaataagaggtgggacaataccagctctctgatggtggtttctaggtgcatcaccagcaccaatgttgcctggcaactcattagcattcacctcattagccatcactactgggtttgaagtggcttgttgttccctgagttcacgctgaatcctgtcgatgtcgtctctgtaccgtgtgaatgattctcataactttagaacttcctaatcttaatttccattgatgaaacataataaagcaggctttaaacaccaatctattaaagtcaataagcagtctaaacatccaatgccttgggctagaatctacaaatctctgaaattagttggttcagacatttcatcaaacaccttttggatggagaaagtctgaaatcaatttttaattgatcagaaagaaaatagcattaagaactcctaaaacagaagggaatcatgcatataaacacttacctagctaaagaagagaggaatccacctaaacctaacccatcctcaagaactctaaagaacactactcaagaacactgaagaacatcatagaacaaaacccagaaaattcataaaaccaagaaatcattataaacttagcaaaagatagatctcaatgagataaacaagtttgcagaagaaatcaaatccaaattctcaacacaacaaccagaaaatgcaaaagaaaatcaaagaaccctaatatccagcggacaaagctcggatattttgggcaaaaacataagaggtctatttataggcaatcctaggttgccctaattgggaataagacaaaatagataagtcggcgcaggagcgctcggccctaggccgagtagaaaagccgagtggcttggttttggtcatacagctcggccctaggccgagtagcttggtcgagtggcttctcttcatccttaagtgcacaactcggcctccagccgagtgccttggtcgagtaggctccttgttcttcacgtgtgctccactcggcctccaaccgagtacataggccgagtatacttcaaatccttccttaggtcccccgaactcgagtctgtccatcccttgtgctagaaacctccaagttgagtccaaaagtacctaattcatctgcaaaacactccaaatgcaagtatgctatgcaatgcaatgcaaaatgtgcaaaagaaggaaaagagactaagaatgcataaaaagagacttgaaactaaactaaatgcatgaaaaacaagggcttaaaaaggttaaaatctagtgttatcagtaatgattttatagactacggtgcagcacgaaacaggtctaaacatagagagttgatctactcctgtaactttaggaatgagagtgattgctgtagcgttgaacctcttgaggagatgaccagttctgaaaaattctttaacagcagcaatagtactatccttgaccacaaaccaagattcccaaaagaattccgcagtgaagctgtcaggacccggagccttgttgcgaggcattgcaaagaccgcagcagttatctccttatcagacgggagagcagagagacgagacgccagtgtatcattgcagcgaaaaggatggatatctttgattctctgaaccgaatcgggagtgagaatgtcgctgtcagagcccaaaaggtgggtataataggctacaatcatttctttgacctgagtaacattctccactcttacatcatcatccatgcgaagaaacttgatcagatttttagcctgatttgcaagaatgactttatggaagaaccgtgtattagcgtcgccatcttgcaaccatttaattcttgatttctgtctgtaaaaagactctagagcagcagcaaagaagttccactttttcctggcaacatgctcaactctaaaaagagaatcagaagggttggttaatagctgagactgaatcgattccaaagaatccagagcctctttggttttatgctggatattgccaaacccttgcctgttcaaaagcttacaacacttcttggcagcttttaaatgttcccctaaagaaaacatgtgagaaccaacaggaatctgctcctcccaagcaacagtaagggacaccaaaaaggtaggatgagttgaaaggaaggagaaatatctgaaacatttcttagatctctttgggaggttttccaggataataatacaaggagagtgatctgaaacccctgacagctcaaagacagcaatcgcactaggaaaagaagagaaccaatctccattggcaatagctctatccaacttccttatgatcggattatcatcttgatgatttgaccaagtgtaatggaccccacgactaggaatatccaccaaatcactatctcttaaacagttctgaaactcctctaaacctctcatggggattgaagtttgaaggacagaatagtgatcagaagtagcagctatctggtcaaagtccccaaccaggatctaaggagtgaagcaaagaggagaggacggtgataaagtagagatgtcttcctaaagggttcgtctctaaatctcagtgttcctaccataaacaaacgctaccgcaaaagatgtagcaagacccgacagcttaacactacaaaccatcaattgatccgtcttcttaaagaccaaaaccgaaaccgaagggtcccacacgatccaaatccgacccaactcggaacaacaataattggtatctaatctccaactcggaagggttgaatccaaaatagcaggggcattactctcagctacatgcgtttccaaaaaacttccaaccaacaaattatttttattaacctactgtctaacagcgcgttgacgggaatggctattcaagcctcttacattccagcaaaaaaccttcattattaacacaaaaggggaaggggaaagctaagctttcaagcacaggacgatccacccgagaccaaagctcgtggggaccctgagaccttagaaatatggtcagcagcgctgcttctgctgatattccacttatgacgccatctcttcctggattttgaagacatagcaccccaacccggtggataaggaaaggaatcctccgacgggatagctgacaccaaaactgattcaggaagatgggactcaggtggcttgacaggacttctagcaacacctgtagtcgacttcttgacccaagcagagcccttggcataggactgtcctgcctcaaccaaaacagtagaaggaacaatctcaatattcttccctttcacgcagttctgagaggtgataagccttggaggggtactactggagcgcttcttagagcgtgaacgaactcttcccttccaatcaaagatgttgtatccactaatattttgtcgaagcgaaggcgttatctctggaagcaagtgccaaagcttgagtatcttgatacatctcttgacactgagcattggagagcttcacgttttgttgacaggtttttgcaactacacgaagctcctgtcttggaaacaaaactcaattcgacggtcaaatttaatcttttcaacgtgacaatggctgagaatacaataacaaccaattccatgaattttttgataaaactggaatcaaggttcgtttctcaagcccacatacctcccaaccaaatgggaaattctgaaaggatgattagaactattaacaatgttattcgagctctcctatttcaagctcgtctatctccttgttattgggttgaggcactaaatgttgttgttcatatcctaaaaatccttccctccacagctatccaaaatcaaattcctcatagcctcctctttcataaaaatccaacctgtgatcaccttcgagtttttgggtgcttatgttttccaagcttgaatcattcaaatctgtcaaaactatcaccgaggacaacgccttgtctgttcctttggtatccatctcaacaaaaagtgtatcgatgccttgatttaaaaacaaacaaaattattatttctcggtacgtttactttgatgaggatacgtttcccgcaactaatcaaaatttatctcaagtttcatcgtacacattcctaaacgcagttgatgatccttctcctttgttcaaggaaattctccaatcaccactacctcaaaaccaaccaccaccacctcaaactctctctgtgccaatgaacacaagatcaaaatccggcatcactaaaccaaaaaaggttttgtcacttgtcaccacagccaaagcgcctcttcctaaaagtcataatcaagctttattggaccctaattggaatccggcaatgactgatgagtatgatgctatgactaaaactaagattagaatttggtgccacgacctcctaaggttaatattgttagatcgatgtggcttttcaggcacaaatatgatgcagatggagtgctttcttgacataaagcaaggctggtagcaaactgtaaatcaaaggaacacggtgttgattttacagagactttcagtccggtagtgaaaccagaacaatacgggttgttcttgactttggagtagcgttaaactggcccatacaacaactggatgtcaagaatgctttactacaaggtcatctccatgaaacagtttatatgcatcagcctccagagttcgtcaacaaggaatttcccaaccaccaaccatgtctgtaaactagaaaaagccatttatggactcaagcaggccccacgggcatggaattcatggttcaccaaatttttaatgtagcttggtttcatcatgagcaaggcagacaactctctgttcatcttcaaacagggcattcaaatggcatatgttttgttgtacgttgacgatataatgttgaaagcctcctcaccaagtctcattcaaaaaatcattacacaactcaaaggcgagttcccaatgacagacatgggctggctgcatcacttccttgacatcaaggcaaattttaacaagcaacgtatgttcttaaatcaacatgtttatgctcaagatataataaactgagcaagaatgtccgaatgtaagccatgtgcaacaccagttgatctaaaatcaaagctctcggccggtgaaggcaacccaatacctgacccgacatcttacagaagtgtcgatggtgctctacagtattaaacattcacgcgaccggatatatcatacacagtccatcagatttgcctatacatgcatgaatgcgctagaaaggataatctgttacttgcaaggcactaagtcttatggtcttcacttggtcaaagataacatttcaacccttacgacttattctggtgcagactgggatggctgcccggatacacagcgatcaacttcagggtattgtgtcttccttggtccaaacttggtgccatggtctgcaaaacgacagcccactgtatcacgatcaagctaagaggcagaatataaaggggtcgcaaatgctgtagcagaacttacatggctaaggaatctaatgctggaacttcatctccccatcaccaaagcttctctactgtgacaatatcagttcagtatacttggccacaaatctggtgcaacatcaaagaacaaaacatattgaacttcacatacactttgtccaagaaaagtagctattggtgaagtaaaaggtcatccatgtcccatcctcactccaatatgcagacatcttcacaaagggtcttccgacatttctcttcaacaagtttcgaaccagcttaaccatccgggaacccgatgcttcaagtgcgggagtgtgatagaatataagaatattcagttacaatcaagtaggtagactcgtatatattgattcttgtatcccagattttgtggaacttctctgtaactcctttggctatttaaagccttgtaaatcaatgaatctttcgaggaaattattccactaacattgagagggtaagatttgtgttttagatcactattgatgtgccatatctagcaaacaatcgctctctttggtgtgtaatatccaaaagataactcggtatatcagaagtctttttgcagcttctatgcgatctctcagtccacctcccttataatcagagcttcatggtctcgttgcagctaggccttttcttttctaacctttagagtactgattcttggggaatcatattaaactaaaacgagttttattatgaaattcatttagatataattattaatatagtaaacgttattaggtataattttaccatcgaaactaaacggacaaaacctaaaataaatttagtaaccccaaaaaaattgaggaaaataaaataatattttaaagataccggctaagaccaacacatgttttaatggataaagctaggcttggaatttcggcttaacccgagaaaaccaaatcgagaaaaccgaatgtttcggttctcggcgccaacagttaaaagggaggcaaaccgttcggcaaaaatatttttatgattcaaattacggtttggttcggttcggcgagctaaaccgatcggttttctcggtttagaggcacaccatataataaagaagaaaccctagatctacatcatttcatgtcatctcctttctttttctaatcttaatctcttcttctcgcacatccttcttcgatcttgtaattgtaaatttaacaattgagcccatcgttttaaatttagtctacttcggttcgaattaaccgaattaggaaaaaaatcggttaagtttggaattaattttaaacccaataaccgacccgaaaaaaccgagtaccaaacggatctaaaccaaaatttaattcaattcaattcgccagaattttcaagatccaaaaaacccgagaaaccgattcaactgaactgatttaaccgactaaaccggactcccaagcctaaataaaggcaagacatatttctgttcttgatataaccatccccaaatttatgagaaactttttagggtaagaaatttaataaccaacttcttttcttttctttgtcaaacagtaaccaacttctaatctcatgtatactaggtgagtgtccgcgcctagcgcgggattttgttgttgttttttttttgtttttttgtaatatatttagtttatcacacttttttagaaatgttattttataaaagagattatattatgaaggatgaaaactatatatttcttattaagtactgcatattgtttgttaatttttactcataggtagaagattttagtgtgttgacgaaaccgcatagtccagtgctgtttgaatattaacaaacaaaattacatatatatatatatatgtatatatatataatctctttattatgagcctaatttgtaggtatattatatatactttttgtttggtattggtaagttgtaaaggattatagaagagcatcattttagcttactcgtgcatattttaataaatttgattttgtttttaacattcgttttattctctttttttgttattttgtaaaattgtatttaaaaataactattgtttttcaaatgtttgctacttaatttgttcgtattttgatttcttaccccatatatatagttttattgatggatggttaacaattttaacaatatttttgaaactactctatgcaatgattggtaatataagagttgaattttattatatttaaaaattctttgcaacagcaagagatgacaaacatgaaaggaaaaaaaaaactacttgaatttatttattttgaagctttatgatagttcattgcctaaaacattattggtgctaattttaatgaaatgatagttgttgaccaaaactattgtaataataataatttttttaaaaacagtagaaatttattatttaattattgtgttgtgttttggtatttttgtgctttatccttctatcagcctttacttttttaatataccctaaattggtctgacacaaacaaagactttttatgcttcagccttcaagtagggatttgttaatcgtctatcgatctatgttcatatctaatttaatttgctttactgttgtttgacgaattttgtctcctcgaatggctttcgcaattctccgttgtttcttacgatgattaatcgtcaaatctattagttggaactaagccttcagtaaaaatgaaatagggaaatcaaaaaaataaatataaatcatgttttatatttccaatttaagttagtttgtgtatttttatgacaacaaaagagttcatgtgtttttttggcaaatactaaataagttaggttttttctaggaattttctgtaaataaaactaacagcgtttgacgattttgttaacgtcgttaacggtctgttacgacgaagggaagtaatcagaaaataaaatagatcgtgtattttatttctaagctaaattagttagtacgaaaaaagttcaggtagttttctgacagattttaaatagttcgtttttttttatagaaattttccccaatcgcctatgtctataatcataataatttaatatctttaataacaccgtaccaacatatatgaacttcatacgttaaaaaataacttgaaagaatcgcaatcgttataatttaccgtttatttttcttcctatcattttataaaacaactatattttctaattgatcgacacacatatttcagcagctaaatttgttatgaaatcaacatgttagaaaatttgttacaaatttaaggttaatcgtcctcaagaaaatatttaaaaatatagaaagagtgatggttgaagttcttacttatgataggttcatatgttaaattaattactaactatattttacttattttaagaagtttaggtggtaagctctcatgtgctgatctgagttgtgggagagagttgagctactttcatatatatgattagggtaaaactcttttggttttacaaatatgaaggcatggacgaattagagatacgaaattaagcgatcatttttttcagcgaccaaagctcatagattgattgatagagttttaattcttgtaatctttacttgatcaagaagagactatctgtcatcttcgtagactgtgacgaatcaattatttttgtccaaaacaaatgcagtaaaatatgaaacactaaacctacaaatacctttggtgaaaccaaaatttatcaaaacggaggttacaactaaaatgatccaaaattcatcaaaacggaggttacaactaaaatgatttgtgatcaaattagaagaagaagaaaatccaaaaatgatttaatgatctagtaaagcttatatacagaaatcattgggaaattcacttctcttagtatatttttcttactcagatggtgtatatacttgcttatgtaataatttgctttccgagaagtatgtaaagtttgtaatctcaatttgatatcaatgaaatcgttttcctcacaaaaaataaatgaatcccaagttatgttttaacaccaatcaatcattattcaatactctcaaaatcatttcttaaaatgtattatttttaactatgaaactcatctaaagttgtgttaaatacttaccacaaaaaataatctaaagttgtgttaactaatcgtatagtttcttaaagtatcttatcaattattcgtttaaaaaaaaatttggaatgtcttatttttcatcgaccctttgttttgtacatttagtttggtggtgtcttttcataactttcttctgttctgtaacagtgtagtgtaactttctgtttatggtcacattttttaatcatattttaactggttgttgaagaattaaaccccgtaaatggaaacattggttggttaatgggccgaacatgaaagcccaaattagttcataaccctaaaccgaagcaaaacattagctgatagtgatactcttcgtcttcttcttcctccgtcccacctttggaaaagttctcgtgagtcttctctaatgtctgtacatgtcaaggtacataatatattacttattcagggctgctttaaatcttggtttaaaactgatattttccatttcaggaacctgtttgtgaaacttgtggcgacataggttttgaagaagcacttgtcttttgtgactcttgtaagattgagtctatacaccggtgagttcaattctcgatttctcctatggtttgattgaattgtgttgtttataacctatttcacttgttctttagctattgcataggcataacaccgactccttttacggaatacataacttggatctgtgaggattgtgatgagagtgacagtgattctgattgtaaagaactggatcagactgctaagcttacacatatcttgaagaagagtgacaaaaagaagaagaagaggaagaagaagagtaaatatcttgataaatatattttaaaattacgtctgtttattgtaactcttcgtagaagtattactaactaataaatgtgtttctatagtctcttgtttgattatctttttaattattcggttttaacaaaaaaaattatgatcttttcaatttagaagttcatcttatttttatttttaacaataactaaacaaaaattatactcatttatgatggataagaaaaaaattgttaaaattttccataatattctaaacatccgaattcacaataatttttagcgtaaaagaaaacgtaattaaccaaatctaagcaatatagtattttatttaaaatgaatttccttagatttcataacctaatttaattaaaaaaaatcctaagatttcataacctaatttaatttaattttggttgaatgtaagtgaaagacatcaatttaaatcataagattggtgtgttgaaatgaaatattttgaactagcaaatctttagttatacacatatattttcttttgtcacttgaaattttattataaaaacttgttgttgaaccagagaaggaatacatatgcccaaataagggaaactcaagtcggcagacaactaaaagtctccgaagacattgccggggcaaaaaagaaattccccggaaaacaaaaccctattgaagggaaccagagtaaaatgaaactggaaatacaatgcagaaatgatcaaaacacaatcgaaagaggacgactcttaaaactaaaagcagaggcaacaaggcaaaaaccttaagaaaactgatagaactaagagaacagagaagcctcttcttcttttgaaagaccagcaaatgcgacttatcacggctgcccacggccaaaccagaaataatatctaccacctcctatcaagttgagaaccaatctctcgagaaccaaggatatcagaatccgccaagcaaagagcattcatagaaactcatagaacctcgaaaacacttctggatgcgacgaagaccgaagcgtcacttaacgtctagctagaatcctaaaaaaagtgatcagatctaaacagatcttgaaagcagggacaaggagtgaggcagaacctctcaaaaatcaccattcttcgaatgagagcgacaaaggattgagacagttaacaaacaccaaggagaagaaaactctgtaaactatgaagactaccgtaaccaaccaataaacacgaaacttctgcttagaaaggaagcgatcccaaagggagccaaaggctgagcgagaaatcaaagggagcgaggaaaggcaaaggattaggagataaactacaatccaaaaccaagtaaacttgacggcaaagaaacgttgaaaggctcaagagcagcaacaaactttaaggcaggaaagagcagagaagagacctcattctccgagccatagcgtagatcaaccaaattcggaattactaacatcttctctgaagtcacaaaacccaaaagaaattaccgcaacgaccgcttccacaaacccaaaatcaaaatcgaaacaaaccaaaagacttcctaatcgatggccacaaattctgcactcaaaaactaaacaactaaccctatctagtcaaagaaagagaacgactagaaggtcagcaaaaccgaccagaagataccaagaacccatggccacagaaccgagaacaaccaccgacgagaccctagccaaggcagaatctgacaatggcagaaaattcatcttctacaacccgttgggggaaggagaaggacgctcttgaagagaagaacaccgaacaaacctcactgtgaagacccgtctaactcgccaagcaaactaccttcaacatcgaacaccagaactagaagagggagacaagtctacaacaaaaaagaaagaagcagcaggggccctctcacggctacgatgaggagcgccgttcaccggagagggcgatttgaaatctggagatttttggcggcggctagggcaaccttgtctacagagaaacttttttgttttaattatacacatattatgtgacacatttccaacactaaataaaatgactaactaattcaacaccataaaaactctaaaagtctctcctgtgctgacacgtcacctttttcaagtgttctcagcataacacctcattaaaatcaacagccaattagaacatttcgattaatacacttcatttacgttgaccaataaaaacttactatttttccatgtcatctcatcaacttaacaaaattaaaatttgatataggcctaacccaaccaaactattttcaaaactaaaatttatataaaaacatgggcctaaaattcttaaatataaaacttagacctaggcaaataaaccgaaccgaatgtaccgaaccgaaaccgatgcaaaaaaaaactgaaccaaactgaaaatttaaaaataatcgaacggatattaaattctataaccgaaagaaccaaaaccgaatggatacaaatcaaaatattttaggtaaccgaaaatatctgaaatataattatatttcttaaaaaatattagttatttctaaactaaataattaaaagttatttaatagtataaatactcaaaataccaaaaacatatgaaaatatcaaaaataactgaaatatccgaaaatattcaaagaaaaatagctgaatgtatattaaattttaaaaccgaaagaaccggaacggaaccaaaaccgaaccaaaattttaaaataattgaatggatactaaactttataaccgaaagaaccgataaccgtatggatacgaatcaaaactgaatggataaccgaatacccatgactaagaaaccttatctaaaggtctgactggttgaaacacaacagttacagttgcgactgcatgagtttacgggattggacggtttcatattcaagcgttataaaacattttgaacgactggtttagcagttaaaaattggtgcatttttgagagctttatgactggttaacggatttacgtttaggatatgaaaattacggatttctatttttggtggaaaaattacggatttacgtttttggcggaaaaattacgagtttacttttttggtgggaaagttacaggtttacgtttttctggcagggaaattacgggttttacgttttttggcggaaaatcatgtgtttacgtttttggcgaaaaaatgacaagtttagttttttggcgaaaaaattaagagtatgtttttggcgggaaaattacgagtttatgaaaatgttatcatcatgatgaaaatagtatgataatgatggtgatagtattatgatattatgggaaactcaagtcggcagacaactaagggaaactcaagtcggcagacaactaaaagtctccgaagacattgccggggcaaaaaagaaattccccggaaaacaaaaccctatcaaagggaaccagagtaaaatgaaactggaaatacaatgcagaaatgatcaaaacacaatcgaaagaggacgactcctaaaactaaaagtagaggcaaaaaggcaaaaaccttaagaaaactgataaaactaagagaacagagaagcctcttcttcttttgaaagaccagcaaatgcgacttatcacggctgcccacggccaaaccagaaataatatctaccacctcctatcaagttgagagtcaatctctcgagaaccaaggatatcagaacccgacaagcaaagagaattcatagaaactcattgaacctcgaaaacacttctggatgcgacgaagaccgaagcgtcacttaacgtctagctagaatcctaaaaaaagtgatcagatctaaacagatcttgaaagcagggacaaggagtgaggcaaaacctctcaaaaatcaccattctccgaatgagagcgacaaaggattgagacagttaacaaacaccaaggagaagaaaactctgtaaactatgaagactaccataactaaccaataaacacgaaacttctgcttagaaaggaagcgatcccaaagggagccaaaggctgagcgagaaatcaaagggagcgaggaaaggcaaaggattagcagataaactacaatccaaaaccaagtaaacttgacggcaaagaaacgttgaaaggctcaagagcagcaacaaactttaaggcaggaaagagcagagaagacaaaggattgagacagttaacaaacaccaaggagaagaaaactctgtaaactatgaaggctaccataaccaaccaataaacacgaaacttctgcttagaaaggaagcgatcccaaagggagccaaaggctgagcgagaaatcaaagggagcgaggaaaggcaaaggattagcagataaactacaatccaaaaccaagtaaacttgacggcaaagaaacgttgaaaggctcaagagcagcaacaaactttaaggcaggaaagagcagagaagacaaaggattgagacagttaacaaacaccaaggagaagaaaactctgtaaactatgaagactaccataaccaaccaataaacacgaaacttctgcttagaaaggaagcgatcccaaagggagccaaaggctgagcgagaaatcaaagggagcgaggaaaggcaaaggattagcagataaactacaatccaaaaccaagtaaacttgacggcaaagaaacgttgaaaggctcaagagcagcaacaaactttaaggcaggaaagagcagagaagagacctcattctccgagccatagcgtagatcaaccaaatccggaattactaacatcttctctgaagtcacaaaacccaaaagaaattaccgcaacgaccgcttccacaaacccaaaatcaaaatcgaaacaaaccaaaagacttcctaatcgatggccacaaattctgcacacaaaaactaaacaactaaccctatctagtcaaagaaagagaacgactagaaggtcagcaaaaccgaccagaagataccaagaacccatggccacagaaccgagaacaaccaccgacgagaccctagccaaggcagaatctgacaaaggcagaaaattcatcttctacaacccgttgggggagggagaaggacgctcttgaagagaagaacaccgaacaaacctcactgtgatgacccgtctaactcgccaagcaaactaccttcaacatcgaacaccagaactagaagagggagacaagtctacaacaaaaaagaaagaagcaacaggggccctctcacggctacgacgaggagcgccgttcaccggagagggcgatctgaaatctggagatttttgggcggcggctagggcaaccttgtcgagagggattcttttttgttttagttatacacatattatgtgacacatttccaacactaaataaaatgactaactaattcaacaccataaaaactctaaaagtctctcctgtgctgacacatcacctttttcaagtgttctcagcatgacacctcattaaaatcaacagccatatagaacatttcgattaataaacctcatttacgttgaccaataaaacttactatttttccatgtcatctcatcaacttaacaaaattaaaatttgatataggcctaacccaaccaaactactttcaaaactaaaatttatataaaaacatgggcctaaaattcttatctagaaaacttagacctaggcaaataaaccgaaccgaatgtatcgaaccgaaaccgatgcaaaaaaaaactgaaccaaactgaaaatttgaaaataatcgaacggatattaaattttataaccgaaagaaccaaaaccgaatggatacaaatcgaaatattttaggtaaccgaaaatatctgaaatataattatatttttttaaaaatattagttatttctaaactaaataattaaaagttatttaatagtataaatactcaaaataccaaaaacatatgaaaatatcaaaaataaccgaaatatccaaaaatattcaaagaaaaatagctgaatgtatattaaattttaaaaccgaaagaaccgaaacggaaccaaaaccgaaccaaaattttaaaataattgaatggatactaaactttataactgaaagaaccgataaccgtatggatacgaatcaaaactgaatggataaccgaatgcccatgactaaaaaaccttatctaaaggcctgactggttgaaacacagcagttacagttgcgactgcatgaatttacgggattggacggtttcatattcaagcgttataaaacattttgaacaactcgtttagcagttaaaaattggtgcgtttttgagagctttatgactggttaactgatttacgtttaggataagaaaattacggatttttatttttggcgggaaaattacggatttacgtttttggcaggaaaattacgagtttacttttttggtgggaaagttacaggtttacgtttttctgacaggaaaattacgggttttacgttttttggcggaaaattatgtgtttacgtttttggcgaaaaaatgacgggtttacttttttggcaaaaaaattaagagtatgtttttgccgaaaaaattacgaatttatgaaaatgttatcatcatgatgaaaatagtacgataatgatggtgatagtattatgatattatgagagggtaatgatgatgatgatattgtgttgataatgaataaattgatgggtggatgaaactatttgaaaaaagattgattatattcaatcggtttagagattttgattaaactcaaattgatatcggtttagagatttaagttggtttaattcattttaaccaaaatttgtgggttcttattgcaatctaactcatttgatccatttaaccatttgacccaataacttatttgaagcatcaattcatttgagtaaaaaaaattaattcattagagttcatgggttgagttgaattggattgacccatgaaacttgacctattttgacaaccctaaaaatagtctataaaaaaacaattgtaaattgagtaagtatatttttcaacattatctttcttattagatacttataatagttttaatgtattgatgataatgaaggtcttcgatttttatattgttatataaacgatggtgtattaatgattatcaagattatggaaattttttattttatgtattactaatgtttatttttataatatatatatatatatagatacaaaaaatgttaagtacttccttttgtatatatttgtatcttttaattacttatatcaatggtatttttgttttaatataattgagtaaattcaaaaggataaattaattggaaaaattatgtgagaacgacacataagcatggcattttcgttaatcatccatgaggataaagttattttaaataaatatttctcaattaatatataagggatattggaaaagagagaatataatcatatttacaaaatctaacaacataaaaaacaaactctccagaacaaaactatgaccatggcccaaccaaaatcaatgattaagctggctgatttaaacaaagcgtttacggttatgaatacggaagtttgctgaagcggacgattgtaatttcaagtgtcatgaaacattttgaaccattggtttaatggttcaaaattaaaacgtttgcaagagttatatgattggttaaccaggaggtgctattacggttaaactaaaataacaaaatattataatttataaattatacaaaatataaaataccaaaaatattatattattatgataaatgtgaaatttaaatataactaataataaaattaaattcttcctaattattcaaactaattaaattttatactcaaatatgcatttgcttcataaaaagaacatcatcaagtaatatggaaatgacaaaaaaaaaagattaggacaaattaaaaaaaatattttcaatttttgggtgttctggattaataatattattacaatacttagttagtatcttatcattcttcagtttgggttgatactatgattttgatagagaaaaaaactaacattttgtgaataaaaattaccaccatatattaaagttttgaggaagaagcttacactgaaaagatgacattgttgatgtaatgtgtaaacaagcaaaaaattattacaactaagatgtcatttttgttctttaaggtctaattaaatttatctttgaggtatggttactctcaaatctccaataatcaattcgatttttgtccctatatttttttgtttaagtgcatctattatctatttttttggttcaagagtttatttctgaactgaatgaaatcttagcataaggtaacatcgaagaaaaaggtcaatggaagaagaattttaaagaagagacattaaagatttttgagtttcttcctcaaaatattcaaggatcttatcagatttactaagtgtcattgtggattttaatcaataactaataatcatctgagtacgttttatactcccaataaaaaaatatttaattttcaaattctgaaaaacaaacaaacatagcttttacctttttatgcctcttcaacatatgaatcaagtatgcatgtggaacattaaaaatcaaagatgataactccatataacatattcttaaaaatctaaaatgactttaacctcaccagaattagcaaatggtgattttttaactcttttcatttttagtttcttaatgactcttctaaatagatgttcgtaaagcaaaaaattagcttccaaaacttataaaggctatatagatcttactaaacaaaaataaaaaaatgcattgtgtttccaatcacttttttaatgaatctttttgtctacatatatcatgaatcatgacaaataacattcaatacctacatacatcttaacaaaattatattaaaaaaaaagcccgcgacttggcgcgggttttgccctagtcactttaaaaacatgtaagagaaaaatttaaacatttactgagatatgcatgtgatgtgggagaggtgattgtggccgaagacaattatagattaaccaatgcatttaaaatcccttcataatttaattttaacttaatttcagacgacttcttctcaaaattttatcaaattcttcgaacctaccaactaaacgaaaccctaaattgtttggaattatctttcttttggattttcgtatttttttgaaatcagtatagatgataatttaatcaagttggtaaagacaattcaaatatttttaagatatagacatataaattaatgtaaatcgtttgtaaacatttaattatgataaattgtctacatgttgatagtaaagacaatttagaatattatattacttaaaacaatttttatcaagttagtaaaaaaatagtttaacatcaagttaacatatataaatcgtctttgttagttttcttatttggttaagaaaaaataaaataaaattttataagatataaggacatgtaaaattaatataaatattaataagtttaattcattttgatacatataaaatcggattgatagatttgacacgtgttacgatcatgcaactttgaaaaccatactatatataattattatatgtgatattttagatgatttcaactatgattttcttctcatgaaaatattatgataaaagtcaattttacattatcaataacaaaaattcactatattactatttaaaaaatggaaaatgcagcaaccaaataatatttatgtggttgttgaataattaaacgggaatatgtcattaaaatccccaacttattcaaaatattgatttaaatcctcaagtctcgatgcaacaaaataaatatcaaacttaaattgactttccaaataaatactcaacttttgttgattttctaaataaataccaaaagtttattgatctgacaatattaggcatgacgttatgtaggttaatagaccctgttatcagagtttattgtgttttaacagactcgttaattgaaaacgataacgttttctctaataataaaacattatctttttgtcataacgaatcaattaagtccctagtttcaaatcatatggggatttagggttagggattttgctcggtttaggggtcttagattgatttggggatttattttagtcattacaacacaacgacgtggctctgttgttggaaactataatacttcgaattaataagatttattaatttagttaacagtatttctaatatggccacaacaaaaataaagtatttatttagacagtaaacataaatttaatatttattcgttttgtcgagaattggagatttaaatcaacgttttcaatatgtcgaggatttaatgatattttttccagaattaaaccctataattggagattaatggtccaaattgattataaaataaagaaagaaaaaaaaaaactaaaccttagcaaaattgttaacttctcttcgtcttcttcttcctccgaccttggaaaatctctcgtgactcgctagtcttctctaatgtctttacatgtcaaggtacataacctattgcttactttgataccaaatttcacttagggctgctttaaatcttggtttaaaactggaaaaatctgatctttttcattttcagggacctgtttgtcaaacttgtggcgacataggttttgaagaagcacttgtcttttgtgactcttgtatgtttgagtctattcaccggtgagttcaattctcgatttcccctgtgcgtcgatcaaattgtgcctattaggtttctcctgtggtttgattgaattatgcatatacctatttctcttgttcttcagctattgcttagggataacaccgattccttttacggaatacataacttggatttgtgaggattgtgataacagtgagagtgattctgattgcaatgaagttgatcagactgttaagaagaagaagaagagtagaaatcaaccccttgtggttttagctgaggacaatgtgctccaggaacctttggaggggtctaagagagaagaaagctcatgtagcagaaaacctcatgaattgacttgtttagatggaaatggagaatctgttttggaggctgcagattcatctagtgtgccagatcatagttcttgtactagcaaaaggaaagaagttgatcagactgctaatcttggacatatcttggagaggagtgagaaaaagaagaagaagaagaagaagaaaaagagcatcaatcattcgccaccggttttagctgttgaggaccatgagcttcagggtactaccaatgttgttgaacctgtggaggtgtcttcttcttcaccaactaaagaaacgatggagtctaagagacaagaaagctcagatagtagaaaacctcatgaattgacttgtttagttggagattcggagaccgctaattcatctagtgtgccagagcataattcttgtgctgtcaaaaagagaaaattaagttctggaaacaaacagattcagttagctgatgggagtagttcttgcagagtggctgaatcaaatatgcctctaacgttgacatctaggaactatagagcacaacctatcaaaataccgatatggaggtaaagaaaagaatgtctttagttgtaccgctttgcatcctcacttacttgaattctgatctgttatatcaatttctaggggattgatgtctgttaaaggaggaaacagctgtaccatggatgggattgttgctcatgtatcaagcttagcctgccctaaagtccatgaaacggctagttcattaaagggtcggctctctgctgaaatacttcctaggttggaagtatggccaaagacctttttgaagaatggaggacctaaggatgaaagcgttgccctttttttcttcccttccagtgaaaggtgtacatgaaacagtgatttgtttttctctccctatgcttatgttgtaaaagtatctgaccatttttgtgtttggtttccagtaatgatgaaaaggtttttgattcccttgttgataaaatgaagaagaatgattctgcgatgagatgtgtgcttaatgatgcagaacttctactcttcacatcttatatgttaccaaaggattcttggagtaagtcaaatggaatttgttttgtctgtaatcattcgttttttcgcatgaatcggtaaagctaagagggttgattatcgtttgcagcttttaactcaaagtactacctgtggggcgtcttcaagcctagacagacttctcgatattagccactccaagactcgctacctttaacagtctctaacttcgagcaaggtttaacagacagatggaaatcataagtaggacttaaagtattctccttcatcctttttgagtatatgttagttctttttcggatttaacgcatagatgggtttggttgtccgattgttgatagttagccagatgctgtatagaatcggaaccgagatggcatccttgatagcatatctttgtcttttgaggctttttttggtggatttgtgccactggttagtcaaatgaatgttaactttgaaatcttcctgattggtgaacttgataattgatcttataccttcatagacattagccgtctgagaaaagatgtattcaataatgaaaattctgtcacactttttggtctctgcaatctcagttgcagctggttgtttcagccctttttagtttagtctacttgctcttaagtttgtagcacgaaggtgtagtatacttggtgacgtttcagttttagtacatagcctacgtgctggtgtttaggtatgagatgaactgacaagttttttgaagttgatcataagctggatgcttacagtgatctctcatattacttactctcgcaaagaagttacagagatgatcattgaagtctacttttgttgaaagtctttgtaataatgttttaatctaatatgctgttcatgtggactcctctactgttgtaacaggctggcttgaatataataaaagggtcagttaaaaatatatacatgggagagttaaattaagaatgtagacatgtaaatttgacttttgggtgaaattaatcttgcaaaacgaatattataactatacctctataagtatgagatattcgtagttaactgaaaaaatatatagagcattaaatgcctagagagaatctgccaagatattccgccgcatccttaaaaagtaaaaataaacagaatcgtaatgatgaaactggacatgatttgggttgcgtgtttggctatttattacgccagtatccccgttgcttcaacaacaaaaggaaaaacacataacaataaaaagcgtaaaacttacctttaatgcttagaagataacaagatcaagagaattgaagactcatgtacgtagttaatgcttgtgttactttgttcgacataggtaacaggtaataactagtgcacccatggtttgccgatattgacacacgtccgctaacattacggttatggttgaatatgaacagataacatggcgatggttgttaggctggttcggggagaatggaaaagatgaaacatgatgttatgaacacgtagccaagttagatgggttatgcttggccgtaaagctccgagagcgagacggattcgcaaaaatggttgaagatgtgaaggaaagattgacgctgaggccaaaagatgaagtggaactatcttatcagtggccacagtggctgtgttagaatatgcggaatagagtatgagaagtatgaaaaaatatggagtttatagagaagagaagagccaagattagaaagtgaagttgttacttagattagattggttacaatgtagggaacaacccttttatatagggagacactagggttccctttacaacaaacaaatcgaatgaaagtgacatgaagagagaggagaagacttgatctctaggttgatagtgacttgaccatggtttaggtgaaaccttagactacctgtaactcttctctcttctcccttctaacggctctattcgcaactctagaaggacttgatgggctcaattggttaagcttcttatcttctccttattgaagtctaggcccatgttccatgtgagttgcttgactgatactccccctcaagcttagcctatgatgaattggttaagcttggaacccatgatacattacctcattaaaaaactttaacatagaaaaccgcatgggagaaaactatgttaagggaaaaagagtgtaatgaccatggattagggaagatgatcaaggacgtgtgagatcgacacgcccaagtttgttgtaaatgtgttcacaaaccttgcgacttgccccttttgtaaaaatatccgtcaagttatctttggtgtccgtatagcacgatagtatcattccttcgtctatcttctcatgcaccttgtggcagtccacctcgatatgtttggttctctcatgaaagaccgagttggtagcgatgtgtattgcggcttggttatcacagtgcatagttatcgggcttgatgattcaataccaaagtccttgagaagtgtcgtgagccaagtgagttcattagttagcttcctcatagctcggtactccgattccgcgctcgagcatgaaactatcttttgcttttttgtcttccaagtgactaagtttcctccaataaatgtgcaatagcccgttgttgatttcctatcggtggtatctctaccataatccgcatcacaatacccgactatttcggtactatcgctcttccccatccaaattccttggcccggactccctttgatgtatcgtagaatcctctccaacatgttccaatgatatttggtgggggcatgcatgtgttgactcacttgatgtactgcaaaacaaaggtcaggccgtgtaatggtcaaataaatgagcttaccaactagtctccgatattgagaaaaatcttcatatggttcatttaacggatctattgttgcattattcttcttcttccccctgttcgcttgaccgtatagccatcaacaagaggtgtcttagccggttttgatccaagttttcctgtctcattcaaaagatcaagagtgtattttctttgtgaaagaaataagccctcgagagagcggcatacttcaatccctaaaaaatactttagttcgccaaggtattttatatccaatgtagatttaagttagagtttggtgtcatggataccttctttgttgtctccagagatgataatatcatcgacataaatgagaacaacaatgataccttgatcggattgaagtgcgaagagagtgtgatcagcttcggacttcttgaaccctttttcctttagagtagtactcaacttatgataccaaactctaggagattgttttaagccataaattgccttccgaagtcgcaaaactttccccagagcaatggaatcctctagtcccggtggtggagtcatatacacttcttcttctagctctccttgaagaaaagcgttcttgacattcacttgccataagtcccacgagaggttagtagcaaaagatagaacaactctaaccgtgtgtagcttggcgacggggtcaaatgtttcagtatagtcacgaccataagtttgagtaaacccgcgtgctacaagcgggctttatgcctttctatctcacaattactcaagtactttatcctgaagacccattttgagcttaccgcactcttcctctgaggtaactcctcttcatcccaagtgtggttacggatcatggctccggtttcatccgccaccgcaatcatccactcttcactctctttggcttcctcataggtttgcggaacgaagttttcttctatttttcccagaaaagcttggtgatcttgtggcaagagggcaagagaacacactgcttgtatagggtgagctaccgccttattgttgtaatacaagcgggaagatttcctcttaatccgagtacttcgtcttaaagttgaggtagcttgtcgaggaagttccgactgaatggtagtggtatgttggtcggttaactcttgagcacttacatcttcatgttgagtgagaatatccacatcatcatatgttgggattccactaacgtctccatcttgttgtaggtttggggtttcctcttgttcatggtcttgatcgagaacaaccggttcttctaccaagtctcttgtcttgatttctctttcacttgatggagtaactccaagatgatcaagaagaaactgtaaacttgtagcacgatctgttgagggtgtagaaagatcggccaagctattccaatctttcttctcgtaatatcctctttcttcaaagaacttcacatcccgagacacatacagacgttgattaatgggatcataacacttgtatctcttttgagttgttgagtatccaatgaacatgcatcgagtactttttgcgtctaacttgtttctttggtcaccggatactaatacaaaacatacacaaccgaaaacccgtaagtgatcaagagagagtttggttttgttgagtacctcaaatggagaaacgtcttgtaggactttggtgggagttctattgataagatagcatgctgtcattacagcatctccctaaaacttcttggtgacgtttgtatgaaacatcatcgatcttgctacctccatgaggtgtcgattctttctctccgccactccattttgttggggtatgtaaggacagctcgtttgatgaataatgccatgttttgcgaggtactctttgaatttgtgacttgtatactctccaccattgccggatcttagtaccttaattttagcattaaagtaattagtgacatagttttagaaatttataaactcatctatcacacaaatttttagattgtaacaatgtgatccatgtatatttagatttctcatcaataaaggtcacaaattacttcttattatccatagatatgcaaggaaacgtccaaacatccgagtgaactaagtcaaaacaattttcataaatagtcaatgactttggaaaaatagatttgtaatgttttccaagaatacaagactcacaagtagagttatcaaaggaaacattccgcaacattaatataaaagcacgagcatgagggtggcctaatctagcatgccacgcaacattcagattactagctaaacaagaattaagtgaaactgaagtacaatcactcaatggggttttctcaaacacataaagatctcctttagcatctccctttccaagtacccttctggtcttaatatcctgaaaatgtacactactaggaccaaatattgtatagcaatttaaatcgttagtagctcttttaaccgataaaagagttaaagtaaagctaggcataaagagagctttagatttcttatcaaataagtttaagtctcctattccttttaccggtactttatctgcatttgctataactacattacctaaagccagttttatgctgtcaattagactagggttgtttatcatgtggtgagaggcacccgaatctatgacaagcattttactcggttcagaagtaaagaaagatgtatcagattccttaagcgttttacttggttcataagtaaagaaagaggtaccagattcctttaacgaggcaatggatcttatgagagcctccaaatttgacttcctcaccacttctccttgatcacttgcaacttcttgagatatgtttgcctttaacttagccggcttgagatgaggatgaagaatccaacatttgtccttcatatgacccttcttcttgcaatgatcacacacccatgccttcctttcctcacttttgtagatcccttcgtgagccgtgagaagttcgcccttacccctaaatagtctgagagatccttgttccttttgcacttgggaacaaacattttcaagtgagggaagtttgtcgactcaaagaaggtgtttgatgaggtcattgaaggcatgattgagactaaggagaaggccaaatactttgtcttgttcctttctctcgttaagaatggccgaatccacagtaattggtcgaagcatctcaagttcggcccatagtgaccgaaacttcccaaagtgtttggtgaactccaagtcttcttgagtgagattgttaatggtcttcttgacttcaaagacccgagtcaagtttgacacatttccatacacattctcgagcgtctcccacagttcacgtgcagtttcacagtatgagtaagcctcaagaatggagctctcaagcgagtgttgaaggatagttagaacgttatgatcttcttgaaaccacttggcttatttctcgatctccgcttcttcttcttccctgttgaacccttcactgccgtcttatttggtagcttaaactgaacatgtttggtctcaacatggctccaaatccctcgacaacataacactgtttttgtagttctcttccataggagatagttttctcccttcaagatcgccggttttggagtctccatgatgagtgcactcttttaaccgttgggtaatagagtgtttcttgaagagaaatgtgtagatttaagaagtagatagaagataagtagaatagagtaagtagaagagatttagcatgttaagaatcgaagaacatgctctgataccatgttagaatatgcggaatagagtatgagaagtatgaagaagtatggagtttatagagaagagaagagccaagattagaaagtgaagtggttacttagattagattggttacgatgtagggaacaacccttttatatagggagacactagggttccctttacaacaaacaaatcgtatgaaagtgacatgaagagagaggagaagacttgatctctaggttgatagtgacttgaccatggtttaggtgaaatcttagactacccgtgactcttctctcttctcccttctaacggctctatccgcaactctagaaggacttgatgggctcaatgggttaatcttcttctcttctccttattgaagtctaggccatgttccatgtgagttgcttgactaataggctgatgggcccagataattggcagcgagcaaacccgattcatattctcgatgacgaggatatgacattgttcatggcgattcaggctgattctgagggggttcatctgaaggtcaagaccatacgggggtgtgtggggcccgaaccgttaattcataccgtagcggcgtagatatcggtagtatgactgcataagcgatatctgataactgctggaatagcgctgagacaagagcagccaaggattcagccgtaacaaggatgttattcggtaatttacctactaatggcgcaatagcgtttagaaacaagacaagaatgttttcggaagccacattggcagactggggtaggaagcatcgtacctagaagcctaacccaaagtcaaccaattgcaaccgctaaagggaaggaacatgtcctagacaaggagaacataaaagacttggagtttgcattgtggaggaaaaaccaacagtgagaaatgctaaaagagatggaaattagagaaatgtgtctggcaatgctgaaggaccagtcggtaatacacctgctaatgctcgtgatagcggagttggagggcaaacaagtacaaatccggagaaggctatacgtcttactcttggaagcacataaatagctcgtgacgatgtttcaatagttgtgttatcatcaacagactcaacatttaagacaccatcgaatagcggaagcttttcaagtgacgaggtgatggactgaattatcaagcaacaattgtcttattaggataggtatgttatcagataataatcgggtgtttatagtagtcaacttcatcacgataataaagtgcttaccgacagcaacaatattagtatgatggtaacaaaaatgttatcgagttagtgtcaacaaaaaggtacctcgcatttggcatccacatctttagcattgccaagcttgagggcggcttcttcatcagattcagattcagtaccagcaacctcatctactatatttgagggccttcctggacggcggggctgctttcaaaacaacaaggtacaaagcgtatagaagaccttgaaccgccacacacgtagtggcgagctgttcaagttccctctcttgaatggaagtcagcatcatctcgaaagacaaacgcccccatgggtaagacagaaacccctgcagatcctcagctatttcggcgtgatctttcgctatttttggatagtaagaggtaggcaacaaaaaaccatccacaagagccaaacaagcatatcttaaccttatttctctatcagttaccacccttttttaaacatggtaataactttatcaacagtaacattttcttcgagaccaaacaaggaattgtaataaggaatctgcttcctagctgtccctttcttttttttttttggaccgccagatactttccacacggaagccgagtaacgaacttgaactctcttaacaaaaatcggacaggagtaccagcgtacacttcccagatttcattaggattggcaacttccaattgccgactccgtaagaattgaccaaaactcgcaaaaaaccccgacttgttcggaaactccaaaagccgtcccagcaaaatatcgccaatgaaggaccgcttttgatcatcaaagacgtttataatgccgcatagggttttgattttgtggtacacattaacctctcgccgagagattcttctccaaaagcaatcaatcgatttggtaaatcaacctcccccatgtgcatataatacaaaaaaaaaagttaaaaccattgactgactacaaaaaacgaagatgagaacagataaatatagagaaaagggcgtcgacgcttcatttttctaataaaggtcaattaagttcattattaattggatcacacttctccaaatcaaatctcttaaaagattatgttcccgtctgacacaatactaggctagcggtaatgaaaatttcaaaatataatataaggatacaatggtatttgcaagatgaacatagaagaaaaaacagactgttttaaacagtaggatttcaaaggacttaatttgacagtcttctgagtacatgaaatgataatatccatctataatttttatttggccaaaaaatagttctaaatttagaaaagttttttttggctaataaaaattctaaacaaaaaaaaataggtttccaatttgtttctcaattctagaataaaacggtttatctacctacttagattttcaaaattagagaaattaattttttccgaaattggagaaattatattttttttccttcccgacaatatatttacaaaaatatctcaaaacccttttttatttattttatttattttaattatacttgttaaaaaatacaaactttctattttcgacgtaagtatcagtgttgcaaaggaatccttgttagggctggtattggaggagtatcagtgttgcaaaggagtccttcttagggctggtattggaggatatatatatgcttgctcgagttaaccaaccgactaaaaatttcttctcccgcaaatttcaggtttgatgtaccatttttttaatatatattttttttttcgaacaaagaggacttgctatctttgtaatcatcttgacccctaaatatattttaatttatattaaaaaaaaaaactttttgctgtgatagttacaatgcttagttcaattacaattcagattaagctacataaaccttttatacgtaaattaacatgatctagttaaaacgctttgcaatgcattaaggtgaaacattcatgccatacatataactgttcatgctgattttcattctttatcatctcctgcacttaccataatgccaatacatgcaaagatcaatttaattagcctatcaatctatcatgccactattattatgattcaatttatttgtagtcctaatcgcttgaattagcaaataatgccatatacggtcattatttatgcaactattatttatattcagttacaatcaatcatgtaattctttgccttctgactttagattgatcattagttaactcaactcaagtcatggattcaacatcaatcgaaatccagttgtattaatttcatgaattagcagtcatgccatgcataaaccacttaaccacattcatgtgatcactttggccaatatgcagatccaatttgcctcgaccaagaatttcattacaaattcattattacacaaatatcacttgttccttttctcttttcagtatctttttatttttgaggatatttaatcttcctctattattatgttttttttaaaatcagtttcttaaccaatattttaaatactaagggatttgaatcgctgatctcagtagtaaacacgtgctacttaagtgtttgtgttacgtgtatattttttttttggttataatcatacccatattataacagaaagttggtttcagtatcttgatttgttttttttttcctctaaatagtagtgaattattttatttctcctatcttcaattgagcaagtcgttggtggaataaacctcaccaaatgagactacagaatgttttatacttaaattgtttatacaataaatagaaatatactaacaaaagtgtactatatggttgggagatttttgtaagaatatttattgctaaatattggaagatattttccgtctaaatttctactttattggataagtcgttggtggtccataaatcgttttaaaaagaaataaaagaactttacaaactacaagattgtagtgacgtatttaggaaaacccggttcaatgtaggcggtgattggctaaattagtttgcattgctgcaagagttaagtcctgagagatgatgatgttaaaggttccttgggaaaccaaataggataatacttagaagccacgtgtgtgtgaatttctgctaatattgcttttgcttggtttctatacggcaatttcaggttgattcttttactctttttttttctgtatttcttacatatttgcagctcatttattatattctaatattttataaagaattaaataaaatatctgttatatttgatctgttatttttattttaattcgatctgaaaataggatatctataaatgaatactgataaaacaaaaatcacaaataccaaaaaacttaaatatatccgttttatatacattctaattcttgtaaaaaacgtttccattcttataagggaataattttgattttgtaatctgaaaaaatgacaaaatctattaactatttaaaaaagagctatccacataaaccattcaaaaatgctaaatctataattgattacctggataatttgaaagtcaacaaagtctgtatccataacgaagatcaaaataacctatttacttttctatcatcgttcttaaactaatacacttaggtcattttcaaggggattacaaaactttaaaatagaatagaaatgtttactttttctctctaactaaattgtagaatttacattattatagtgtgattcttttttttttaacaatatatcactatatttggtgtgttattgtaaacaactgcaaaaaataaaatattatttccttactatagtatattattatatattaaaaagcctatttctgattaaaaaatgatttatattgctatttaataatcaaaaataagttttataactaaaattaatgtatcaaactaattttgaatttaaaatttttattttatgaattattaattactcggttgtatttaaattaatacataatttggctgaaaatacataatgaaattcaattagccatttattgtttgtaatttatattaattaatgaattacaaaactattaaataataaggagaagtttttgttaagtaatacaataatagaaaataataattttagtgtaatatttggtgttgtggttggaaaataaaaaaaaatagtgttaaagttacactaaatatagtgttatttcttatggttggagatgcccttacatactctaaggtttgtcactgtgtttaataatgtgtatctctagcatttgcattgtgatgtgacaagtcctagtgaccaacttctactttcataaccttagagtgcacatttttattacatataacaatgggtttgaatggtaaccattgtcatagcagtacagttttgtatagatttgacagttaccaatcacaaaagctttatcaaaaatgttacataaagtttttttgtacagctttcttgtacatctcattctaacagttttgcattataccgataaaactaacagttccaactaacagctaaaaagtttatacagttttttgttactaatcagacccaatatgtatctctaacacaaattaacatatttactgcacaattcatttgacttattaagctcatattttgactcttcgcttataaacgagatttcttgccgatgaatgatttatatatgaccagctagttttttttttctaactacaaacaacacaaaatgatcatattaaccacatgtattatgagggattgaatagtgatgatgacataatgataagagtagtacaaatctatgaattacatattatggtttggaatcctaaatattaatcagaaaactaaacaagaaaaaaatagtatgaaaattgaaatggttcttggtcatagaaacagacaataaattaaaataaaagttggaaaagaaaacgtaaaataaaagcaccaccgctaaaaccaagcattaacagaaaacctcccgagtaatagattaaaaaagtataatattagtacgagaaatgttttgctgcttatacatagtataacaaagtgcatgatcacatatgtatactattatatccctacttatggtatatgaactatagaacacatgtatactgttatagagtagaacccccccctcccccccccccccaccccacacacacacacacatatgaaatacaaattttttatttaactatctaattatactgttatagagtagaaccccccctcccccccccccaccccacacacacacacacatatgaaatacaaattttttatttaactatctaattatatgtgcttttaccttatatatttaatattttaaataagatggagtattatgtatcaacaacactaaacaagcacatattaaatacaacacaaatatccccacaatcaaactaaacaatcacacagatacagtaaaaaaagtgtccacattaacaataatgaaacagcttaataatacaccactaattaataagcattgaagaaaaagaaaaaaaacaaatatacaataaatctaaaacaagaaatttcagtcgatacctagttcagttgcattgcatataaatcgaaagttgagatatcaaaaaaatggaaataaagaggagataaaaaaatgaaaagaaataggactgatcagaaaagtgggaattaaataatagcaagaaacgtagttttacttattaagtcggttctccattcataaatatttctttgtttgtttgttaaaatgttgcaataattttgtattattttattttacacgtaactttatttattagagtgaaaaacttcgtcgagaagaagtgtttgtctataaataacgttacgaatacaagtacacaaggcacataaacaaagagcggaagttaaaacacagagagcgagcctccacaaaaaaagaaagagagaaagagaaatggtgggaggtaagtggcggttcctagaagtagcagtcgtagtaatggtgttgcagtggtcgtgcgattataatggtaatttagctgaaggatttccagtacaagatcttgtgacaaagctgcctggacaacctgaagtggcattcagacaatttgcgggctatgtcgatatcgatgtcaaagctggtcggagtctcttttattacttcgtcgaagctgagaagcaaccccactctaaaccgttaactctttggctcaatggaggtttgattttttgaccctgtctcttgtttttattgtctaacgtttttctttaaaatttgtttttttagataagggttttgtgcaaaaaaaaaccctctaactcatccatttttgtaattttatttcccactttcaacaaatgtagattaatcttacaaaatctaaaataataagcaatatgacccttatatatatattataaacttttttacggtcacatatacattgcacttttaaaattttaaaaggtaaaattaaacttttcatcgcgagggctttgatttaacactatatgtcaatatttttcaaaattgatggtagtaaaaaagagcgaaaaagttacagcgcgtattattttagacttcaaaagattaatctgcatttttcagaggcggatggtaaaattacaaaatagatgagttagtggtttttttttttcacaaaaccctttagagaaaaggataaacttgtataatttggtttaaggttttgtgttggtttgtctatttatttcccccaataacatgtaatatacagatttgaactcggataatgactatgtgacatcactaatgcaaattacaaaaccacaaaattttgcgaaattatcaaatagtatatttagttacatttatatatattgcgagttagaattatataatttttataaggcctcctctaataaaaacagaggaattattgcaggaccaggctgttcttccataggaggaggagctttcacagagttgggcccattttaccccaccggagatgctcgtggcctccgcagaaatcccaaatcttggaacaaaggtttctcttcctaactaatagtatattttgtactgacttatgttaagtgtccttaactatgacaaagtttgtcttgttaacttaattattgtgatgtagcctcaaatctattgtttgtggattcacctgctggagtaggatggtcttattctaacacaacttctgattacaccactggcgatgaatccaccggtatactctcaaaagattaaatcattttttggtcattatttttaaaactaataaagtttcttgaatgatgttttcaataatagccaaggatatgttggtgttcatgttaagatggttagaaaaatttccacaattcaagactcgaaacctatttctcgcgggcgaaagctacgcaggacactatgtacctcaactagccgatgtgatactcgaatacaacgcacaacggtcaaatagattcaagttcaatctcaaagggattgcagtaagcaataagaaccaaaaagaataaaacaagtccttttaaaaaatctctattttgctctgtttttgattaactcctatgcttttgatcagattggaaatccgcttttgaagcttgaccgcgatgttccagcgatatatgagttcttctggtcacacgggatgatctctgatgaacttggcctcactatcatgaaccaatgcgactttgaagattacacattcacagattcacacaacataagcaaactttgcgaagctgcagtgaatcaagctggaaccatcatcactcaatatgttaattactacgacattctcctcgatgtatgctacccgtctctcttcgagcaagagcttaggctcaagaaaatggtaagaaaaaaaggaaaactagtttgcccccaagacttctactatttggttgcatttacatttacatttggtaggaacatttagatattattataacataactttttctcaaaacaaaaccacaaattgtagtattttggacatttattttctagtgaaataattgaaggcttaaaatatattttggctctgattgctaacatgcataatggcataatgacgttttctaatgcgattttgcagaaaatttgtcaatcaagaaaatctgcataattgcattagaaaacgcaaaaacgcagactctgattatgttttaattcaagattagtttgattatgttttcacatgaaaatggaaaagccgacattttaaatggataaagatatacagcctaatggtttctgctagtaccatcgatgcgcaaccatatatgttcaaacttcataatattgttgaccaaaaaaaacacgtcaaaaatgattttcagggtacaaggatgagttttggggtggacgtgtgcatgagctttgaagagcaattgtatttaaatcttcctgaggttcaaaaggctctccatgctaaccgaactaaactaccgtatgaatggtctatgtgcagcaggtatagtataacttgaaccatctctaatcttaatctatatgtcatcatttatttgaactcttaaggttatgtttcatcatcatagcctcttgaactacaaatacactgacgggaacgccaacatgcttccaattcttaaaagaatcgtgaagagcaaagtccctgtttgggtcttcaggtatattgattccattctttagacccttaatttctttgttcttctactttagcaatctggtggtaaacgtttaaataaataaaaagaaaaattaattactcagatatcaaagaaaagtatgtttatttttagaatattatacatctttttttaattactcatatgtttctagcatttgtggaattttactcagatgtcatacaaattaggtgtatttaccataaccttacaaaacttttttttattactgcagtggagatgaagattctgtaattccacttcttggttcaagaactttggtaaaagaacttgcagatgatctcaacttcaataccacagttccttatggagcttggttcgacaaaggacaggtttgttccacagaaaaccttatgtatgctctgcacttggtttgaccattcggtttcgcttggtttcggtttcgatttggtttggttttttttttagtataaaaagtggaaaaataatctaaactaagttatatattttatgtgtaataaaatgtattttttggttaatagtttagtttataatgaatcttttaatagactaaatttgttttgattttaacttcgttataggtgtaagaaaattactaccgttgttttcatttttaaatgtttggttcggttgcaattttttttttttatagtttgttaggttttgtacttaaccccttattgacgtttacgtaggttggcggatgggtagtagagtatgggaatctactgacattcgcaacggtgagaggagcggctcatatggtgccgtactcgcagccttcacgagctttacatttgttcaccagctttgtgcttggccggaaattgccacacaagtcgcctcctgctcttcatgattgaaggagaaggcttctccttttaattatcttcgttggtcatttttctttctttttttcgagattggtttggttgtttcagttgtgaacaatgatttgaataatattattaagatatatatggtgtagtgtcataaatattctgcaaaagaaacactaagaataagatctcacaatgctctttagtttcaaaaatcaatgttggaaactggaactatagaaggatctagaatatgtttttcaagaaacgtatagtatagttgtgaaaggctcatagtgtttaaactaatcaacttgtacaacaataacgtatgggctaagtaaatacaatttgaggcccattatggcccaataatattggaagatacttttttttttgtcgttggaagatactttaaatatatttctgaatattactaagatctttacgtgtaactaacttgtaagcattgttgaaaattgcttctcctgaagtttcgtaagtgttggagtatttctgctttcaacttgatcgattagtgacttttaacttaagtattatgaatctacccacgtagtatattaatcacgaaatctagccacttaatataaaaactatcgtttgtatttcgactacctaaatctgcatatatatttttagttaatttgatatgtttacaaaacatcatagcatcaattatgcaatctaggaacgttttgttcattaaagttatgtcacacaataatctgacacatttgatgtgttaattccctaacatcaaaagctaagttaacaatctacctccgtaaaatctaagctaaaaaaacgatattttttattaaacgcgttttttggccgcttcataacattatttaagactatccccattggtcatcaaaataaagggtttttaaatataaaattaataaatataagaataaaaaaggaatttaaagaatcaaggtgagatatgtgtcttcctacaaacatttaagaccttgtaaggtttgtttaaagacccttctctatatgttttctttttaatgtttagtttgtttttgatatttaaatattaaatattttggttttgagaagttaaaaaaaatagttcagcaatgaggatgctctaagctaagtgaactatattttcctacccatttataaagaaaagaaaacaatttaaacttaatttaaaaaccacaaaaatctgttcgggtttacagttttaaaccaaactgcactaatatgctaacaaaaccgttttgaaccaagagagtgttgtactgagctgaggcttgtcgggaagcctgaagccaccatgaaaaaaagagcaaaacctaaaatcaaaaataagcaaaaagactctgattctgacttttttttttagcgcctccctaaagcctaataatacgaactttgatttttgttgactactagttgtagtttgaatctgatcttatagattttgattactgatgattcaatcacaacaacttacgaagtttttgaacgtccgtctaagctttgaatcgtttttagggttgccatgagaaatcttgagcagcaaggaacacaatctttgaactcgggaaaatacatccaaattgatctcctcatggatatattttctcgagttccgcgacgactatagcaaggtttccttgtgtatctaaattatggggatccatactttgccgtcaagattttactgagttgttcttgaatatgtctttgactcgttcacgcctgctcttattaaccttccaagctgaaaatgggaataaattcttcttctcttcacatctgcctcagaatccagatgagaacacatctctttgtacccacccacctgttatcatgtttaccataagaattctcctagagagttttcatctgaattggttctccctcttcgtggactcaattgttgccgagataagggaagtctagatactatcattatttataacccgatcacgggagagtctctatccttacccaaactggaattgaagagatttcatattgtgacaaagccttatttaggatatgatccgattgagaaacagttaaaagtattgtgcatcaagtttagtgaaatcccgagtactgttgatgatcatcaagtgttgacattgaagaatggaaaacatttatggagaacaattcaatacaaaccccattatcctaaatgtaatggaatatgcttagatggttttctgtattatacagctcgggtcgataggtggatgtgggattccaaaatagtttgcttcaatgttaagtctgagaagtttaggtttattgacatagatggatgcatgttgatgactcattcttgtactttgatcaactacaagggtaaattagatgcacttcagtttacatttttgggtcgaagacaacttgagttttggattctagaagatgctgagaaatgtatatggtccaaagatatctatatattctagagtttaagaaagattaagaacatgcacgttcttcatatactttcagccgaccaactatgtcatcaaaagttatggtgttaagatctaagacttgttctagtgcaactactatgtgaatgtattttcttcgtggaacactcttaaagaacttcttaacaagtcttgattcttcaataattacacctaaagcagctgattttgctgagatctcagataacttgccagcaaagtcatatattttctcagaatccttcattgttaatcggtcaaattcggccatgagggtttgtaacctagcatccttgactctctctacccccacatgtcttgatttgatcgcatcccatacttctcttgctgtctcaagttctccgatttgtaaagctaatgcttcggggattgattgaaacaacaaagcacaagcaacatcactcttatcttcatcaaacggttctgtcaccttgtctatcacgttccaagctttatgaacctttagtgccctcttcatcctcatggcccataccatgtagttgataacgtttagcataggacattggattgaataggatccgctaacttctttcgttgttctagctgcgggaacgatatcactcatttcttcttatgattgattcaatagcctcaagctctgataccaaatctagagtttaagaaagattaagaactcaaaatataaagaattactctctttattactttaggaaaatagctcaaaacctaaagctctcaatctcacaatcgctctcaaaagctcataagttataccacacattggtatctccttatataatagagattcaacattatcctaatcattagataactcctaatgaatattctagataactcctagaattacaaggaattccttttctcttaaataaataaatgacttattcctttaagtcttcttcaagcttaatccaacattctcccccttaaccttgaactcgctcttctccaaatcttgaacaccaatgagactcctcatcacttgaaacttaactcttccaagtgccttagtcaagatgtccgccttttgtatgtctccgggaacatactccacctcaatgtgtctattctcaacacactctcttatgaagtgatatcttctgtgaatgtgtttgttgcgcccatgaaacactagatttttcgttaaagcaatagccgacttgttgtcgattcgaactacaaccttctcacacggtaaaccagtgacctcacaaagtaagtcttgaagccatatcacctgtcttgctgcttctgttccagccatgaattctgcttcacaagatgacatagccacaatatcttgcttctgtgaacaccaagaaatcagacttgagctttctccaagatagaatatgtaaccagccgtgcttcttccatcatcggggtcaacattatgactacgatcactgtagcctaccaactttggcttggcatcgtagaagtgaaacgcccatatgttaaaccaagtgtagtggtgccttttacataccttaaacattgtttcatagcagctctgtgagactcctttggtctttgcatataacggcttagaattcgtacacaatagtttaagtctggtcttgtatgtagcaaataacgaagacaacccacattctttctgaatctcgtggcatcaatatcattctcttctgcagatttgcttaattgtaagcccgactccattggtgtgtgaaccaagttacaatctaacattctagcttcttctaagatacgtttagcataccggtgttgagttagtgttattccttcttcatgttgacatacctcaatttcaagataatagattagctttccaaggtcactcatctcaaactttgatgacatctctcttttaaaatcatcaatgatcttggtgtttgttcccgtaacaaagagatcatctacatacacagccactaaaagagtaatattctcacccattaccttacgataaaccgatggttctttagaacacttttcaaacttaagctccttaagaactcgattcaacttattgttccatgctctcgatgcttgccgcaaaccatacaacgctttgttgagtttgtagactttatcttcatgacctttctccttgaatcccttcggttgagtgacgtaaacagtttcctttaactcaccatgaaggaaggctatcttaacatcaagatgatgtatctcccaaccatttgacgctacaaggttaacaaggagacatcttgtttcaattcgggctacaggggcaaacacttcctgaaagtcgactccatatttctgcacataaccctttgctacaagtcgagccatatacttattgatgcttccgtctgagttgcgtttaatcttgaatacccactttaaaccaattggtttaattcctagtgggagttccataagattccaagtatcgttcttagtgatcgaatgaatttcttcttcaaatgcttgtatccactctttggattcttttgcttcattaaagtcaaagggttcatgattcagacataacagaagtctctctccctcttcttctgcgagcagcacataatcatcgagatattttgacctaaaactttgtcctgttgatcttcgcaaatctggttgagccacagcttggttttctacttctgttcaatcgttgtctaatgataactgaaactcaccatctttgtcattgtcttcttcagagttctcgacatgtttagtttcctctgtttcagcctcgtttccaatcccgtgatttccaaactgtccaagtgtgagaatgaagtttccgttgtgactgtgttccatgtctctatggttccaattccaactctttgtctcatcaaatacgacatcccgacttactacaaccttttgattcccaggattaaacaatcgatatgccttagagcccggttctatgcatagaatgaactagaatccgtgatctatcatctagcttcttcaagtgtggtgtttccaccttcgcatatccaatacagccgaatatcctgagatgttcaatgtttggtttcttcattcgaaaagtttcatatggagttttgtcttgtacagatcttgtagctatcctgttcaacaagtacgtagaatgcctgattccttctccccataaataatttggcacatgcatgtgcttcataatacttcttgtcatttctaatagggttctgtttcttctctcaactactccgttctgttgaggggtgtatggagctgtaagatgtcgctttattcctgattcttgacataaattgttgaactcttgtgatacgaactctcctcctctatctgttctgaaagtttgtattcttgctcctgactcttgttccacgagactcttgaactttctaaacttgttaaaagcttcactcttttctttcaacagaatagtccacatgtacctagaatgatcatcaatgagcacaaatacatacctatttcctgcagcggtgcttggcgttataggaccacatagatcaccatggactagttcaagaatcttggcagctctaaatagagtggcttttggaaacgcaagtcttgtttgctttccaagtaaacatgagctgcaaagttctttttttatgcttccaagtgagaatccttgaaccaactccttttgcatcatcgatttaattgtatcaaagttcacatgtcctagccttgcatgccatctacttgattcacttattgttgttaagtgcaaacgtgtagctccttttattcccattcttactttgtaaagatgattcttcgatctacacgctttgacaagtagtttcccatcacgatcatgcatcgttagttgatctcctttcatcgtaatgttgcagcctgattctgtagcttgtcctaaactgatgatgttgctcttaagatccagaatgaaatagacattagatactttttgttgatcaccgtttccttttatgtcgatacgggagtcatctctgaaatgtactttgcctgaaactgaatcatccaatgttgaaaataccttatatcccctgtcatatggtttctagctccattatctagataccatatgttttcttcttcggtgtttgcttcatacatgcttggtacacaattcttctcattcaaaaatatcacctcatgcatcatgagctcatccgcttcatgtgtctcttctttgtcatgttcttgcgtttcctgtagctttaacaatcgatcaagacatgttgaagcgtagtgacctaacttgtcgcatcggaaacacattactcttgacgtatctcttcctccatatgaacgtccacatcctctccctctttcatatcctcttcctcctcgacctctgccctggaatcgtttcctggatctcgattgtttgagtaacttccttgagaatccatatttgaatacagaagcttgctttggtcttcttgaggatcatctccatcaaaaacatgcacgttcttcatatactttcagccgaccaactatgtcatcaaaagttatggtgttaagatctaagacttgttctagtgcagctactatgtgaatgtattttcttcgtggaacactcttaagaaacttcttaacaagtcttgattcttcaataattacacctaaagcagctgattttgctgagatctcagataacttgccagcaaagtcatatattttctcagaatccttcattgttaatcggtcaaattcggccatgagggtttgtaacctagcatccttgactctctctacccccagatgtcttgatttgattgcatcccatacttctcttgctgtatcaagttctccgatttgtaaagctaatgcttctgggattgattgaaacaacaaagcacaagcaacatcactcttatcttcatcaaacggttctgtcaccttgtctatcatgttccaagctttatgaacctttagtgccctcttcatcctcatggcccataccgtgtagttgatagcgtttagcataggacattggattgaagaggatccactaacttctttcgttgttctagctgcgggaacgatatcactcatttcttcttatgattgattcaatagcctcacgctctgataccaaatctagagtttaagaaagattaagaactcaaaatataaagaattactctctttattactttaggaaaatagctcaaaacctaaagctctcaatctcacaatctctctcaaaagctcataagttataccacacattggtatctccttatataatagagattcaacattatcctaatcattagataactcctaatgaatattctagataactcctagaattacaaggaattccttttctcttaaataaataaatgacttattacttaagtcttcttcaagcttaatccaacatatattgccttcttggtgggataacatagttcaaaataccgagttattcattgttggaatgactggtagaggtgaagttgtgttgtcaccgtactgtctagtactagaaccatgttacattgattaattcaacctcgagaggaggagtttcacaagagttcaaatacaaggtcttgaagtgcttataagggtacgagagtttacacttctctagactatgctgagaatttgaaacttatgtagggttcaaatcttatttttaagcttttgtctagttttggataaaagaacaaaatatcaaaaatcttttgtatgttcatatatattttattttttttaattaatatttcattacttttctttagtatatggagtatttttatgaaacaagaattgtgagaattatgaatcttacctcttacaattcttacatatttttggattacaccaacaaaataagatattttgagctgagtgcctgtttttcttggcttttactctttttttttttttttaaacattctaggttagcttaacaaaaacaacaagcaaacaaaaccttaggatgggagttaagtcattacaaacttagcagcaacctatactctcaatactcactacaaataagccccatgattctccatcttcctcaaaccatttccacctcaagaaataaatcatcagagcctcacacatcaaacacaagtaatggcctccacggattcagtttaccgtcccacaccaactccagaccatgacactactgttgtagtagttgtgtttgtttctttgggttgtgtcatgttcttggcgtttctagcgtttgttatctggttcttgatcaagaagagatccaggaagcaccgtgagagatctgaagcggttcgcgtggatgaacactttaagatgaaggaagctatagtcgaaggacctaatggacaaaagtctgtggtgttatcagttgaggatgatgttaagatcgaagacgcgatcaagagagaagagaaagatctgaagaaagatggtggagttggatcatcagtcgtttcccgttcgtgaatgagctttcttcattcataatgttacctatctatttatttatattaaaattgtggttgtgtgtgaatcatttgtttggtgaaataaaaaaaaagcatctgaaatatttatttaaattctttggacaaagatggttcttcaaacttgggttggtgaatggtgatggtttttatgttctaggagcgaacttttatctctatctctctaagaaaagtaatctttcaaaaaaaactgtagagaaataaaatagatagttgtttttggttaaaacagataatttgtaactgtaactcgataagaatattaattaaaaaaaacatacaatgtcaaatgaaatcatacttaaaattggacatttttctatttgaaaacttggtattggtatactaacacatataccatgttaatcttctcattatagttctacttaatatttaccaaaacaaaacaaaaaaaacaattatacgtatttaattaacaaaacaaatacattaattctgaagatggagaaaaaaattgtgtcttgataatgctaacttaccaagtctccatacatgataagaaaattacacacacatatatatatatatatataaatatgtcatatataagtttatttttgagctaaatcttcaaaaagtttctattgtaatttctaagcttaaacaaaaattgatacattcattgtctaatactgttctggttgaattcaattttatattcaattaaaattaatattttcttaccaaacatcacattcatacataaaataaacattggaattatcattctgaaactaatacaacatttaaatattagaaatcctataaaataaaaattcgtcctttcttttctttgtcaaccataagatccaatggctcgttgaatacgtagttacgtacaactggcattctcgtgtacaaagtcactaaaacaaaaacaaaatccattatagatattaaaacgactaaatttaattatagcaataacaattgaacagcaagatcacaaatttagaattcaagagcttaaaaaattcattaaaagtagaaaaatacaaaaataatacattaaaattcaaagttcatataattggaagtaaaaagaaatttttttatcactctcaagttttgtcttaaatgggacaaatttaactttttaaacaaaacccacagaatctcaaaccagttagcaccccttgtttcaccccacggtttgtttaacgaacaacagccaaccaccaaattactattataccctcatcaccatttgactatttattagtccacactctatagtagttgttacattcaaagaactccaaagtaaattaaagtcttctctacttcaccataaaaaatgcttgcgcacaagtctcttctctcctttaccacccaatgggctacactaatgccatctccgtctacttttctcgcctctcgcccccgtggaccggccaagatctcggccgtggcagcaccagtgaggccggctctaaaacaccaaaacaaaatccacaccatgccaccggagaaaatggagatattcaaatctttagatggatgggccaaggatcaaatcttgcctcttctcaaacccgttgaccaatgttggcaacccgcttctttcttacccgacccggccttacccttctccgagtttaccgaccaggtacgttatatacatcatgaatcttgttattctcttatttatgaagaagtagaagttattacaaagtttataactttgtcatgaaatgtataaaccagaatacctatactatataatatgcacattaaaccaagactaaccaataaatgaaaagatgttaaaatgtgtatttataatgataggttcgtgagctgagggaaagaacggcctcgctgccagacgaatacttcgtggtgttggttggagatatgataacggaggacgcgttgcctacttaccagacgatgatcaacacccttgatggcgtaagggacgagactggtgcgagtgagagcgcgtgggcaagttggacacgagcgtggacggctgaggagaaccgtcatggtgatttgttgcggacttacttgtacttatccggtcgtgttgatatgcttatggttgaacgcaccgttcagcatctcatcggctcgggcatggtcagttctctttctatacctttatgtcatgatgtaaaaatgcttatactagtttcattagtttagtagttttctgatttatttatttgtttgtgtcattttaatttttttttatttggtttggttaagttattttttttgttatgcatgtgtggaaacgtaaacataaccaaaactatttgccattttgtttgttttgatctggtatgataaaattttaatttggtttttggtttgaatacattttggacgatttaaaaagaaaaaaaaatccaccttttaataataataaaaattaataatatattatgtaagatatatagaaaataaattctgatttttttgtttgtttagttcgcttacaataacataagctttgggtttaaatgtttttaaataatagaacgaattgatcacaaacaatttcaatctaagtattttagtagtttacgtttggttggtccggattaggtttggttggttcgggttaggtttataccattcataacttttcatattggcaacttcaggatccaggaactgagaacaatccatacttaggtttcgtgtacacgtcattccaagagcgagccacatttgtgtctcacggcaacacggcaaggctagccaagtccgcaggagatcctgtcctcgctcgcatctgcggaaccattgcagctgacgagaagcgccatgaaaacgcttacgtacgcatcgttgagaagctcctcgagatcgaccctaacggtgcagtctcagccgtggccgacatgatgcggaagaagatcacaatgccggctcatctaatgacagacggtcgagacccgatgctattcgaacatttctccgccgtggctcagcggctagaggtttacacggcggatgattacgctgacatcttggagtttttggttggacggtggagattggagaagctagaaggattgacgggtgagggccaacgtgcacaggagtttgtgtgtgggttagctcagaggattagacgccttcaagagcgtgcagacgagagagctaagaagcttaagaagacccatgaggtttgctttagttggatcttcgataagcagattagtgtgtaaactcttgaaaatatcaaacttttcctttctccgtttcttgtttttttttttcttttttgtaatgcaaatctttgttcttaggaaaatttaatgttaagtttctatctatgtaacgtgtttttaacttaaaatttgtataatttaaacatggctcaaacggataatttttttttttgttaacttagagtaaatccttgaacctatggactaattccagaggagagggtatcctatgggtaaggtctccccatgttttcaaataggccttaagcaataggtccattcccatgtgccaaagggacatggctaagcaattgtgcatctgaggagaattgatacctagcctagaccaaacaagacaactcttccaccagactagaaccactagcccaccacctctggttaaactgataaattaactaagtttttgttgaccaatccggacaatccgatttgacccgatccaaaccaaaacgaaaataattgatttagaaaactcgatcgaaaacctatttttataacaagtcaataatatgtttgattaaaatcggaaacccgaaccgaaaccataaccaaaaccaaactgaaatctagatgaacatctaatattttggattttattgttaatttagatttgggaattgttctctcttatcgtttagatggtaattatgtttacgccattagctgaggagattagtacaagaatatatgacgatcattgatgcaactaatattatgatccgataattaaagacaagacataatccaagaatacgaaatattatttccgactatatagtaatcacaaaaagagaaacagagtcagaaaaccacaaagagagaaacagagaaccctaataatctttttgcttcatgcccaagtaactctacgtactagtgttcttctatcggctcgaatgaagggaactgcactttcaacaacaatgtcaaaactcctcgtaactcatcaatatttcccaagacgtaaaaaatcatgtcggtcatcataagttttgcgtcatcctcttcgattccaactgctatcaggaaaaaataaagttcttgtttcttgacgtcttcctcgaagaatttgtgtggtgagaacgagaatgaactctttatgggaccaaactcatgtttgagtatctctgtcttgacgttgatcgtcaagtctttcgtgtctggttcttgctcgagaaggtgagcaattctgaaaccaagtagaggagcaggattgttgttcgtcatagctgaagtttatggattaatgaagattgtttcgcttctttttttcttttataatgatgtcttcgaatatcaaatattccttttttccgatttgcctttttttttagactgcactttccttttttattaaaaaaaattatttgcgtagaattcattacatcataagaaaagggccaatgactgacttttgttttataaaataattttggttaattgaagtttaaaggatatccgtgtatcctttgttagtgatgtttttgtttgccactgcaatcttgactttacgagaaaattgaaacttaataattggtttctcgttatgccaaagatacagtcaggaaaaaaatatatatatagtgagaggtactaaaccatttggctaaagagatcttgaccacaaaacaacatagctatttatttttctcgtttggtcactgttggtactgggcctcaccggcccattaaaaccatttattcaggccaggccttatatcatgaaatagtaagagagcggctgagcttgttttcgtaggcccatctgtcagcctctcggctattcaacgacctcgaggagcgtgacttcgggaacaagaataactgatcacgagatcataggagaaagatccggggaggcggagaggtcgttgagattctcggacatatatgtactacaaggaattagcaacttaattcggtgactgatttagtaatcgttaaatttggcgattgcatagtgatgtattggcgactgataagtctatattagacattagtcgctaataagtctttaatttgaaactgatgaaaatagtcgctgatacgtctctattctggctactatttaacaactcacatattctatttggacatttaattgggttttatcggctcaatccagttattgtagcccatcagtctaaagtatataaactcgttttcggaaaccctaatcacctttctcctattctcgacgaaccctaaccctaatcccctttctctaatcctctcaattccatttcaattctctcatttctcagattcaatcctctcaatctctcatttctcagattcaatcctctcaatctctcatctcttagcttcaattgatggcttctcgtggtggaaaaggcaagagaggaagatgaaggggatcgaagatttccccaaatcgacccacttcttccgcggtgttgaatcgaagacccagtggtcttcccagctaatacgagttcatgtcagcgaactgtcaagccccacttcaagattatgatagaaattcgattgcacagcctccaacgggtcctagtctcaaagactatcctccttcgacgcatcttttccaatcgtgcgaaggatctcctcgtggatctgtatctcctcgagcctctggatctcctcgaggctctggatcgactcaacctcaatgtggaggatctgttcatcgtctagcatccacgtcgaaacaacctccatcagcggttcaacgggaagcgttcaatcagtctcctgcgacagttcaacgggaagtgtccaaccagtctccaatcttgaatcaacaatgggaagcgtcaaatcctccacctcgagcctctgtatcacatcacggctccaagctcaaaactcacgtgcagaggaagaagaagatgaggaagctgagtctaggaagatgttaaaaggtattcaactctcccataagatgtgcttgctcctctacatgagttgcttctcatgccaagtcgtgagaaatatatgacggtcatctctcctacatttgagcttgaaaccctatggtaagcatctcctcttaccttgtttgtatatagatgccgagtatattaggtttgtatatagatgatgattagattaggtttatgattaatattgaataatatgtgtatatatatagatgtcgagtagattaggtctgctaattggtttatgtgattgtaggtttggtcatgacaatggtaatctgatcagaaagatcataaagatatttacaaacacgtttgatgggtcattttacagttggagatgtgtacctactgaaaaagacacatatacttcctcgaattcgccgtaaacttctatctcctcttaatcttttactactgtatgtatacattcggtttggctgtttgatcacttacatcaaactctcctcttgttttgtaaaaaatatagacatggcatccctcactaaccggtgtgattgaagacaaattctacaaaatttgttagctacgtatgaaggacatggtttctaaggcttgctcaaagcgagcaagggatcaaccgccatggattgagaagacattttggaaagaaatgtgtgagtattgggacatataagaagccattgctaatagttcaaccacatcaacagctcgaatgtcggaccgtaatggtcttggtcttcacaagcaatgcggttaatctctttttaattttttttatcactttgatcatcttttcttttgtttatgcagttatctgtcacaaacgagagaggggtatatttaagaattagaagcttagggaggtacatcaataagaagcggaagtacatacaaaacagttcttctttcacttccttgcaatcacagctggaggacgccaaccgcaaaatagaggaagaagcgactctacaagcacgtcgtgaggtagagacattgcaggtgagaacgagatttaacaaacaaagaaacttgttgcaagaacgagataaataacacccatagtgaacaacaaggagaagaaaactcttcaaactttgaagacctccataataaacatacaaaaaaaacttctacttacagaaggaccgagtccaaagagattcaaaggatgtgcgaggaggctaagggtgagaggaaatgcaaaggcatggtggacataaatgcaacccacgacaaagctacattaaaggcttagaaacgtcaataagcacatgaatgacatcaaaaccttgggcaaaatcaagcaataaaaatatactattcttcaaatcacaccgtagatcgagcacgtctgaaattactatcaacttctctgtaaccacaaaacccaaatgatcttaccgttctgaccacaaccacaaaactccaaatcgaaacttaaattaaacaaaccaaaagttttcccagttgaagaccaacaagtctgtacacaacatttaaaatctaatcctagctaaacgatgaaggagaaaaacaagaatgccagctgactcaaccaggagacaacaagaactcatggcagtaaaacaaagacgaaacacataagagacaaatgtgacactgataacactagattttaacttttttaagctcttgttttttatacatttagcttagtttcatgtctcttttcatgcattcttagtctcttttccttcttttgcacattttgcattgcattacatagcatacttgcatttggagtgttttacaggtgaatcaggtacttttggactcaacttggaggtttctagcacaagggatggacagactcgagttcgggggatctaaggaaggacttaaactatactcggcttatatactcggctggaggccgagcggagcacacttgaagaacaaggagtctactcgaccaaggcactcggctggaggccgagtaatgcacttaaggaagaagagaagctgctcgaccaagccactcgaccaagacccgagtgatgtgaccaagaggaagtcactcgacttttctactcggccaagacccgagtggtgcagcgccgactttcccattttgtttttttcccaattagggcatcctaggattgcctataaatagacctcttatgtttttgcccaaaatatctttgctttgtttgctggatattagggtttttagatttcttttgcattttctggttgttgtgttgagaatttggatttgatttcttctgcaaacttgtttatcttattgagatctatcatttgctaagtttataatgatttctgagttttatgaattttctgggttttgttctatgatgttcttcattgttctgagtagtcttattcggagttcttgaggatgggttaggtttaggtggattcctctgttctttagctagctaagtttataaatgcatgtttcccttctgttttaggagttcttaatgttattttctttctaatcaattgaaaattgatttcagactttctccacctaacaagtgcttgatgaaagttctgaaccaactaatttcagagatttgtagattatagcccaagaccttggatgttcagattgcttattgaatttaatagattggtgtttaaagcctgctttattatgtttcatcaatgaaaattgagattaggaagttctaaaattatgagaatcattgtcacgaaagtggattgatttggttttgaatctattgtctagggataacttgattgagtttgttagttagctactggattgaggagtccactaagaccaattaccccattcttaagagctctgtttcgttttatcgtgcaaaactcgtgtttttagtactctgttcgtctcgtgcaaaattggtgtttttagtattgtactcgacctgtttagtttcatgctcgaccgagtgcttacctttgtgcttggtttactttcttgttcttgcatttgacagttcctggtctttagtttcatttctgctcttgttatttgagttctttatcttctgcttagtctagtttcattcttgcatgatcacttaggttgttagataatccaagtcatctaaacttggcttgacttagtattctctgatcatatcctgattgttagcaattacacccatttggattgacaccttaaatgctgcaatgacataagatgcatttagggaattgacacacaaaacccttgtatcaatttggcgtcgttgccgaggatcgaacccgggtcacccgcgtgacaggcgggaatccttaccactatactacaacgacttctgaatcattttctgccgcatgggaacgtttcaaaggatataccactcagtgccctcaccacaaattcaagaaagcctccctcctcagtacgctatactgaggtgccttgcccaagatcaggctactcttggatacagcttctaattctaactttctcaacaaagacgttgcctctggatgggaacttgtcgaaaacttggctcaatctgatgggaattattgcgatgaatttgatcgttccattcgaggtgccactgataacgaggacggacacataaaggaattacatgctttgaatgccaagatcgataagttggtcattgctctaccaagaccaattgttgagagacctattcactacatcaccgacgaggagcaacagcagattcaagaagggcagtcctactcatatgaggaagtgagctacatacagaatcaaggtggctacaacaaaggatacaacaactacaagccacctccttccaacaacccctaccgcaacaacactgtggttcacccacaccctccggtttatcctccgtatcagcatcaacctccgccctacgttccattccccaatagtttcaaccccggttcacaccctatcccaactccaccaataccaaccccacctgatccagactttacaactatatttcagcagctcgtccaaagtaaaaaaaggctaggattctccaagtacaaagcatgctacattcagctagttcttgctgataggtcagtgagaatacctcatggcatgttggaagatttgccggtgaggatcggatcagtagaaatcccaactgacttcgtggttctagaaatggatgaagaacctaaggatcctctcatattgggaagacccttcttagatgtcagaaaaggtaaaattgatctaaacctttgaggaaacctcaatatgacctttgatattaagaaaaccatgaggaagccaaccattccaggtcaagttttctatattgaagagattgatagattggcagatgagttgcttgaggaacttaatgagaaagatcatttacagagtgctcttaccaaggatggagaagagggatacctatacctagaaactcagggttacacagatttattagactcccatagaccggtagaagcatgggagacatttgaggagttgaatatctgttcagaggaggtcagttcagtcacaaaaagtgaagaaagttctactcgacctgtgtactctagcagtcaatcgaacaagataacagaggaaccaaactcggttggaacaaccgaggacactcgattgagcagcatctctgatgattggtaagaactcaaagctccaaaggttgaccttaagcctctcccaaaaggtctgaggtacgcatttcttggtcctaatgacacttatcctgttatcataaatgatgaattgagtgatgaacaaggcatcaattattgaccaaacttaggaagtataggagagcaattggatattcattagcagacattaagagaatttcacctagcttatgtactcatagaattcatcttgaaaatgaatcatattctagtgttgaaccgcaaagaaggctaaatccaaatttaaaagatgtggtaaaaaaggaaattctgaaattgctcgatgctgatattatctaatcctatttctgatagcacttgggtctcaccagttcactgtgttcctaagaaggggggaatgactgtaattaaaaatgatcatgatgagctcattcctactagaactataacaggacatagaatgtgcattgattataggaaattgaatgctgcaactagaaaagatcattttcctttgccattcattgaccaaatgttagaaaggctagctaatcatgtttattactgttttcttgatggttatagtggtttctttcaaattgctattcaccctaatgatcaggaaaagattacttttacttgcccctatggaacttttgcttataagaggatgccttttggtttgtgtaatgctcctggaactttccagcgaagagcatgacttctatattctcggatttcatcgagaagataatggaggtattcatggacgatttctcagtctatggatcctctttctcctcatgtttgttaaacttgtgtaaggttctagaaaggtgcgaggagacaaacttagttctcaactgggagaagtgacacttcatggttcaagaaggaatagtgcttgggcacaaaatctcaggaaaggggattgaggttgataaagccaagattgacgttatggttcggttgcaaccgcttaagacggttaaggatattaggagctttttgggacatgcgggattctacaggagattcatcaaggatttttccaagattgctagacctctgactcgtctgctatgcaaagaggccgagtttgattttgatgaagactgtttgaaggctttccactccattaaagaagccttggtgttggcacccattgtgcaagcacctaactggaaccacccttttgagattatgtgtgatgcttcagattatgctgtaggagcagttctaggtcaaaggattgacaagaagcttcatgtgatctactatgctagcaggaccttggacgacactcagagtaggtatgcaaccactgagaaggaattattggttgtagtcttcgcttttgagaagttcaggagttacttggttggttcaaaagtcactgtctatacagatcatgcagccttgaagcacatctatgcaaaaaaagacactaaacctagacttttgagatggatactatttctgcaagaatttgacatggagattgttgacaagagaggatcagagaatggggtagcagatcacctttcaagaatgaggatgacagaggcagtcccaattgatgattctatgcccgaagaacaactcctagcagttggtaccagttttgacaagtttaagattgaaacaatgtgtgctacaaggagtggaaaattgccttggtatgtggatcttgttaactacttaactgctggaatagtccctagtgagttaagctcctaccagaagaaaaagtttttcagagacattaatcactactattgggatgagccagtcttgtataagaagggagtagatggtttgtttagaagatgtattgctgaagaggaagttcagggagtgttagagctttgtcacaattcaccttatggaggtcactttgctactttcaagacagttcagaaggttctacaagcgggattatggtggccttctatgtttaaagatgcacatgagcacataacgagatgtgatcgatgccagcgagttgggaacatctctaggagaaatgagatgcctcagaacccaatccttgaagtagaggttttcgatgtatggggaatcgactttatgggacctttcgagccagcttcatatggaaacaagtacatcttggtagctgtggattatgtgtcaaaatgggtggaagcaatagctagcccaacaaatgactccaaagtagttttaaaactttttaaaaccatcattttcccaagatttggtattccaagggtagtgataagcgatgggggctcacactttatcaataaggtttttgagaaagaatgaggttaagcacaaggtagctactccttatcaccctcagactagtggacaagtcgaggttagtaacaagcagatccaagctatcctggctaaagttgtagggatatcaattttgtttaataaaattcaacattctaccccacttttattttatattagtttatattcattttcttatttatgttttctaattttataattatatattaataactattagcgattaaaatcaaataaaaataatgaagagttaataattttgtttcttttaaattttagattcttaatttcttttccagatagtatataaagaaaatatatagatattcattatgaagataaataaagttacaaaaaacataatatgcaacacaatgtattaataaacacatgctacaatttaataaaatacacacctcaattaaataaaacacacataacttaatgaaaacaagaaactcaattcaaaaacaattttaaatcatccataaatactttaaaatctttttaattaccgaattttgcccatatgtgtttcactaaatctgcttgcatttcatgatgtgattgagatggttatgacatcatcgttgcatgatatggttgatggtttggaatagctgacggcatgaagaaatttggtaaaaaaacataatttggtatatttttggattggttggaaaactagttttgaaattgatcattgttgggattttggtagctaaaaagattattagaagaattttgggtgtttaaagggttattgttgggatccattttatagaatttgtttttttctgtatgcaaatcatatgaaacaagtatttattatagagtatattatgaattttagcataaaaaatatatataatatactataaaataattaagttcaaataatttggataaaaaaaaaatatcaaaaatctgagtaaccaataaaaatgaagcatatatctttatttttatttaacttccaaaaataatttcattcaataataagttgacatgtggatgggtaatactcaatttcttccgattcaacatgttgagaatattcaacatgaagtaatccatgtcatcaacaataaaaattcaacactccattgtatcatctcaaaagctgaaacaaataatttaacaccctcatagtaggctatgtacaatggtaaaaaaattcaacacccacatttttcactttttaacactctacatcattttctctttcctccacataataattcaacaccttcttatattttaaacattccaatggttttgtttaataaaattcaacactagttttatttcattattttttaaaatttatattttgtgattacataataatactaactaaatattaacccgcggtataccgcggccctatatttttattaaataaaaaataattagatattttttaggatgatttaataaatttatgctattgtttgatttaaatgtataattcaccgcgagacgaaattttataactcaaattttaaagttttaagttgtatttgtttattttgttaaatgtttaatattgtataattgtattttgattgttgtttctcggatttcacccgtagtacaccatcccatattaatatcgaatcaaacccgtcaattctaggatttcactcgtagtagtatttaattgtataattatattttaattgtcattctaggatttcactcctaattctatcgcaaattattatcaaccgaaactagtcaattctaaaatatcactcgtagtacaccatcccatattaatatcgaatcaagcccgtcaattctaggattttacccgtggtagtatttaattgtataattatattttaattgtcattctagaattttactcctaattctatcgcaaattattatcaacccaaaccagtcaattctaaaatatcacccgtagtacaccatcccatattaatatcgattcaaactcgtcaattctaggatttcactcatggtagtatttaattgtataactatattttgattgtcattctaggatttaacttctagttctatcgcaaattcttatcaacccaaacagtcaattctaaaatttcaccagtattataaagtttaaatatttataatgtttaaatttcttataaaagaatcaaaatgtgttttaaaaaaattaaagttttaagtgtttttttttaatattgttaattttgtttagtgtttaagattatataattatattatgattgttattatatgtttttttccatagcatactatcccatgttattatccactcaaacccgtcacaccatataaccccgtcccgtgaaattaaacacaaatttgtcattttattataaatttcaaatatttataaaattaaaaacttcaaaaaagattaatattgacccaaacttcatcattgaattttgagtattatatctaagatttctctctcagtatatcgtcccgtattaatatcttttatattgtttaaattttttgtaaaatttaatttataattttttaaactttataaagtttcaattttttaaataaataaccctattaaacaaaccattttaattttgtacacctaataagtcaagtttcatgctcattcgtaatcaaaatcattttggtcctttttatagtatggctcttgaccattgtccaatttttttaagcgatgtgggacattctaaaatcgtaattattatccaccaaaacccgttctaccatataacccagtcccgtgaaattaaacataattttgtcattttcttataaatttcaatattataaaatttgaaacttaaaaaaatacaatatcgacccaaaattcatcattgaattttgattgttatatttaagatttttcctgtaatatatcgtctcgtattaatatattttttctatatttataatgtttaaattttttgtaaaattcaatttacaatttttaaaactttataagttttaaaattataaatatttaaagcattttttaaagataaactttataaaaagtttttaaaattttaatatttaacttttgataaagttataatatttataatttcttgaaatattttaaagtttcaattttttaaaataaaaaatcgagtaaaatcggataactattttaattttagacgcctgataaatcaagctttctactcattcgaaatcagaatcattttggtccttttataatatgggtctgaagcattgtccaatttttctaagcgatgtgcgacattgtacacatattatttcttcataggttgaataatatatgtccgttttaaaaaaatttgaattacattatattcagaaaaaatataatattttattaactatatatattttatataaattcaaaataaataaagtataagatcaaataaaaatgaaagaagaattatatatttatgtttaaattaggtagaaatattttaggaaagtagttaaggtaaataagaaatattgttagtttagagatattgtttatattaaatttggtaattaaatcattaattttcgtttttaattattagtttttaggtaacttttccaaaaattaatgttatccaagatcagaatagaattaaacatgttatccaggatccgaacagagttaaaccgggtaaaacccacccagttgaattaattgttgaattatggctcaaatcttcaacattatcttcaaaaatcccctccaaaaatgtatatatagattattaataaataaaattaaaatatccacaaattaaattagattaacaaaattaattattttatgttcgtaactgatatttttgaaaaaaaaaacaaataattattattaaaacaaaataatattacaaattttgatttaaaatacaatacaagcacacaacactattaataataaacaaacttcactttaaaatgtatacggatcaactcacaaacaataaaactctaaaatcacacaacaaatagcgacataaaaatctttttaatttctgaatattctgaatttcgcccagatgtgtttgactagatctccttgcaattcatgacatcatcaacccataatattgatgattgtttgtaacagttgatagtactgaaaaatttggtgaaaacccataatttaagacattatgagactggttgaaagatagattatgatattgataattattagaatttgggtaggggaaaggataattagtagaattttggatagaattattattggaattagggtaaggaaatggaaaattaacggaattttgtgaagaattattattaaaatctatttcacaaaaacaaaattaaaaataaaaacaataattttttggagaataagaagaaaactatagtaaaaatattgttttttatgtgtccgaatgaaatgaaccaagtttctatttatagagattaaaaagttataaattttcatataaatatatatttttataaattgttatttatataataattgattgtaaatatataagatgggataaaaaaaatcttcaaaatctcaaatgacaataataatataacaagtgtcattatctgaagaaaatttttttaaaaaaaaaagaaaaaagaaagtgaacttttcacttgtagagaacgcgtgtgaaacgcataccccaataacatggtaacatgtggcatatgtggactcaaaaaacaaactttcaatattttttgaatttattcaacacttattaatccacatatatatttttgagttttcaacacttccattgcaaacattaaacagttgaatcttttattcaacatgtccattgtacatagtcttagcctatctacgatggttacccatttaggctatgtgcaatgtcaaatttattcaacacgcgtgttactaaacagctgtaattcataacccttcaatttcctgcatatcatgggttacttatttttatcatcttaagcaacaaagagatatcaaatgtgcaaatatattggtctcacatttgccaagaccgccagaactaactgtctgcgtagtagactcaggacatgaatgtgggttctaactaaagtgcaggaataaaagtagagaaggaaagcgtcgagaagtcaataaaattagaataatagatttaagaatatgattaaaaaaataataatttgtgaaataacttaaaaaggaaactgagaggatgtggaaaatttcatacaaggagagtttccctttattaatttcgtgcacattaagatttgtacgtaaataaataatatgaacgattttttaatgaataaaatattatgattgcctacagcttctctaaagaaaggtgcatccttctttttcactttttaacgctccacgtcatcttctttttcttccacatcatcattcaatacccaaacaatttttaagcacttacaatggtttggtttaataaaattcaacactctagcctacaattattattttataatttatatttttgcttatatatttatacttttgtgattgcatattaataatagttattcataattgaagttaaaatttcaactaaaattttagaaaattgacataatgttttaataacttttttagttattttatgtttaggtgaatgaaatatttatacctacatgagcaaataatcaaggatctatacatatcattttgttatttaggtggaaattttattgccagttaaatatgacataattgcccctatacaaacagataatcggtagcctccttccacaagataacaagcattaaatattccgtaaatcttcgaagatattgcgccgccaccctagtgaaactaaaaaaaacataaaaagtaatgatcacatatggtacgtatacacacttgcagggcacaccacgtcctacaaacgcgaaagatgaatataaacaataaacgataacatcatagttagaagataatcttccgttagagcgagactgggttgacgggggtggagtggtgatatcctaaaattgaacacgcaatatatcaccggttaaggatttaactaaatgaaagttaaaaacatggaagaaataactaacctcatcagaatccttctcttcctcgactgcaatggttgattttgaaagattgttgttgacctgcaaaaaaaaaaaaaataattaaaaagaaaataattaaaaagaaaataattgataacaatcttaccggttaataaaaaatggagggggttaataaaaatggatagtaaggttgagcaaaaatggagcgcaaataaacaaatcggttcttcatctcgatgaccgagggcctcaacagatttgtcgacctacaaaatcgcggagataattaaataaactctaaaacagaggcaggaaagctaccaaaataaagaaaaagaataaaaggaaaactagattaacattgaccgttaccaacacagaatcagaagctcccccaatcacaccacttcatccgagggggggacacaagtaatgttggggacaaagaaacatggagatttatattcccaggctttggaaaaaaatgcaattaaatattagctaatcacatataatacttagctgctaaacaaatcagaatggagggagctgaaaagtaatcccttcaccaactaacatgacaatattatccaccctcacatcttcctcatcgtcagaccaggttaaatcttctttcgggttcatctccacgtcaagaaaaatgataggctccacatacgtctacaaaaaaaaacagatcatagaggaagattaatgacgttaataaaagaaaaattccttctaatgtccttttcatattaccccttttcaattctatcattttctatttaccattttcatttataccctatttaaatttttaatgatcattttacccctctttgtaaattgatttaggttaacaaaatgaaaaattaatattttcgcctaaaatattccaaaataaaatttcccgccaaaaattttcgaaaaaacaaattcccgccaaaattttcccgccaaaaattttagaaaaaaaaatttcccgacaaaaaaaaattttgaaaacattttccccgtaaatttttttctttttgcgggaaaagatttacaagggattttaaaatggttttaaaagatttacaagagattttaaaagggtttaaaagatttacaagagattttaaaagaattttaaaagatttacaagcgattttaaaaggctttaaaagacttacaagagttttttaaagatttttaaagggtttaaaagtgttttaaaagatttacaagggatttttaaagggttttaaaagatgtacaagagttttaaaaagattttaaaagaaattataagaaaaccctttaaaaactcttgtaaatctttttaaaaccttttgaaaaggttcacaagagttttaaaattgttcagaaagagttgtaaatattttaaatacttacaattctttttctaaaagttaaaaaatgcttgtaaagactttataagagtttttaaaggatttacaaaggtttaaaatccttgtaaatccttttaaaactctttaaaaaactcttctaaatcatgttttacccttttataagcttttaaaatccttgtaaatcatgttttacccttttataagcttttaaaatccttgtaaatcattttataccacttacttatcctttaaaaacgattgtaaaccatgcaaatattttttaaaaatcccttgtaaatcattctttgacacttacttatgctttaaaaacgattgtaaatcatgttaaccccttttaaaatctcttataaatcattcaatgtcacttacttatgctttaaaacgattgtaaaccatataaacacttttaaaattccttgtaaatcattttatgccacttacttatgctttaaaaacgattgtaaatcatgttttatccttttataagcttttaaaatcccttgtaaatcattccaatgccacttacttatgcttaaaaaaacattgtaaaccatgctaaccctttttaaaaatccttgtaaatcattttatgccacttacttatgctttaaaaacgattgtaaatcatgttttacccttttataagcttttaaaatcccttgtaaatcattcaatgccacttacttatgctaaaaaacgattgtaaattatgctaaccctttttaaatcccttgtaaatcattctatgccacttacttatgctttaaaacgattgtaaatcattttttacccttttataagtttttaaaatcttttgtaactcattcaatgccacttacttatgcgtaaaaaacgattgtaaatcttgtaaaactattgtaaaaagttttaaaatgatttataaaggggtttaaagtatttacctatgtttttaaagactttataaagattttaagaggttttaaaatgatttacaagggtttttagcaactaccaaagctttttaaaaaactttacaaggatttttaaaagcattttttttgcagggaaaaaaaatttacgagaaaaaattttggcgggaaaatttttttttggcgggaatttttttttttggcaggaaaaaaggtttggcggaaattttttttggcgggaaaaataaaatttggcgccaaaaatttggcgccaaaaatttggcgggaaacttccagtttctaatttcatgttcttattagatgagggtaatttggtcattctgttcaagagaagagatattttttaaaatgaacaatataaaagggtattgttgcaaaagggtagtaaaaaaatgatagttttgcaaatctccccttaataaaatgatatcaagatataatattaacagggtagaggaatttataccgaacagttggcatccaaatctttcgaactaccaagcttcaggggaatcaactgacgaggagcgtcttcaacaacttcttcatccatcaacggaccttcttgaattgctggggctgcttgcaaaacaacaagctgaagagcgtataacagaccttgaacagcaacacaagtagtagcaagttgttcaacttccctctctttaattatagtcatcatcatctcaaaggacatcagcccccaagaataagcaagaaatccctccaaatgttctgacatctcagcgtggtccttcactatgtttgggtaataagaagtaggaagaagaaacccgtcaacaaaagtcaggcacgcgtatctcagtcttatatctggggctgcttgcaaaacaacaactctccataaggaaagttgttcggagccgctttggttctctaaaaacctttatctttcagactgtgttttaataagagaatgaagggatataactcactatatagaaagagaaatgatgatgacgattggtttccccaaaaatcaataaataaataacaaaaaaaaataaacacacgcgaagaacaacaatgatctaataagattttaatgaagtcgtctgacgcaatatattgcatacagtataaaaagattttcctgatatataggggcacatgcgcaatttccacatgcacaataccagccaaacaatggcttttttgggcacctaaataacgactcttattaggagtatagattgtgcaatttccttttatgttttaagtaaaaaaattgaaataagaaaataaaaacaattattattaaaacaaattatattacaaaaacttcaaatacaattaataataaacacacatagctttattaatacatttgattcaggttacaaataataaaactctaaaatcacacaacacaaagagacattaaaaaataactaattttttgtgaaggattattgttagaatccatttcacaaaaatcaaattaaaaataaaaataagattttattagaggataataataaaaaattatgatagaaatgatttttttgtatgtgtccgaatgaaatgaacttagaaagttatgaattttcatataaatattttaagaaacatatttgctacataataattgatagtaaatagatagggtgagaaaaaaatctctaaaatcttaattgcagtgtcaatatctcaataatttctttgtttttgtcagaaacaaaaacaaaataaaaagtactctacttgctcatttggttcacacgccttttaataacatggtgacatgtggcatgcgcattgaaaataaaattcaatatgttgaatagattcaataccctaaaatccatgttggttttttcagttttcaacatccctattggattaattaaacagttgaaactttttttcaagaggtccagtgcaagtagtcttacaacacccagttttttcattttaacattccatatcatcttctctcttacacatcattatttaacacctatattacttttaccctctacaatagttttgtttaataaaaccacaaccctttacctaaccatttttgtgtcatattttttttttatgtttatgttttttgtgattacatattattaatcatcgttaatataaaataaaattaaattaattaaatattacataattgtataaaataacttttgttttaatatcagttttattttatatattattattaaaacaaattacaaataagaaaacaaaaatagaaataatcactactaaaacacaaacaatgaacataaatttagaatgtaatacaatatacacacaacaagtaacgaaacactcacaaacttaaaaatctcattcaccatagaacattccgaattgtgcccatatgtgtttgactaaatctgcttgcaatttgtgatgtacatttgaatcacgcaaatcggatctagtacgcacatgatttgaaaatagggatagcactttgatcgtgaaatgtttgttatgtatttgacccacttgcctcaaattgatcataatatgtccaatgttgagcaaatgtctcttgttcattctcaacaatcatattatgcaatatgatacacgatctcatgatgatagtcaaatcggatatatccctcaagcgagctggtttgcgaataattttaaatcaattatgcagcactccaaatgcatgttcgatgtccttccgacattcttcttaatgttgtgcaataacttatccggttcactttaaggtagcctaatcgatttgacgaaagtaggataaaaatgatagataccatcaactaaataataagccatattatatggacgtttgttcacaaagaaattcactcttggaatatttccttgttcaacatcatcgaacaccggcgaatgatctgtgtccaaatcaaatgaaaatagtctctatttataaagaatgaaaaattatatattttatatatttatttatgaatattatgaaataattgaagttatataattgagatgcaaacaaaaatatagaattcaaagcaactaatcaaaatacaacacttcttacacttatcttctcccttctactttcacgtgtgttgatatttatcaacactgaatttacctcctcacttactttttgattacaataaactattgtagaggaaatatttttttcatgttataaattagataatgattatccatcacatcataatattatttgatctcatcttttaatcttatctaatacttggtccccaaactacttgttcaccaagtcatttgatgtttatctattcttaaaggtataataaatagacaagaagaagagaagagagaataataaagttttgctaagcactttccgctctctcggtaaaaggcgtatttcaaccccaactattttgacggagttttttcctactcgtacgacgagacgatgcttaatttaaattaactatctggactcttactataaatggcaaaaattacatttactaaatttgacgttagtcaactgttaaaaaacgctgacaaagcatgacgaaatctgacttaaaacgtctttgttcctattgattaaaaaatcaaacaaaatatcacttccaaaaagactcgaaccatagaaatcttagagtagatggcactgttattaccaattgagccgcatgtattttcgatattgtttaccaccacatttatttataccattctgtctttatcattccctaccaaaaatgatttccccaagttgtgctaaaactttaacacgtttgtaactaaatattagtacaaactattactaaaactaattcatattaatcgaggtatatccctaataatatatatattatttgaagtattaaagtttcagcttatatatatatatattattagaagttttaattgattcagtttaaatatccctaattcatatatatatatataaagttttaatatatatgtgtattaatatgtatgtatatataaagtttaccaagttgaagttgttttttatatttcaaaaaacatatgtgtgtaagaagtaatcaaacatgcaactcaactaatttattaaatatatatatatatatatatatatatatatatatatatatatgctcgaaaattgtaatgcttcttcatcaaatgtaacaatatgattggtgttaagattagataattatttattatcgtttatcccttggagatcaagttacttattgctcaagtcttttcaaaaggctaattaagaaataatatttatatctaagaaatgtttttttcgggtgtcagaaacaaatgattcaagtttctatttatagagaaaaatatgataaattttggatatgaaaaaattatttgatatgaaatagttaagtttaaatatctaagatatcttatcaaccaatcagagccgatacctttccccaatccacaattttgccaagtttttattttcatcaaatttacgactaattaaacgcttacacgcgttcgagggacctcatttctgcattacaacaagttgcaaattatcaacttattttttgccagtaagattgcatcaacaaatgataaatatttatcaaaattttcattgtacatagcctaacaccaccaagataagacatgtagaatcataattatttgattaaatttttgtggaataaaaaggttaaatcctaattgcctacaaaattaaagtaaaatcatgcaacataactaattcattaaattaaggttattagcatattttatgttgtatttcggcaatagtgtggtgatacaagtttaaaataggtgaatttgaaataatatagaaccataagagatcatgctttcatcaacaactacgtttctttatacaaacatatcaaaaaatcttttgagtttcacatggacaccatgttttcgaccgaatcaaaattccttggtaagatctatttcttcctcaaaatttaatgtgtttgattagatttcacatctcacaatttgatttttgtagtggctgtctcatgcatcgttttgtggtcatttcaattatatcctcactttctctaagttcgaactcaccaacaaagattagaaacttacaagaccacactttattgctatctcatcagcttgtttagcctttagccatcttattttgagcatgaaattatgtttcctcgtaacttcttttttgatggcataaaatcaaggcatttaaaaaaaaacaatagatgaaaatttgtagttgttggaatacataagataatccatattagtctcaccaaatttgttaagcttgtttacatctatgaattaaatttatttaatatttacattttaagagaattatcaagcaataggtaggtaaaaagttgtcgagcaagatacaaacatatatataagcccattcaaatttatttttccatataaaaaaatttcaagtgcttatatttttgtttgaagtgtttttgataaaaattctattgttgattggcaatttcatgagatgactactcttaatatcaatataggataaatgtgactttttggggcgattttattttacattgcagatgaaaaagtcagtgttttgagatttaaatacttttccaatgacgaccgtttcgtacctgaattatacaacgtatattgaatacttgaaatgtaaaaaaacttggctagacaggtataacaattattaaaagtcaaggctataaagtatttcatgcaatttaggaaaacaatggctacaaccgtcatagaaaaaacaagatcaatggacgagccgcatattatctcttagaaacgtatttgttgagatacgccaaaaaccgtaatcagcctaatccgccacataatgttttactcattaatagtggttacgaatttatgtttacaatgaaaattttcttctttgcaaccataacatctttttagcaaaacaccgttataattcctatgaaatcgtctcattggtattaaaatgaccaatcaaattaatctcattagttaacattttttgtcatctcatttattaacatattcttattttaatatttttataccaagatatttattaaatataaaaatcaatatatatatatatatgtggaaagaagagaaatgtaaattttcagaaaagacatatataaacatgaaaaacttaaaaattttcaatgataaaaatgaaaataagatcattattggtgtgagtaaaaactttaatatctaaggttgagaaaagtatatcgaagaccagtttaagtctcgtcaggaaaaagcaaaacgctctgagacttagttatcgagaaaccctcttttaacatggattctgacgccggtggaggtgcaaatcgcatgtgtcgggactttgcttctctgatctacttgctctagttactactcatgttctctatactctcagcttcattcctctcctggcaaactttgtcttaaccttaatagacctttcccctcgcacgtcaacctcaacctctgctcgcaattgatccaccaaaaccaccttactccggcgatgaaaaccttaaagaaaaatctacggccatcactaagctttacacctctaatcctagatctgatttgatttttctagaagaacaatcacaccgggaggaggagaacttcctcttggaccgtcatatgcgccatgttcggtggagtcgtcaacggcgcacagcgattctttcttcttgactgaaaaatcatggctttccaatctcactcgactagaaaaaatagtgagtcttctctcccaatatatcggtttattgagatccgctcttaagatcgtccagtcaagatctcttctctcgtatcttgtgacgcctccatctccgatcatacgcctcaagcaatgacaagtcgggatcgtgagcagccgcttagtccgtcttaatagcgccaaccataaggcaaaacactaattgtcaagatgggcctcttctttgtgataggccttccttgttttggcccactaaactatctcctacggcctaaaagtatttgtacgtttatcatctttgtaactactggacccaggtatgtcccaattatatttttgttaagccctaatatattgatgtctttttcccctattgagaatggtagaagacgccaccctcacatcggatcaaaaccaatagttaggattgacaaataccatcctttaatcttgatggaatataagtttagtgttttagagctcgccactgaacccttttatccctataataaacctttgcaaccatactcttcaatagagagaactattattagaactcgacctcttttcgtagaaaccgtgttggttcctaatcttctttttagacgttacgtgcatagagtcgatatcacccaaggtcaaagaatttatatcaacgtcactagccctttatatcaacgtcactatctttgttgtatccaaccataaggttgatgtttacttaatctttgtatttgctatgacttgaatgattgaaatatgttttgtccaaaaaagaaaaatgtctcgacaggcaagttatgtttttagtatcgacatgtgaacttatgttacaaaaccatagttatactctatgtgttcgatcaagtttgatgttttagattttcacataatttaagattcaaaagtttttttatttatttaaataaaatatatgaatattgaaatccaaggtaacatgttcgttacttacacatgcaacaaaagtgaaagttagaccatctccaatgtaagaccatctcaaatgcatatttctatttttttcttctattttagagaaaatagagttgattttactctattgtattcctctaaaatagagttttctctaaaattgaggaaaaaaatagagattactttatatatagagattattctatatatagagtaaaaagtgagattcctctatttgtttccgatattttagagtaaactctatttaagaggcatacattggagcaaaatatttctaaaatagagtatgatttgcattggagatgctttaagcctcaatttttttctctctaaaatagagtatgatttctctccaatgtatcccttttttctctaaaatagagtatgatttctcttcaatgtatccctttatatgttactctaaaatagaggtaatgtaacaaaagatataattactcaatatatagaacaatcctatcatttattctatttaagaatcacatatagagtagggttagagagaatgtacttgaaaatagacatttagaagaaaattttgagtggcgttgaagatgctcttacacattcaacaaattctctattatagcaccatagtcgtttcacattccttcgtcaccctctttttcattttaatttccattttttaaataaaatttattcactcaaaaatgattgaaatttttcaacttggagccacaattatattagtaaaaaaaaaaacagactggagccaaaaccagcaactatatttcactaatcttcaatttaaataagcgtaggtttataccatttagccatattcaacaatttgtttgacttgaaaaaaatctaacaagagataagtcaaacaagagagacttcatcggaaaattgtttgggcgttccactcaaccaagaacaagaagacttttctttcataaactcaggtatttttatttatgtattttagtattatgttgtattttgtaatagtgatttactaatgtttttaatttatttgttagataatgcatatatatctaatttttaggaacatcaagtagcaatttaatttgtaattaatgacttatctatttatcatgagtttatgagttcacgaagaattaaaaatgaatcttgttattagttaagtttttatatgttacatatagtttttattatttgcttccgattgcagaaaagtcatatcgtacatgtcaaaataaaaattctatcgggaagataatgtgtttagccgtcatgtcccgtccaagatttgatagagaaggaaataattgttttgagaaaaataagaatgtttccatttgttacaatgcaaaagtcttaaagacaaagtagaaatcgagaggagggtactttggagttaaagccgacgacatccatcaagagagaaaaaataaaggagtttttaactgaaaaatttgtaccaagaattcattaaagatggccacaagatgattttggaaaacctatttttatttaacaagataatgcaagaactcacattgatccaagagatgaggaattctgagtagtagtttctcatcatggctttgacattcgtttgatgtgtcaaccaccgaattcgcctgacttgaatattttagatcttggattttttagtgccattcaaacactctaacacaaggtgtgtccaaagacgataaaagatcttatttctatggtagaaaattcatttgacgaacatcccgcaaaacaagtgaaccaaaattttttgactttgcaatcgtgcatgcaagaaattatgaaaattcgaggctctaacaagtatataatcccacatttgaagaaatccatcttggagaaagaaggtaatataccttcacaaatggcttgtgatcctaatttagtactagatatagtaaattacttagctacctaagtttttattagggttttgtgcaaaaaaaactttaactcttccatttttgcaactatgtcctccacctccaacaaatacagattaatcctatccctacaagaaaacagtcaatatgcgaggaagcgttgcgagggaaggcattcctcgcagtttttgcgagggtattgcgagtaacgtgctacacatcggacgcgcgtagcaattccgtcgcaaaacttgcgagggaaggcttcctcgcaaatttgcgagggaagtacgatggtttcgcaagaaagatattatccgtcgcaaatcccaaacagatacgtcgcaaatctttaccctaaaccctaaaatacataaaagtgttttgcgatctttgattctcattcatacaagttgattatatggtttgcacagaaaaatattttatttgtttcaatattaacatttcattttgaaaatgttaaacattcatgattcatacttaaagaaaatcataagatcatcattgatgtttttggggaaaaaacacattcgaagtatatgatgataaaataggttcaaatgtagataattaacattctaatgaatcaaaaaaatgaatccaaatgaatttgagtagtgattgttgtatttttcgaaattgattctacattgcgaggactttgcgaggtgtttgctagtgtgcgtagcacttccctcgcaatttttaccctaaaccctaaaatatttagaatttttagtcatgttcttattttgttgagggtcttactagaaataggagaaactgaatcaaatctgattattgaatcagatatgatttaattggtttaaacactgcgagggatttgctaggcgctctcgcagttccctcgcaatatatgctgcgttttgattggtttaaaagacggtgcctctcaatttcctagcaaggcttgcgagtgatttgcgaggaaataaattcttatatatacacgataacctagtttgagcgaaactcaaacctaccgcatcaaaccctaaccctaattcttttcttcgattctcttcttctccgatatgttttcctcgtcgccggcttctcttcttctccgatctattttcttcgtcgccgcctctcttctttttcgatctgattacgtcaccgcctctcttcttcttctccgccgcgtctcatattctccagcagccgtcgtaactcttcttctccagcttcagccgcgagttaatctgtttcttctccaaggtaacgtcttcttctccgatataacttcttctttccaatccaacttccaccgtccgatctaacttcttcttcttctccgtcgcgtctcttcttctccagcagccgtcgcgactcttcttctccaacagcagccgcgactcgatctcttttgcctccaaggtaacgttttcttctccgatctaacttcttcttcatctccgatcttacattgttttcccgatctaatcttttctagtttacggatctaaactctgggttttgttttttttgcaagatgccgacgtcggagaatacttatgcatggtataggtcacagcagtgagacccgttgcatgtcaattctcctgttagtgctgggaatacttcaggggttcaaggttcacgccatccaccatcgcctccaacgccaaccactcagccttctgtcaatcattctgattctcaatctgagcgtctcaacaatatcacactggatgagcttcttgatagtcctggtcgtgctggcttgacaaggctagacccaaagcgtcctccgggaactctctggtaaggttaaattcatagtccatagaacagcttaggttgtggtgccttagaactttgtagtgccttagagcgtaatggaattaggttgtagtgccttagaagtttcaacaagtagaacaacttggttgtacttagcattgtagtgtcttagaagtttaaagacatagaaatccttatgtgtgggctggttgctcttcttgtaggtttgacgatgactctacagatgcagcaacagtccgcatcatctttgaaagagatatcaaagaacctcatgctaattggtcacagacatcaaaggctacaatcgatcaatggtatgaaacgtttgcggtaagttctgtgctcttttgatgtttatgcttgttttgtgtatggtttcatttctgatgttagcttctcttttgtagcaagtatataactgggatcgttcaattaacaaaagagtaagggttgagtttgaagcaaagctaaagtctaggatgtctgatcaagtgtcacggtggaagggaaattggaaggagaagggtgatgaagccaagccaaaatggattgatccagatgtgtcgaaaggtcttgtacagttttggcaagatccaaagtcagaaaaaagagtaacaacagcagaaatgctagatatcatgatccggatggcaaaggcatctataaacaccgttcaggccagacctcatacaaagctcgtgcaagaaaacgggtacgataaatattcttctctccttaccattacttaatctagaattacatattgacatcttgtttatctctttgtgtttcagtgtgagaagactggagaaaaaaactcctgatttccttgagctgctagatgagacacacagaaaagcggatggaagcttgatcgatgggaagtcagaggagatctacaagaaagtgacatctaggattgaagaggaagagtctcatatgggttcaggggacaatccggagagcactggatcaggtggactttctgttcatgccaagaacaagatatttattgaggtaaattttatgtgctctttcttttgtgcttgttgtgtctttagtttcaagtccttgtgttgtgtatggtgtctgaaatcctgcagcttattgtgttgtgtatggtgtcattcttcttggcagcttattattgtgtatggtgtctgaaatcttggcagtttattgtgttgtgtatggtgtctgaaatattggcagcttattttgttgtgtatggtgtctgaaatcttggcagcttattgtgttccgtatggtgtctgaaatcttgacagcttattgtgttgtctgaaatcttgagagcttattcattatactttgtgtagtgttgtgtttgaattgctttctattgcaagtgtggttgtgttgtgtacttgatagtcactattagcgttgtctagttgtgtttgaattcttttgtcttgtgttgaacttgttttctcacttgttttttgttgtgtccttgtgagtttttgtgatctttgcaggttgctccgagaaagaaaggaaggatttatggggttggatctctgcagtttgaagcatcctcagcccatagtggtccaacgcttcctagtgatgatccagttatactttctcagaagctggttgccgctgaagcttgcattcaaaatcaggctgagaagatcaacagcttcgatatcctgtttgactatcttgctgagaaagatccagctttagctgccattcttcgatgtggttccttgacacagactagaccggttagcgcaaatgaaccacctgtagctacagctccggaacaacaagccaatgagaagacagttgctgctaccctagctaaccttgcaacagaatcctctccatcatcagtattttgagaaaaatgtctttctctttttccttgtaatctttttagaacaagttgattatggtttcaaacattataattgtagtatacattttatataacttgtgaaatttcagctttcaattgtgtctttatttaagaagcaaaaatcatctctaagcaagccataatttattaattaggactaattaacaactaattaactaggtaattagagtctaattaaccacgaatcaagccttaatatatcaggaaaacgttgcaaaatacttgcaaatccatcgcaatatttgcgatggatttgttaggcagaaagaaaagaatcgcaaatccctcgcaataattgcgagggaagtactagaactgtagttgcgtgtgttttgcgaggaaaacagtttttcgcaaaatttgcgagggaattgcgactttttaccatttgcgagaagcaatttgcgaggaactgggtttcctcgcaaatccctcgcttttagctgtttgcgagggattagcgagcaattcttccctcgcaaaacgattgttttcttgtagtctaaaataatacgcattgtactccttttctcattttttgctatcatcaattttgtaaatattgacatataatatgtttaatcgaagctcttgcgacgaagagttcaacttcaccttcaaaattttaaaaatgcaatgtatgtgaccgtaaaaatatttataatatacatataaaggtcatattgcgtattattttagacttcacaatattaatctgcattagttagaggtgtagggtaaaattgtaaaaatggatgagttagagtttttttttttgcagaaatccctttttattattatcattatatgtttgttttactttgttaaagggctgataaaattttgtaagatcttttaattttgaagaatttttgaatttatatttgatgatttacatttgcaacatacaaaactccaaatttaaagtaacaaacttggtggcatcctaccaataaaaaaagagttaatatagatttggtcttctctcagttacatttgttcacacattcataacaatatttgtaaaattaggaaacaaaaaataaaaaataaataggagaaaaaattagaaaacaaaaggagtttatatagcttaatttgtttttatagatttggtattcgccgagttacacttctttcttttcgtattcatagcaaaaatgataaaaaaaaaaaaaaagcaaaaaagaaagataatctaaataaaactgataaaataggaaacaaaggagaaaaattaagaaaataccaaattaatagaagtcatgaaaatatatcatcagcatcgtcattatagtatcgttaatttccttgttaggatgcaactctcctacctctttataatttttttttgttcaaatcaaattctaggatggaggtagaattgatattgtaaatccgataaacattttttgatttgtcttctccatcctcatatggcttatttaaatcaaatatcaggacaatgttagctacgctcagaatcggttgaatcttctttggtttgtcgtcttccttttcggtttgtctcttaatggtgttagatacgctttgagtatattaaacatgattcatatctcctccttattccttcagttaaaaagagaaaaagaataacaagaagaaatgaaaaaagaaacgatgaaatattaattgtcaaaggagaacaaattatggtgattagcttctttggactggttcgtaaatgacaaagaattattagtgatgtttaatgggagtaatctatgattataaataggagtgagaagcttttttcgttcgtaaataaaaataaaaagcttttgacgtttaagtttcttatccaaaagtacactccactccattcttaataattaataaaatttaataaaataaataaattaaataaaaacttcgtgaaacaaataaaaaacctaaaacatcaaacttgatggaaccaagcgagtatatgataaatgcttattttattgatatatgttggcaatttcataaaatgattagaagttttaatcttattcattagaccattgttggacagtttttaagaatatataaaacgatttgctataataatggataatgaagcggtaatgataaatctattaccatctgaaaatcaatgtctttatagtgaatgttaatttattcaagtatgttgtaaagatcacatattaaatttgattgctaatgaatatcttgataatcaaatatatgaaagttgatcaaatctctccatccttccgctatatcaccagttgagagagtgacacatgtcactaggggtgtcaaaatgggtaacccaactcaactcaactcataatcaaatgagtttagggttaaatgagttatgggttgacccaactcattttgttaaatgggttgggtcaacccataactcatttaatttgatgggttgagttgttaaatgagttaacctatttaaataataatttaattaatgattattataaaacaataataaataattatcattattaataattattaattcattatcatcaaacttagaatatttacagattccaccgtttatggatttacgtttttggcgggaaaattacgggttttcgtttttggcggaaaaatcacggatttacgtttttggcgggaaaattacaggtttacgtttttggtgggaaaatcacgggtttacgtttttggcgggaaaatcacgggttttcgtttttggcgggaaaattacatgtttacgtttttggcgggaaaatcacgcgtttacgtttttggcgggaaaatcacgggttttcgtttttggcgggaaaatcacgggttttcgtttttggcgggaaaatcatgggttttcgtttttggcgggaaaatcatgggttttcgttttttgcgggaaatcacgggtttacgttttttgcggaaaaatcacggatttacgtttttggcgggaaaatcgcgggtttatgtttttttgtggaaaaattacgagtttactttttctcaattcatcgcttgtatatttaagaaatttggaaaaatattgattttattagattggtttagatgtgttggttaaacttaaattggcattgatttagagattttagttggtttaattcaattttacaaaacttgatgggttaattgggtaaaccattgaaaccattaaccattacaacccaactcattttacattaaagataacatttattttaaacataaataatcgtaaataagttttaaacaatgtaattaaaaaacatacaaaatagaatgaatcattttgtcgagtgttagagaaataaataaaaacgataattagaaaaagcaccaaaattatttatcaaattaatttgaccaatataaattgttataactaacaaattatggataaataaaaccaaacattgtgcaagtgttggcctagtatgactccgattggttacattgcatgataggataatggtataagttgcagaataaaaatttgtagaatgaaaatttgtaaaatggaaaaccgtataatgaaattatgtttaaaatatgttgattgaatacattttgcataatggcaaaataaaatattatatacttaataaacaaaataatgtttaatatattttaagtaatatttgataaaaaaaaaaataagaaaattaaaatttattttaaagttgtgaatttttttatatattattaattatataattttgtgtaaacaattatattttttttcttttacaattaataatatttagtatgcttataagaataacaatttattatgcacataagcaactatatacccactttctttcataatgaatttttacttgtaattttagggtgcaaattctgcgtttttgcgtttgttaatgtaattatgcagattttttcttgattgacaaacttcttgcataatcgcattagaaaacaccgttatgtcattatgcgtgttaccaatcaaaaaacaccttaagtaatagtatcataagtgttcgtaatactgtaagaatatgtgagattttctagtttaagattggaaatatctaagtgttgggtgaaaatcacaagaggaattattgtattagattgtgataataagtggaattattaatttgcatttgacatgatatatggatataaattgtaagacgacagattttttaaaaagttattctaatcaaacaagtcaccttcaataacaattgattagaacataccgcgtcatatagtaaaaaacctttaaatcatatgttaacattctcttcttctataaagtaacatcaaatagttactacaatgagatatacaacaatcaagtatggtatttagggtttaacgtaagatttgagagatatgatttatgcaatgacatccaaatttgatagatattgagaagatatagaaaaagccaataaaatattgatagtggctaaaatatttgatcattttcatataatgatatttgcattgtttagctttaaacttatacgtggataaggtaatctaaagtgtgagaaataataatttgctgataaatattttgtagagataatttgagtatagtgtttgatagaccagtttaagtctacaatcttctttctgtaaatgagttggaaacatatcaaaaagacgagtcagatatactcaaccatgttttaaggtagtaaaaataaatagatcaaaatattcaaccatgtttccaatggcaggagaagttcttgcaataccaatatctttggctatatatgagtctgtttttttaaccattagtgattgtaatttaaatcaatataaaagctatttggtttgtggtgttgttaaaccgggtgaagcactctctcaactctttatacatattttttctttttgttgactaataaatttaacattttaacacacaaaaaaatgcttttgacttaaaattggttacatgcattattaggttcagaaaaaatgaggtatttaagatttatattcagcaatggttcatatatatgctctcatgtctgattttttcttttaaatatatttatgttagaaaatgatctgcaacacatcagactaaaaaactgaattattttttttatatattttctaatattaatagaaaacggtttattaaacaaatgaatatgcaaatactctaaaccgtgagaattccttgtggagtttcatttgtatataatatttattttctttgctttataactttaaaataccatcatgattattatagttcagcttctatgtaatgaaaccatgtagacaataaaataaagaaaataagaagcagtttttattatctaaaaagcgtagacaaaaataattaagaaaacttgaacaaaagaaaaaagatagaaagttgagacgaaaaagaatatataaggggaatgggaaaaaaaaatcatctaagcaagggatgaagatcaaactcgagttgtttaatctcatacataaatccgctttcaaattaattttatgttgtcgttccataattatattttttcttaaaaatagtcttgttttccattctctctctcaaaccaaatttacacatttaaataaactttaaacagaaaaaccactattaatgtagtaatatattaaatattgatatatttctatatcaaatttaaaactaaaaccaaaaaaagaaagaaaaatttctatatcaaatttagaactaaaaacaaataaaaatagtgtcatttccattatgttcttttaaaccaaactttacattctaagaaaaaacactattgatgtgtatattaaacttttgatatctttctaaatcaaacttttcttaaggtatttaaaagtgatagtattctgaatggaaaaataacaatttaacactaaaaccaataaaataaagagaaaaatgtttgtggctaacaaaaaaaaaaaatccagattgtgattacaaaaaaaaaacatttctagggcatgtcattgacttcctttgaagaagaagaagaagagagagagagactgaaaaagaaaaagtaagaaagggaatgaaataaatccgatcgaatacaattttgacgtccgcaaggacactattctctctcttctcatcttcttctttctctcttctctctctctctctacagcgaagaacaggacacaaattactctgtgaagcttaaaaaggtataatttttaataaaacccagaaactacaatttctaggcggcagagaaaatttgtttctacttctttttgtttctctttgtcttctcgtctctttatccccaaacccatcaataaaaaaccctaaaagacttcaaatttcttcaagattttgttcatcggaagttttcagatttttagttgtgtaaagtctcttcctttttgttcgattctctttgttttgagtcttatcagagacttattcttcaattccacctctgggtaagtttctatagattctcactagtaatctctgttttttttctcaattagggtttgatcaaagtttcgtttttttctttctgggtttgttcttaacattatgcttttgttttgttaaggtggtgagagttggaaatggagtagatttgcttaatttagatctgtaagtaatcaacagacagtgttgtttggttctagaatgttcgatacggaatctcatcactcagattcatctctttccgtggtgtttacgactctgaagcttatcattgctcagaaagaatacgtctttgctcctacacagagctgagttttataaagtcgtcagttttgtttcttgctttctttgttgattgtggagttgtgaattagtaagagtatggtaccatcagagccgcctaatcctgttgggggtggtgaaaatgttccgccttcgatattaggaggacaaggaggagctcctcttccttctcaaccagcatttccttcacttgtctctccgcgtactcagtttggtaacaatatgagtatgagtatgcttgggaatgctccaaatatatcttctcttctcaataatcagtcttttgtaaatggtatccctggttctatgatttctatggatacaagtggtgctgagtctgacccgatgtctaacgtcgggtttagtggtttgtcgtcttttaatgcgtcgagtatggtgtctccgcgctcatcaggtcaagttcagggtcagcagttttcgaatgtttcggctaaccagttgttggctgagcaacaacggaataagaaaatggagacgcagagttttcaacatggtcagcagcagtcaatgcagcagcagttttcgacagtgcgtggtggtggattagcaggtgtgggacctgttaagatggagcctggtcaggtttcgaatgatcagcagcatggtcaagtacaacagcagcaacagaaaatgttgagaaacctagggtcagttaagttggaaccgcagcaaattcaggccatgagaaatttggcccaagtgaaaatggaacctcaacattctgagcagtcattgtttctccaacaacagcagaggcaacaacagcaacaacaacaacaacaatttcttcaaatgccggggcaatctccgcaggctcaaatgaacatatttcagcagcagagacttatgcaacttcaacaacagcaactcttgaaatctatgcctcaacagcgtcctcaattaccacagcagttccaacagcagaatttacctctaaggccacctctgaaaccagtgtatgaacctggcatgggtgctcagcgtcttacacagtatatgtacagacaacaacataggcctgaagtaaagcttcttaccataaatttaacttctttcagcctatggcttttcttcataattgacatttgtgcttgctattaaatgcaggacaataatatcgagttctggagaaaatttgtagctgagtactttgctcctaatgccaaaaagagatggtgcgtctctatgtatggcagtggcaggcaaacaacaggcgttttccctcaggttggtttactgctcaatgaacttatcttgtttgtaatacaattgtaaaggagcttgtcttttgcacctgagccagttattctggataaattacgtacttgtttcatgttatacctctttacatgagtatttttattccacaaacattgcaggatgtgtggcactgtgagatatgtaaccgaaagcctggacgtggttttggtatgttatttagatgatcagtgcagacaatttcctgtacatcttatcaaatattccttccttactgctttgtctctttcattgtttagaggcaaccgccgaagtccttccgcggctgtttaagattaagtatgagagtgggacgttagaagaactgttatatgtagatatgccaagggagtcccagaattcatctggccaaattgtcctggagtatgcaaaagcaacacaagagagtgtctttgagcatcttcgggttgttcgtgatggccaacttcgaatagtcttctcgccagatcttaaggttcttcaagctactctatctttcgcagcaaattattatactattactttctctccaagccctttattcttgtaagttccttctcagatattctcctgggaattttgtgctcggcggcatgaagagcttattccacgaagacttttgataccgcaggtaacttccagaaagattcaccatattgctctgacatatagttattttggagatgcggcctttccttttgtcacaaaattggatatgctgtcttaatattattctagtctgcttttctttgcgaaatcgtcactttacctttcatcttttgtggtttccaaatttcaataggagtagaatattacacatctaaatcagtgaaaacagcttaggtaaattagctatttttgtattcacatacaggttagtcagcttggatcggcagctcagaaatatcaacaagctgctcaaaatgcaacaacagattctgctcttccggagctacaaaataattgcaatatgtaaacttcctctctttcgctgtgaaattgatgtaacaaatcctgttattcgacttttgattggtgatctctgatgtgctgcaactggtctgcaggtttgttgcatctgctagacaattggcaaaggccctggaagtaccacttgtgaatgatttgggatacacaaagagatatgttcggtgtttgcaggtaaataactaatgtctcaatatggatcaagtgaactctacaatcttgcttaaaacttaagattcttgccatcaatgaaaatgcagctttgaaaaggataatacataaaaatgaaataaacttaatcaatctttgtatttagtctgtccctgtgaccatgtttgccaatgcacattgatattttgcaatattgtagatctcagaggtggtaaatagtatgaaggacctgatagattatagcagagaaacacgaacaggaccaatcggtaagtttatgtgaccaccttttaatgcatttggtatttttaatcttgaagcacctactcttttcgttcatgtattatatcagaacttcattgtacatattctccggtgatttgactgatgtcatgttttctttctttggtacagagagtttagccaagtttcctcggagaacaggcccttcatctgcactgcctggtccttctcctcagcaagccagcgaccagcttaggcagcagcagcaacaacaacagcagcagcagcaacagcaacaacaacaacaacaacaacagcagcagcagcaaacagtttcccagaatacaaacagtgatcaaagtagtaggcaagttgcactaatgcagggtaatccaagcaatggtgtaaattatgcctttaatgcagcctctgcatccacttccaccagcagcatcgcagggctcatccaccagaattcaatgaagggaagacatcagaatgctgcttacaatcctccaaacagcccctatggaggaaactctgttcagatgcaatcacctagttcctcgggtaccatggtgccatcatcatcgcagcaacaacacaacctgccaacatttcagtctccaacatcctcatctaataacaataatccctctcaaaacgggataccatctgttaatcacatgggttccacaaactcaccagcaatgcaacaggcaggtgaggttgatggaaacgagtctagctcggtgcagaagatactgaatgaaatcctgatgaacaaccaagctcataataatagctcaggaggaagcatggttgggcatgggtctttcgggaatgatgggaagggtcaagctaatgtaaatagttctggtgttttactgatgaatggccaagtgaacaacaacaacaacacaaatattggaggtgctggtgggtttggtggtgggattggtcaatccatggcagcaaacggaatcaataatataaacggtaacaatagtctcatgaacggaagagttgggatgatggtgcgggatccaaacggtcaacaggatttaggaaaccaacttttaggagcagtgaatggtttcaacaattttgattggaacgcgtgaaatgaagaagaggaagaagagacactgaaagggtaatgttctgcttgcgcagcatcacacatcttcaaactcaggataaggataggccaataagccgtgatattgtgcttaagaaaggaagagtcaaatctttgtatcaataactggtttctaggtcacctccacaatcaccaataccatctcttgagttactgtttctttttttactttggggagtttttcttatgctttatagtttataatgtacatctttctatcggtgtgtgttccttagggcacatcatcagggaggcaatgaatcaagctctatccttcatttatctctctggtctcttccatgtgttaaccaaacttccctaaattctgaccacaacgttaaatatgtgcaatgctcttgaacgatgctgatcggtcatgattttttgttgttagtgcaatgaaataccacaagccgtacgatgtctattgtttggtcacagttattaatcaaataccaaatatccaagcttgtctcttaaacacaagtttttactcttaaagtttgcgcaaaatttcattccacaagttttgtgtattcatactcacatatgactacgagatttaacacattgacaaaattaaaagcacaaaaggagaaaattgtagtttcagaaagagtagtctttcaaatctgctctagagtcgtccatgtcaatctcagacatgcattcgtcagcactaataggagggagtttccgagtcttacgcttaaggttgtgtttgtgccaatcactcttacagtgctctctgtattgcttagcctctccaacgaacgtgttgcaagtgctgcacttggtccccttcttttcttctccaccttcttgctttatgttatctgtagtacttatctcttgcttctgcagtttcttgctaagttcaacgacgggatcggtcaaatccttagtctcagtctcagcaggtaacaacggcttgtgggtttgcaatgccatatcatcatgctcatcgtaatgatccatgcttgtgtcaccttctgcatgaactgatacagcgagtatttctagtcttccctggatactcctcacatgggaatcacactctcggaataggcccggttccatctcgcagacctacacaagaaatgtatcaccatgatcagagaggattatagaaaagaagaagttcaaaatgtttgaagatatagatcattacagtggacatctgtgttccagattcgtctttggagacaacactaccatcccattcttttagcttctccagaagcgaggggaaattttgaacaggaacagtaagacgcagtctcattggagaacgctttatagggaagtgcttttgcagctcacggatgacatcaagtgcctgcatagttttgataatcaaaatgaagactcacataagcttttgatagaaagcccacaagtcactttgcttctacattataactttaaacaactcacctgcttcttggaattactatgaggatcaacagcaaaatgaatttcatgcattaggcgctctaccatgctgatggtataaggtcgttgtgtttcagggttgatagttttctgcataacaatcgttgctatatcccgaaactggcttgagaactgtgattctctttcttttccagcaacttgaagctctcctttctccaaaatctgaacatgagagttggaaatgcaacatattagatatattataaggagtcagaacttcagaaatctaagaaaatcaaacaagcgttttaacatacatcgatgcatattttcgtatgatcatctgatccaaacgacttcatcaagtctttcgattttgcaagaactcctttcgaaacatttgaataaacagtatgcgactgtagcacttcatctatatccttctccctgcataaacattttgactcaaatctcattacttttctaagaggtcaaacacattgtccatctttcacaccaaattcagcatgctctaccatttgcgtacattatttacagagataaacgactaaattagacttaccacctccacattagaatcgactcgccaaattcaaaaacatcaactcaagacaagtagtcaagaacaacgcaaacaaaaattgatgatgccattaactcatatccctcatcacaccaaacttatcataccatacattattttaagaaataaacaactaattaagtataagacctccacatcataaccgaattcgtcaaattcggaaaacaaaatcaacacagggtcagtcaaagaacaacacaaacaaagattgataatgcgatgatactcgtttctcttcagattaggtcattttaacaccaaattcatcacactataccaattccttacattatttacagagataaacagctaaaattaggcttaagacctcaatatcaaaatcaaattcgccaaaatcaacacaagacaagtcaagaacaacgcaaacaaagattgatgatgcgatttatcaaattaggtcaaacacatgatccatttaaacacaatattcatctaactacacttttaacagtgataaacaaccaaaaacccgtaaccaaattcgacaaaatcaagcagcgacgaagatcgattgaagcgattatagtggagataagcaaagatttcgaagcttacacgccagaccgccatgaaaggaccttattcttgtaacaagcgatctcgaagcgattgccttgctttttgagacgaaccactgcaacattagtcaacctcttttgccctaccggttgcaccagcgtcttcgacatacttctctctcgcgaattttggtttccctctcgccgccactaaattttgggatatttatttgttgaaactgcaaaatgtgataggtcttcacttgtttattaagttcgtggctaaatgtgaagaaaataaaaagttattggctaaaacttaaagggttgcctgaattttcagccctatactagttaaaatttcaacattccatcctaaacttttagtcacttgaaaaatcaccataaacaattttaatctcgataaaactacatgtactttcggatttgttcttaaaactacgcctccaattgaaccgaccagttaaccgataattatacatccggtttgacttacccataatttaaccaaaactaatccgattttgactttattttaacccaatttatatccaaaaaatatattctttagaagaaaaatacattttatttattttcatttatttttataaaaaattaaaaataaattaattaattttaccaaaataataaaataacaaaatataccacacaaaattatataataaaattttagtatatattttggtaataaacaaaatataccgcaaaataatataacaaaatagacaacaaattctttttataaatacaatggtgttatatataaatgtatttggtatatactctaaatttaataattcaaaggtcattttctttttaaaaacaccataatcatatataaatatatatatatatatatatacatatataactcatcttgaatatataaaaagaaaactgaatctataaagaaaaataaatttataaataccataatatatactttgattgtggtgtttacggatatctataaaaataaatttggcatatattttgaatttcattacatatatagagttcaaaggtcatatattataatttcaagaaaaatgaatatttttgtttaaaaaaagacatagctttaaatttataaaaaaatataaatgattgccaaaaggaaaatgtatatgtttgtatattatcaaaattttataacaaaatgtagctaaaaatataatttggggtatattttgtcatattaagttttgctaaaattaagtaataatttaatatttttaattgtttatcacaaatacaaattaataaaaatacttttacttcttaataagacaatttatttacattttgtgtgggtcaaaattaggctaatatagagtcaaaatcggattagtttcggttaaattatgggtaagtcaaaccggatgtataattatcggttaactggtcggttcaattggaggcgtagttttaagaacaaatccgaaagtacatgtagttttatcgagattaaaattatttctgaaggtttttcaagtggctaaaagtttagggtgaatgttgagatttcaactagtatagggctgaaaattcaggcaacccaaacttaaaatattgaaaggtttttagcggttaggagaaccggcctagacatcgaaactcggtgactctgattcgacttgtctaaccggtcagaccgggttttctaattttaatagcttctgataaacaacccattggcttaaggatttttaatttaggggcatctttgagcagacgcattagtagattctcccattctggttgatatgtacttagatgatgtgggttctaaaatccacactagagatttgtatttaagattatgagaaaggagggctagatcttaactgaaaccttgagagttatattgctaagaacgaatggacttttgtattaattatgacaaagcttttacaatgtgaaaagagattacaagtgtaaaagtgtgtgtgtgcgaatgtgaactggattgaatgtctcttccaagtcgtccttgctcccttatatagatctacgcacgtggtagcttcgtccgggatctgcggagatcctcctagatattcatcaggtcagttccaaaatatcaggtccgctccgcgaatatctcctcatcagttcctaggtcattattcgcttatctcccttcatcagatgactgggcttatctggcccaagtacccattcgcgtatgtgggctcgtcagctgcataggtcctctacttggtgggcttggtgggcttttgtgggctggcttggtattttcgcaggtggattcctggaggggaatccagctccaacatttgccccccagcccattgagtgagtaagcgaactcgatgagcggacatataggtcaggtaagattgcgaaaatattcttgatgagaagataaatgtgattagatcactcagttttgaggataaactcaacaatttcgatttaatttcagattcccttaaccgaaagatttcgaggaggatacgcgagataagtcgctgctgatgtggacggctgagatggagcgtctcttcagcgcaccgcatctgacggtccagatcaggcgcggagaagagatctctgcaatctcgaaaatcgtggtgatgatggctttaaataacttcccacctatccatttgacgtcacgtcaactcacacaactctcaaggtaacttctctcattctttattatttattgctctttgttttgtagaagtagaaaaatctcgtctttattttttttgctatctccttcgtttctctgctattccctctttctcgatctgccttctttgctcttttctttcatctctctcgtccttctctgtcgaaaaccaaagatgagcgactttgaagattcccagaataaaagcaaccatagctacggcgacgatttaagttcgtccgagacgaggtcggtggcgtcaccgccgcgagtacaaagacgcgtcataaccctgggcggaatggatccaattcgtatgtcgtcaaccagagccgacaagccgaagaagaaaaaggctgccaagcaagggggaggcacgccgatgataaacagcgacctggtcgacctccggaggagatgccaggttccggtggaggtacatatgatactcctaaggccgccgctgcatcctgagaacgtgccggtcgggtggtgctgcgcttatgccaatttcttcgagaaatgtggcctatttttcccgattccggcgtgtattctcgagatgctctactgtctcggcctcgcctttccccagatgtgtccgaacttcgtctgcaatgtgctggcgttattcacccaggctaggaaagtaaacagagaattcagctgccatgacctgcttcagctctaccaggtcaagaccaatgctaggagcgaccaagggacgtactacattagtgctcgtcccagatctctggttctcggcggtttgaaggcttgtcgagacaccaattggcgatccaagtacttctttttcagagtagatcgtcattcaatcggcaatttcgatcctgcgaggataacaaggacctggtctaccaacctgggtcagatggagacctgagcctcttgatttttctttgttgtttgtgtcgaatccttgactgctttttgctgaacgttagtactgaaactaattgtttgtttttgatggtttgcagcaaggaccaagaaagttactctctcggagacggaactcgacctgttaacccttctccgacgtggtcagactgactggtccactttaagaagagatcgcatcgtagctgctcttgccatagctccagcagttcccgtagctccagcagttcttgcaatcgtccctccagcagcatagctagatccgatcaaagaggtcccgcggattgaaccggttctcgaggctgatctgcctgtaggtacgagtttcgttatattttctttggtttaaaaaatgtacgagttatcgagatagctgagcaactcgaattgctaactaacaaatgtcgtgctctatttgttcagttcctcctgactccagctctacttcagaactcccgctcattagaagaatgaggcgtccaagtcttcgtgttcaacgagccaatgccggagctcttgctcgtgctggtgatctgtcggccgcggtgaccgcggctcaaaacattctagctgtttccagcgcatctgcctcaacatctcatccctcgcttcctgaggtcaacaccgggacctctgctgcagcaggtcagtcagttaacattctggttgctcaagtatttgggccatctgcagttgttcgttctgatggcgcaccgtcctctccgaagagagctcggacccagccggaggtgaatccggcggctgagttgctcgtgagcgaccagggggtcgcctctcctagagaggagatagtgggggcaggtcttcaaaccggtctcaggaagtgaggcagacgtccaactccggctgaggatccacgggaagcggactttccactagtcctacactcacgaccgtgatcacccgatcgttgaggacgaggctgggttggcgaacctgcttcgccacgtcaaagggaggaattgtcaggttcctggagtgaacaacatggccgaggcggcggcctatgctgacatgatggcgaaggagggccatgtaataatcgataactgtctccttctaattccatctttatgctagttgtgattttctgttttgctttcggtaggcgatagctgccacaaacaagctggtcgctctctatgagcagcgtctaagccaggtcccctcagcgaatgagctcgaagaaggaaagaccctcatccgggagctgacgtcgagtgtgaaggctggtcaggatcgcgaagtctcgttccaggtacacctcggttttgatttgtttgtatataatttgtcgatgattcgatgattctgatctgattgttatttcaggtggagatcgaaaggctgaaaatggagctatccacttcaaaagacctcgagaaaggttatgatgagaagatcgggttcatggagatggagatcggggggttgcaagccgacaagcagacggcgaggaaccagattcatcgcttggagcagaggagggaagagctctccaaaaaggtgatggacctgacttcgactgcacaaggggcgaagaaagcggttcacgatgttaaggttgagctggctgctgcgtattcgaagctgctagctggggtcaaggagaagtgggttgccaaaaaggagtacacggtactggaggtgcaagcggctgaggtggagacgaacctggctttgatcgaccagatcaccaaggttgctatcgatctgaccgtggagaaacctcggctgcaagcagagctggatgacctagaggcgcggtgcaaatcgaaggaggtatcagactttactctaagcaagttggatctcccgcaggtttcagaccaataaagacgcgtttccgggaggtcttgcggagggttctggtactgtcttcgctacgccagccggagaatcgagggagtgatcactttcgctccttgtttgttttaggattttgtgttttgtttcagacttaatgcctgggaaggcttttatcctttcgtttgctgctttttgaacttggtgcctgggaaggcttttatcctttgttcgtttaagtacttggatgcctgggaaggttttttttatcttttttagcaagtatgttttatctttcgttcgagtgttgacacttcgttgattttggtgtatgatcacctcgctttgtccacgttccggataataattggacttgtttcgcgtccaagttatttcagatgtgatatggtatgttcttcgaaggttaaaactttgagtgagtttgagttgttttgtcttgggaacctgttgaagtgaggtcacacaaaggaccttccagattttgggagctgggcttgtggtatcgccaggtcgcgaataaaaccttcgtttcttccttgtttactatgttatgtgttgatagcgaaagagttagatttggttgtagtaggtgagctccgatgaagccgaagtgatgtgttcttataagtttagttcactatcgactttttggaagcgagatcacaaaatggatccgccaacgttcgggtgttgggctttgggtatcgtaagattacgaatgagtttaaatcatagtgtaaatgattgttttttgcgaaatatgataatgagtatcaaaattgcgtttgcggaggtgactgcctgcatacctggttaggggattaagcccttttgtgatttgattgaagtggtggctgcgctcttaggagctgcctacgtaccctgccaagggatcaaaccttatcgtagttcgattgtttttgagtacttattcgtggtatttcttgagatatatggcattctaaggccgtaactcaggtactccgttgataacttttacgagcttatagacgccgtcacgtaccacctcgatgattcgatagggaccttccccggttagttcccagttttccggcgtttagctctctcgtgttgatgaacacttttcgtaaaacgagctctcccacttcgaatctccgaattttgatattggagttatagtagcgggcggcagcttgttgatagttttgaactcggatcattgcctgatctctccgttcatcgatgaagtccatgttgtcctgtaacatttgcgtgttcaggtccgagttagcaggactggcggtccttctcacgcttggttctatggtttcgacagggattactgcttataaaccataggcgagagaaaaggtgtttcttgcgttgatttgcgaggtgtagttaggtaggcctagagaactccgtggagcacatcggaccacattgattttttggaatcaagtcttttcttgatgttgctaagtatagctttgttgctgcttctgcatgtccgttaccttgtgggtaacggggggtggatgtggtaagacggatcttccacttgtcgcaaaatgctttgatttttcccgaggtgaggttagtcccattatcggtgacgatctcataaggtatgccatgtcggcatacgatattttcccataggaaatcctcgacttgtttctcagttacctgttggaaggctttagcctcaatccatttggtagagtagtcggtgaggaccagtaggttttttagtctcttcttcccaccggaggcttccatgggacctacacgtccatggaccacttcataaacaggtaaggagaaaatatcgaggacatttcctcgggaggttgatgaagagtaggtgcatgtcgttggcatttatcgcacctgagtgattgagctatgtaatcggctagcattgttggccagaagtagccttgctttttaattctgagggcgagggtacgtccactaaagtggctaccacattgtccctcgtgcatgcttttcatgaggtctttcgtttgttgctcgtaggtacataccatatagggacctgcgacgctgcgtttcatcagtctcccttccatgatgcagtaccttgcgctctaggctttgagttttctggtctcccacttgtgaggaggtgtgatccctcgttcgatgtaatcgatgattgggattctccagtcattgcacggttcaggttcgtacgaggcaggttgttcgggggatccgagctccggctcttcctccgctgctcctgcctccgcggctgctgcaagggctctagccgcggtggtggtacttcgggttactcgcgtaaagttgcaagttgccgaggtttctgtcccagcgtgtttgaccgttaggtcgatgctcgggtgttctattcattcgatcgggataatctttttgacgaaaggatctgacgtggaggcgagagctgccaaggcgtctgcagaggtgttttctcctctggggatcctggtcagttcaaacgattcgaactgttgggtcaaggttttgactagttcgaggtacgcttccatgcgctcgtctttagcttcatattccccgtggaactggctggtgacgagttgggagtcgctatgggcgtgtatgtcgcggatccccatttcttgagctagcttaatgccagcaatgagggcttcgtactcagactcgttgtttgatgcgttgaatccgagtcggaacgattgttcgatgacttccccgatgggggaggtgagttgtattcctactccggatccctgtcggttggaggagccatcgacgtggaggagccatttcttattggagttggttccatcctggtccgctaacgggagctcgattacaaagtcggctaggacctatgctttcaagctggttctgttgcgatattctatatcgtactcacttagttctattgcccattttgcaagtcgactcgattgagttggactgtgcagaatggttctgattggttgagacgtcatcactacgattggatgtgattgaaaatattgtctcagttttcgagctgacatgactacggccagtgacagtttttctattgctggataacgagtttcagcgtctatcaatgttttactaacgtaataaatcggtttctgtccttcgtgatcttctctcaccaggacgccgcttatcgtggttcgggagactgccgtgtacaggtacaacggttctccttcttcgggttttgcgagtatgggtggttctgacaagtacgctttcaattgtttgaaggcttgctcgcagtcctcatttcaatcgaactttttatcctttcggaggagctgatagaaagggacgcatttatcggtagatctggatatgaacctgttgagggcgacgatacggagggttagtcgttggacctcccgtgccgtttttggcgatggcatgtcgatcaatgctgcaatctgcttaggattggcctcgatgcctctttcagttactaggtattcgaggaattctcccgagggaactccgaaagagcatttctcggggtttaacttcatttcgaatttgtttaggattttgaagcattctcttaattgcgggacgtggtctttttcgcgagctgacttgaccagcatgtcgtcgatatagacctccattgttttacctagctggtcggcgaacattctgctcacgaatctttggtaagtagctccggcgttttttaaaccgaagggcattactttataacagtaggtgcctcagtcagtaataaaagctcttttttcttggtcatctgggcgcataagtatttggttgtacccggaggattcatccatgaaggacaatagttcgtgttccgcagtggcttcaaccaggtccgtaaagtcgatgcacactctccacttcccatttttctttttaacgacgaccgggttggcgagccagtcagggtattttacttctcttatcgatccgatcttgagcgatcgatcgacctcatcgtgcaaagctttagccctttcaggacctagcttgcgacgtttctgctttataggtcggtaggtcggatcgacgctgagttcgtgtgaggttacttcgaggcttattcctcggaggttcgcacttgaccaggcaaagttgtctttgttttctttgagaaaggttatgagatcctctcgtatcgctgggtcgaggtcttgacctatcccaacgcatcgtttgggatcttattcttctatgcagacctgtgttatcaatgattttcgaggtccgcgttgagaaggatcagaggatctgactgttttcatttccgcgagtttgtcttctatcattagtactacgaggtcagcctttttgacaagctcgtagctgcccatatagcattttcgggagctgcgttggctgccgtatacgactgttattcccttgtccgaggggaatttaatgcattggtggtaggttgatgggacggctttcatggcgtgtagccatggtcttctcagtattgcgttgaaaggagctttcttgtcgactacgaggaaactcgtaagtcgcctcactcctcgtgcgatggttgggagctggatggttcctaaagaaaaggtcgtatactagcaaacccggtaagtggcgttttcctgccttgcagctcggaatcgtggtgctccatttttttgaaggcgtcgtaaaagagtacgtcaactgagcttcccgtgtcgatcattatacgggagagttcgtagttgcctacatcgattcgaataacgcgagcgttatcgtgaggtttatcaaggtcggtggtttcgctttcccagaatgtgatctggtggtcaggtcccatcatcgggctcttgtcttttgtgtaagaatctgccttcctctgatgagttttgatcgaattgattgaatcgttgcagagctgagaccctcccatgatgaaatcgatgcgtttcggggagaggtgctcagttgcgcttctgcagaatttcgagaggcgtaatggaaacctcatgtttttcttatgcgaggcggggggaggtgtggtgactgaccttcctgtcctgccacctagatcgagttctgcaaagactaggtctatgcgttctctcctagcgggtgggggagagtcacttccctccggtgttcgttcccgtttcttttgctttggagtttgctcttcctcctgttcgtcgggaggaggggtttcaactttggggtttgaaccttttttagttttacccccagctgcgattaactttttaacggcgcgacactcctcggtggaatgtcctcttttcttgtggtacttgcaatattttccgaggtcaagttctcgactttcgtcctcagctgcctcttcttttgcaaagaagatatgctgcccctgcgtttggttttcctttttgaagggttttttaattgcaaggggagcgttttgcgttttagattctttgaatcgtaaggccagcacagcgagctcctcttcggctttggcgaagtggagagctttgtgaagggcatcgtctaaagagaccggttgcctgacagtgagttcctcacggaacctagaggagaaccacaaactgttacgaagggctgctatggctacctcttcgtttaggtttgcaattttttattagactgctttgaatgtttcgacgtaagatcgcagggattcgttctcaagttgagtaagacttcagaggtcggcttcagacgtcctgtgttcgataagtaccgaatactgttttaagaaagcggcggcgagctggtcgaaggtatcaataaagttcccttcgaggctagcaaaccattcgaaggcgtgacctacgaggttttctgcgaagaaacggtaatgacctgcttcgttttcttagtctgtcaggtacgctcgtgttatagcgaaacggaaggatctcagatgagcctttggatcgctcgttccgtcgtactccgagaaacagagtctcccgacgtctcggaggcgaaaacgagcgatcctatccgtgaacggggtgcgcctggtttcttcgatcatgcgatctatgtcgggagcatcgctcactgctaggtgcattcgcgaatgcatttgagccatgttcgcgacgttacgcgggtcgaccggtgcttggggactgttaaggaggtcgcttcctggtatccgaggaatggatggcggattagcgatagaggtccgttattgcgttgagttcccgggaattcgagaattggatgcggttgtttggtttctagtccacgtgtacctagggggcgaacaccccattggtagtaaaggtgggaccggtagccttgggaaggcaggcgttgtgcttgtttcgtttcctgttgtcaggttttcgacgagagcgttcacaggtgcctgtaaaaaggcgacctgccggttgatatgaggtgagacgtctatcgaggcgaaatccagacgagttctcggagtaggatcggccggggagacggtacctgtcagatctatggggacctaggcagaaatcccagtttcgcgagggggaacctccttacccgcggatcgcgctctacctaatgtgccatgcgagtggaatcgcgtctctgctgacccacaattgcggcgaggttgcgatgcgcaatttcttggtttttggttaagttgatcaagttcatgatcattacgcagagctcggccaattcgctggcaggtcgcggagggacttgattagacgggttggccgggttatctccgtttggaggctgtatcgtgacgtttcgttctccgccccttgtttgcggagggggagtgatttgatcagatccagaagaattcgagttttgggagatgttctccgtgtcagtgttatggataacagcaacctgggctccgggagggagatccgttgggaggtgcccgtccgtaacgtcatcgtttgggatctgaactggtaagccagatctcgatgaattggatgaattgggatccaagatcgttggtcacaagtgatgtgttagtgttggtgttggaatgatctatttccgtccccatagacggcgccaaatgtgggttttgaaatccacactagagatttgtatttaagattatgagaaaggagggctagatcttcactgaaatcttgagagttatattgctaagaacgaatggacttttgtattaattatggcaaagcttttacaatgtgaaaagagattacaagtgtaaaagtgtgtgtgtgcgaatgtgaactggattgaatgtctcttccaagtcgtccttgctcccttatatagatctacgcacgtggtagcttcgtccgggatctgcggagatcctcctggatattcggcaggtcagttccgaaatatcaggtccgctccgcgaatatctcctcatcagttcctaggtcattattcgcttatctcccttcatcaggtgactgggcttatctggcccaagtacccattcgcgtatgtgggctcgtcagctgcgtaggtcctctacttggtggacttggtggacttttgtgggctggcttggtattttcgcaggtggattcctggacgagaatccagctccaacagatgcaatcgttaatagacagaattttaatggatatagattctatttgtccaaatatcaaaatggatattattagactgggttaatggacatagacagcccgctttgacagctcattttcaagaagaaaagtttatagtatgcataacatgttaggatatgcatattttcatatatacttttatatagaattttctagaactctttgtatctctatatatttgtgtctctcataataattcagtcaagagagtttattatccaatatggtatcatagcctttgttcttctaaaagtattcttttcgtctccccttttctctcttcgtctctcctttttcttcttctccttcgaattttcttttctcttcatcttctttcttcctcatctaaaccttttgtttttctttttatatttttttgttttttaattactctctattctcaacgatggcccgtaccaatctatctaccacctctgacaaaccgttctctattagccaaatcaaatcttacattctcatcactcttgacaaggccaaactcaactacgatacatggagagagctttttgaaatgcatagtagcagttttggtgttcttgtaaaggatttcagagatcaaatggattcgtgttattgatcacaatgaacagcatacaacatatatagagtcaatgtacaaccgaaagcgtgaatctaggaagatctatctaattctagttacaaagaatatatgcatctgttagagtatattcgtagatgattataccaagagtaactaaagagaaccgagccaaaccagcccctaatatattggcacatcgacaacacttcctcctccacgccggaaactgaaaaatcttggaaagagcacaatgatcttgtcaaaatgtggatctatgggacaattaccgagtccatacttgagatcgtcctcaaaccgaagtgctccattcatgacctttggtctgcaatcaaaaatctgtttcgtgataacaaagaagccctatggtacctccttctcatacttctacttctaattctacttccactaatactatacaaaatcgtagtaatgtatcttcaaatcaaaaaaacatttttgtcttcacactgatatcactatttctcccgctctaatatcgcatattcaagcggccaagaatagtcattggaataacgccatgacatacccttagatataactttctagaactctttgtatctctatatatctctatatatgtgtgtctctcataataattcagtcaagggagtttattatccaatataacaatgataaaatcttcttaaataagtatatagagtagaactaataataattacctttgatgtcgttaaacgtaatccgagttacttgattgaagtaagagaagaaagaatctgctcagtatgagtaacataaacatttgcggtttcaatcttaggcatactatgctcaatgccacaaaacccatctggatattcttgaatctccaagagctgcaaagaaggagcatctatcaaaaatccaccatcatttttgatgtctgattctgtaagattgtgtaagtctccttgagaagatagctttgcattagagtgaatatatacacgatttagttacaagagtacagatctttcctacattctaggtacatgaggatattaacaaagtcgtaactaaacttataacaaacatattgagaagaatattgagaagaatatcctatctcctgataccctcccgcagtcttagcatcggtcttgtaatgacgtcaaggcttgacttgaattgattgaacagggaagtaatgtggcccttagtgaaaatgtatgcgtattgatgtgttgcaagaatgtgaatgacacgaacctcgccttttgcgaccttctcccgcacaaagtgtatgtctatttcaacatgcatggttcgctgatgcttgacaagattggtagagagatatacgacactcacattgtcacaaaacaccaacattgcctgcgataacggataatgtaactcgaacaataagttccgtatccaacaagtctctgccaccgcgtttgcctctgccttttattctgcttctgcacttgatcttgaaaccgagccttgtcgcttagacgaccaagagattagagtatcaccaaggaaatcatagtaccctgaagttgaacgcctcgtgtttggacacccagcccagtccgcatccgaataagcgaccaatttcgttgatggagacttagtaatactaagaccttaagaaggagaccccttgatatagcggaagatacgtcagagtgcatgaaggtgtatttcccttgggtcatgcatgaacaagcagacttgttagacatcataagatatattcggtcttgtaatagttaaatattgcagtgctcctgccgagcttctatacagagtcgggttttgtatctttggtccaacattctcttctagctttgaagctagatcaaccagtgtgaggctgggtttgcagttttgcatctctgccctcttaataatatcctttgcatagttttcttggcataagaacatgccgttactatcgagcataactgagatgcctagaaagaagctgagtttacctgtgtctaacattgggaattccgttttgagtttgtcgactatggagtcaaggaatctggatgaggatgttgtaagcattatgtcatcgacatagagcaacaagtaggccttgtcttgcccgtgtttgtacacaaatagagaagcatcacatttactctgcacaaaacccatcttttaacataagctacaaaccgagcattccaagcccgtggtgcttgtttcaggccatacaacgccttatttagcttgcatacataacccggattcctattgtcaacaaaccctgctggtggatacatgtaactgtttcttcaagctctccatgcaaaaaggcgttttgtacatccaactgatgcaccaggcaatgtcgttcaaccgcaaagttcaatactgcacgaattgtagcaggcttaaccactgggctaaacgtttcatcaaaattgactccttgttccaaaaatttaccattagagacaagtctgaatttctatctagagagtgagccgtcagcattaaacttgtgcttgtacaaccaaatcgaattgatgatgtttgtacctgcaggtttaggcactaaactccaagtgtaagtcttaatcaaagcatcatactcttctgtcattgaaggattccaattcggatccattagagcttgcttataaccctttggaatttgggaaagtgtttgagcatttagtgagagaattttctttggtttacgaatgccctgctgcgatctagtcaccatacgctgtggtggtggttgagtcgctacatgaggagcaagagcagtcaaaactagatctgtttcatttgtcgctggaagagaaggtgtaagcaaaagctgcttttgaatttgagaaggctctgtatccgcttcaagaaagtcataagcagagtcgattttagcattggtgatttggtaagggaagatatcctcttaaaatgtgacatgacgagatatcacaattttccgtgtttttaaatcaaaacatctataccctgagtcaagtagaggataacttaggaaagctgatggtgatgaccttggatcaagtttgttttgattatttgtgtgaggataacaaagagaaccaaaaactctaagatgagagtaagatggtgttttgttgaataacactgagaaatgaattttgttatcgatagaagtggatggaaggagattgagaatgtgaactgcattatttagaccatctccaatgatcacctctatatttttctctattttagagggaactctattttagacgcattgtgctccagtggtcacctctaaaatagagtttcctcaaaaataaaggaaaaaatagagatgaattgtagagatctctatttatagagacaaaaagtatatatctctattttttcctctatttcagaggaaactctattttaaaggtgaccattggagcacaatgtctttaaaatagagtcatctctataaatagaggaaaatatagagattactattggagatgcccttagagcttctacccaaaacgtattgggaagatgagcttgaagcagcatagtgcaaaaagcattgttgatgggttcgtatcatgcgttccaatctgccattttgttgagaggtgtatggacacgaaaaacgaaactgtatcccgtgtttagcaaagaaatcatgaaactgtgagtttttatactcaccaccattatcacactgtagagatttaatgtgtttctcgaattgtgttttgacataggtatgaaattgcagaaattttgagaacacatcactcttattgcgaagaggataaatccatagaaaatgagagaattgatcgagaaacaaaacatagtaacgaattccggatagactaggaataggagaagtccacaaatcagaatgtattatttcaaacgtagaagaaactttagagcatctccaacggtgagagtcccccatgggctctcaccaattgttttagtataaattatttgaaattttgttagatgagaacttgtgttttttattttaagttttcttagtccaatggttagtctctctaattaggttcttaggaaaaaaaaaattgtttcataaaaattaataaaagacatcaaaagtatttgaacattgaagaaacaagatttaaaccaagaagaaaccaacttctttgaaccattctataattatcctttgtttccacaattcgatcattagccaaatgacagcttttgcagccaatgacaacaaacgttcagttcaaaacagaaataaagattgacagagcttaaaagtgtcccaaagccaagaggactaggagtgcttggaatttggttatatccaatgaatctcatttcgtagttagtgtctgtatttgctaaatcttgaatggtggtagaatgaagttatgattcaccggaatgctattaatatacatgcattcacacacacagttatcatcaactatcatgtatgaaactgaccgttgcttttcgctactatagtaaagttttgtttaatcacagtcttaagagcatagggaaatgttgcataatcacaatttaatcacatgaaattcaaagtctccactgctcctaacgccgaccatattacgtccaccaagactaaatccaaaatcaagactttctaaatctgaaagcatcattgcctaattgttccaatcaagcatcaatcaccataaaatagattattgtttttgttcttccctagtaatagattacattgttgctaagagatgaggaggtcctgtaggatcatagtttgactaaatctaaggagtttattattaatacccaaatcatcagacccaataagcttcatcatagccatcatcagctcgtgattttttcatttcatcgcagtaacaaaatattggccaacaaaaacactaatgtcggttccagattctaattcaaccagtagtgtctattatagaccaaacaagaaaacaaagtatgaacactaaccataagccttaagtcctcaagatatagcacaaaagcaactaacttggaagcattcttctataagataatatctccttgttcgatgtgccataactacatgtaacaaaacttatgctccaatcattgtttctaacaaaaatcaatccaaaccaacactacttaagagcaaagattagtgttttagccttagttttataactaccaccatctcagaaattgaaagttatcagttggggaattagccaatgaataaaacaccatcgagcaaacaaacccaattcaaaatttcacaaattgatcacacaaacacagattaaaaacgagattcatgtacgcaaaaattcaatgctcggaacaatttctaactaaatatgacaggaaactaacaaaggagatcgaaaatcgaaacttacagatcaaaatgggtataaagcggagtcttcagaatcaccaaagcgaaagggatgaagcagtttcaaagatgatgaatttggtgggtaagcaagagaaagaggttgaagaagaaaatctggacaaaggagactgcctcaaatgatcgtgtcaatcgtcggagcataagtcaccggaatcaccatcgctatcgccatcgcatcgtcggagaaagtcggggaaaatcgaaaaatgtttgggtttaattgttcacgcgttttttttccttgttttgtcaaacatccgaccaatgggaacgcgccacgtcatcgtctctcttacctctcaaaacctctctcaagagagacagctctctcaataatacatcattttgatttaattttgaaactttttttctcggagaatcagggagagaactccatttatcaaacattggagatgctcttagatgtggatgaataaaacggaagcttaacatgctttccaatttgacatgcattacaagtcaatgtgagagtctttttatttggatgaaaataagaataagaaattaacgtcttcaaaacatcgttgctagggtgtggtagtcttcgatgccatatgtcagacgattgagctagaaaggtagaggctggagctgaagttttattgaaagctggaaaaaccggatatagatccccactgctatcattgcgaagaagagtcctcttggtgcgaagatcctttatagaaaagccaaatgggtcaaattctattgagcatttgttatccttagtaaatcgacgaaccgaaacaagatttttgattatgtcaggtgtgacaagaacattatgaagagttaagggacgaggtttattagcaataaataaggatccagtggcagtaacaggaatgcaaccaccattcccaaaaatgacagattttccgatgctaggataaagagaaagttggagattattacctgcaccagaagtcaagtaggctgttgcaccagagtccatgtaccactgagaatcagggggatcttgaagagaaaaggtgttgaatgcttctgcaagatcagccgtgctctcaggtttaggagtcctgaagtgagcgtttgactgctgagaatggtaaggaggtaaaagaccaaaaaagccttgtccattggcattcagctgcggtgggtatccccactgatgattccacatctgatacgggtttggatagaatggtggcctgttccaggagttgaagccttgacgattgtaaccatatgaggatcgtcctccgccccgaaacctgttgttgcctccgccacgtcctctgtaagtcatctgagtaggacctgagcgttggtagttcacatgaggcgcctctgagacaacaagcacagtagaggaggatgagtggtccacatgtgttgggttcggtcttcatgatgagccgttcaggtgatcctcttcatcttgtaacatggttgtggcgtcgtcgaagcgtggaagtggctggcgatgtttgataacattgatgatgttgtcaaacttagcattcagaccattcaacacgtacatcatgagtgtccgatcttgaactggagcatcaacatttgagagagagtcaggaagctttttcatctcacgacagtaatcggcgatcttcatgtcaccaatctctttcgtacggagctcattgtccaaacgaagagcacgagcatccttgttgttgcggaattgattttcaattctcagccagatctcccttgaggttgaaccaaagacgaacgaaccttggaactgctttggtgtgagagttccgtagagccagagcttcacaattccatcacgtttctgccagttaacatcagcggcgttggcaggttgaagggttccatcgatgtgaccaagaacatcaaaggagaggcagtgggtgagaaagagttctctccacgcatcgtagttactttcttcaatgtcaagaatcacaggaatgtgagatttgatgttagagacaccatagatcttttctgggttcatgatagcggccatttttgagtaaggaaaagagaatagagaagagatataagagagaagaagcaatcaaagagagatgtgctctgataccatgtaagattgtgtaagtctccttgaggagatagctttgcattagagtgaatatatacatgattcagttacaagagttcagatctttcctagattctgggtacatgaggatattaacaaagtcgtaattaaacttataacaaacatattgagaagaatattgagaagaatatcctatctcccaataccctcccgtagtcttagcatcggtctcctaattctttacgcaattaaacatctttaaagaggcttttctaactatgaaatggcccgcactatcacccggacattgttctatgaccatcgttttaagaacataacaaccagataaaagcaagaggacaaatttatccctaaggtacttcaatgatagaagagccaaattttttagagatgtgtattagaatgtctcatatcggctgggactaagatctttgaacaatatataaaggatgtggcaatccttagctctaaagttacattttgggataaattaagccacattcccaatatggtatcagagctcatggttggctcaacaaacaaaatttccaaaaaatggtttcccacctatgtggcccatacaagtggcatgtcttgttgtatttccgagatgttaggcttaaactgatttctgttggatcgtttcacacccacatctcgaggaggcttattagaatatccatattggttgaaatcaacatctttggacaatatataaagaaggtgacaatccttaactctagaactaggttttgagatcagttaatgtgggacattctaataacagaaaagaaaccaatgaaaacagatccataagaaccacattgtacagcatcaaagtcacaagcactgaagtctgaagaacgtgtacacaagctacttggaagtaccactagagcagacccaatagaacaagtatcactctcgaaacatagctcacgcacacatcgttcaatagcggttccaacacatacttcaatatctctataagcatcactcttttgactaattagttttatactcaaactttctagaaccggagcctgtgtaatggcaatgatgtgtgaataaacagctttgattttttttttttttaattttttttttttcatcaaacagctttgattcaacatctaaataatgcagcaaaagaaccttgccggtgattagcagaataattgggccaaggcccattagcagagcaaaatcaactagacgaaatgcataccaatctggccgacgtcgaataaaaaaacgtttaacgatccaacggttatgaacaaacagaaaggaaggtgtacgataaaactccgtaagaccaaccgtagaagattcgtccccaattgtcagtcggtgaaattaaagaggcatcttaaccaaagaagtctctcttacgagttttctcttcggctttccactttttcctctgttcgtgtcattcttctcgtagatctcgagagagagccttaaggtaaagagaaacttaaaaaaaatcgatcctttaagttaaagtttgtatctttcgattgttttgttccgacccttgtaaaatttgttctcaggaaattaaaaaaggttggattttgatcgatgggttcttcgtcaggacaacccgaatttgattacttgtttaaggttttattgatcggagattctggtgttggaaagagctctcttttgttgagtttcacatctaatacctttgatgatctttctccaacgattggtgagttttagattaattgatcaagctttaaagtaccgatcttagcttttgtgttttgttttttgatcttggatctgttttgtctaggtgtggattttaaggttaagtatctgacaattggagaaaagaaactcaagcttgcgatttgggatacaggtgagagatcaatactcttgttgttgttgtttggaatttatgtaaatgtcacacatcttgtggtttcaatttagatgtttaggggaatcattgaacaatatagagtttgagaatgtctcccacaatgatgtgtgataatctttttttatgttgtgtcttagtcagtcattgttgcctaagctctaatgtgactggtgaagaagaagagtcttggatttgcaatggtttagagattagtatcttgtatttgaatagtttagagattagtcttgtctttagaatattttaaaggttagtcttgtatttagaatagtttatagatgaagtaacagtattacttataattattttaagattagtcttgtatctagaataagcttaggatagactcatctatttagaatagttttgatattagaacagttgagagaatagtctcttgcgatttgtcggttgttctgtgatcactgatcagtttttgggtgtttatgatcactcagctgggcaagagagatttaggacgctaacaagttcgtattacagaggagctcagggtataattatgggtatgtctcactcttaataaacacagttatttgtcatccgtgatccctataagtgacttggaattctccaattgtgtagtatatgatgtgacacgaagagacacgttcacaaacctatcagacatatgggctaaggaaatcgacctctattcgactaatcaggattgcattaagatgcttgtcgggaataaagttgataaggtaagatcatctcgtctctccgtcctcatgttgagtgtctataatgttgcatagcaattgatctttatgtaatttccaggagagtgaaagagctgtttctaaaaaagaaggcatagactttgctcgggagtacggatgtttgtttctggagtgtagtgcaaagactcgagtcaacgttgagcaatgttttgaagagcttgttcttaaggtagtaaattttgcagctagcttctagatttttgttctgaggatatatgagtatgtcgtaatctttctttatttgcagatattggaaacgccgagtcttactgctgaaggttcgtctggcggaaagaagaacatcttcaaacaaaaccccgcacagaccaccagtacctcgtcgagctactgctgctcgtcttagacatggttttacagtttatgacaaattacactcttgctcatcatcttgttcttgattgtctctttgttttcctaaaccgcagcatcttggatgtaaatctcaaccctgatttgaaagttgtgttcactagtttcgaatctcggatttttctctgttctttgaaaatcatttatttctgaattgtagaactcagattcataaacacaataactgttgcagagtagctcaaaaagcaagaacgtaagagaaaaaaaaaaaacacctactactaaagttttgggtatatgtttctatctctttgacttctcttgcaaccacaatcatatgaggcacattttcttctggattgaatcttacacatctcaaagcaagtttaccgaaagcttccatttgcaatcttagattatcgtcactcgcggttgttcaacagtgattggtctatcagtccggtgaaggaacctcgctccagcaacttgccaacatagtcaggcaatgggacacaaccatcatccaaggtgcattgtaacttcccagtcaagagaattagcatgatgataccaaggccatagacgtcaatattcccagtgacaaaacctattttgcgataatcggcctcgatatagctggttgatccgcaaagtatgtcagttacaccttattctccttctagaattggtatgctgaggctaaaacaagacaatttacccataaggtttccattagcatagggtcttcccttgcttttcatatactcataaggtttccattttcagcgtatttgcaaacaagaaccggaagaggaaactctagacaaccacccaagagatttagaacgtttttgtgactactcatcaaagatgaaaccgcgatatcacgaaataaattgtcagggtcgtagatcttgccttgacatacctttatcagcacgcttctgttttctattatacatttgtaacacatgaatctgtctacatcgatcatgtaagtccagtcgaagttttttgtagcttgagcgagacgaaaacgtacggatgggattgtatatacctcgtgaagatgcaatgagtttcctccaacaataagctcccattttcttgaaaaggaatctcctcttctttcttcctttcctccttcttatttaccctcaacaaattcaaacaagacatctcttaaccaagataattgtggtaaattgagatcttaatttcttgcaaacaaagagacgcaagaaagaaggagatagacactaatgcaagtcaaagtccacaaagtgaaaaacaaagaaaaaaagtcaatgaagcgaaagagtaaaaaaaaaagaagggttttgggtggcatggtctacgacagtttgggcatggaaggtgggctataaagtgttgatgggctcaacaaggaagaaggaagtctggcccgtgtagcagtttggtaaatgaaagacggtgcaaaatgcaaatcttgcttttatatgttgacgatctatgagagtcagagtctcatagactttttagctcaaaagagcttgcgatcaggcttgttagaatgatatgaaagaaaagtagtcataaccagtcctgcatcaacatatattagagtcttagagcattattattggtaatattttaaattagtcttagcataattttttgaaatatatatatatatatatatatatatataattgatttaaaaaaattgtgatgttaagagtttggttaagagattaaaattttggcaatatgtaatggtgggttcttaacttggagttcttaagaaaaaaaaaattaaaataaaaacattttaattttaaaaaacttaataattattataaaatttgaaacatacataacatcaaagtttaaacaaacatgacgtaaatataaacgaaaaagattagttaaactagtgattcctgcaaaaaaaaattctatatatgctcgaccaaatcagatttcaaatattgatgcgcacatcgatcatgaagtcgagttctagtgtccaacatattttcaagattttaaagcatatatgtagaacatgtgaactccacgtgtgaacttgttgttgattccatttgtacgaattcgaatacatcaaatagattgtacacatctcgttcttcttctactatcatattattaagtattatacatgcttgcataatatttgatatttttatcttatctcaaataaaaactgaattttttacaatggcaaatcgaggttgcaaaactccaaaagaacactcgacatctatacggcaagctttttgattggatgcaaataaagttgcttttcgactttgtggaattgaaatagatcggataaattcatcaattagagtggccaaatcgatgtgtgcaaccagcgttggtggagatggatggcaggaggtcataaaatcggtgacatcgatgattggtttcgatttcaagcgaatcgattccggtgtcgcgttgtgtgaaagagagagaggaagaagaaacaaaagaaaaaagaaacactcaattataaaataccacaactcttagggttttagtttgacttttatataagagtcatatttcatataatcaataaaaatattatatttcatttctaattaaccgaagaattactctaagatactaccaataattgtgctcttagggtaaaaaaattgatttggaccttttgttatctgtgaaaatttttgagtattttactatttttttgaagtaagtagttttaacatttccctaataaatatggactcttgttatataaatcatttagaaaagatattatggtttttctaacatattttggggaaaatgtcggaaaaaaaatcccaaactttcaaatttgaggcaaaaattgtttgaactttcgaaatgttataatcctgcattttagattgagtttttgataaattggtctattgtaatcaaaattatctataaatttacacgtaaaccaaatttcactcactttactagtagtttgaaagaatactattgaaatgtaatttttgatattataatttctaaatatcattccaagttgtagcattattgtgggaaacttttaatctatgaacatcctactaattaattagatttggatagcctattggacttttaaagaaaactagtcggtatccaatcgtgcaaaatcatacatgactgctgacatggatgcttggagacgtggatgccacgtccttgatgacgtcgttgtcatatcattttcttgttaaaaaaagatttgtatcttttttttttctcaatcactattattttacggaattatgaaaaaaaaatcatttttgatgtaaggattaaaatcttatttttgaaacttataaccaatatttaaaccaaatataatatttaaaccgagtttataaatccaaaattcacaactcttcttctaatttttttgaatcaatttcaatgaagaacataaaccatacattaatcttatatattaatcttttgaacctttttcttcgcctaatcataaaatctacattctttatataatccacccaaaactatttcattgacattggcccattaatggcccaataagagtttcgatggacctagaaaaaaatcattcagactctattctcagttattttctacattcgtaataccatttttggatccaaatgtgagtcaaatttgcctctcgactccatcaatgctgagaaagtttatttccataagttactataaaattctttgagaaaatattgtatactgatgtttagatagtactagttttgtaaacaaaattaatgattttgaagttattatagataatcttgactatcgcaatacccccaaactgttgatagtctagttgactatctaagtgaaaacaaaaaatattcaaaagcttagactttatgtagcaatatattatcattgaaagttttgacgatgatgaagatgaagatgatgctaaaaataatttatacgtatatttagaaccagtttacatataaaaaataatttatacttatatatcttttcatagtttttggatatatagttcaagaagacaataccaacaaaaattgatgcaatgaaaaacatttatagacgaatatgagaaagttgcaatttttttataaataaacaataattcactatttatcttagtttctgtctttaataaatttatataatattaataactatttatatctttagttagtgagatcaaaaccattaatttagccattttttaatgcatttttccgagtttcaccaactgaaaagatttatttgttatcctttatttcatataaattaaattttaaagtaaagacaaactatattatttggttttgtcgtttataaatatttattttctggttttggtgattaagttctcttcttaaaaagtattttttttttggtgaatttaacatcaacaccgatcggatttgtctacctttgcaatgcatcttgcgtaattattcaatcttagatggacattaattagtttgatattttgatgataaccacaacaatcttaataaaaaggttttaacaaaatttctcaatatttcgtgggtttaacattaataccattaaatcggccaaatttacgacacatcttggcgtgttcctccatcttaaatgatttttttatttcacgcaggaattcaatatttaaattttgaaattataaatcgtaaaattcctatctattctccaatccaaaatttcaaaaaatttatagtatatcaaaattatctaaatgttttacatataaataaacttgaaccaaaattttactcgttcaatcagcaattttaaaaaatactttagatatgtatttttgatattttaatttctaaatataattcctagtcgtattgttattgtctgattatttttatttaaattgaacatcctactaattagatgttgatagcctagtggactatccaagtgaaaataagaaatattcaaaagcttagagtttataaaaattgtattagtttgatgatgaagttgaatatgatatggcgaaaagaaaaaaaaattgaagatgacactatagtaaatttggaaacagtttacacatacaaatttattcacatttataacttttcataatttttagatatagttgaagaaaaccacaccaaacacatttgatgcaatgaaaacatttagtgatgaatgaatatgagaaagttgcaatttttttttataaataaacaactttttcactaaattctcttagtttatttctataataagtttatataataactaatttatgaatttaattgaatcataaattacatttcttttttatttagagttttttagtctcactgaattatattaaatttcatactattataacttgagaataaaataaattattatttgatattattaataaatttgtaaaagttcaacgtagtagatttgattaatcttgttattatttaaatacttaaaattggaccaccatctaattagcatcagtttaacatttttcattcaaagatttatagtataataaatataacaaaacaatataaaatttcatcaatataattgcaaaaaatcaaactaaatccctgaaaaaaaaagaatatatgcctagacagaaaaaaagaaagaaagaaataaagtaatgaagaaaactagaaatgttgcttcttctcctattgaatgtgtccacctccagaccaaacccaccaccactcttgttcggtctttcttcttcttcctcttcaactctcaaacaatctcttcctttatcatcttctatctcttcctctgttccttcttctggttttgccaatcaccaaacctgactaacccttctcctcctcctctctccgtcgctccccttcgcggggatgccaattctccaccgccggaatcttcttcttctccggcgacgaaatcttctttaatgatttcttctagagatcccaatgccctctttagcggcggtggaatcaggtttctaaaaaattgaatctttctatcgatttttctcaaattttaggatcttaatttttttgtttctatccggttttgttgtagctttttagcaggagttagaactgtgaagtttagttatggttattctagtcttaaaggtaaaagagcaacaatggaggattacttcgaaactagaatctctgatgttaatggacaaatggttgctttctttggtgtctttgatggtaacttgtttctctaacaacacattattactctttaaccaaagtgttgtcatttgacttgtttttgtttggtttgttaggtcatggtggagcaagaactgcagaatatcttaaaaacaatcttttcaagaatttagttagtcatgatgattttatctcagacactaagaaagctattggtaataatgagacaaagtttgagtgttctagtagctttttccatggaatttgtgtttttgagactttgaattttgattctgcagttgaagtttttaagcagacagatgaagagtatcttattgaagaggcaggacaaccgaagaatgctggctcgactgctgcgactgcttttcttataggtgataagttgattgttgctaacgttggtgattctagagttgtagcgtcaagaaatggttcaggtttgattattgttctttctagatttatttaactggtgtttaaggttttggatatgtgacggctctttgtttgttctgtagctgttccactctctgatgatcataaacctgatagatcagatgagcgacaacggattgaagatgctggtggctttattatttgggctggtaaagtttctacattctctcttcttatgtttgctttagagtgtatgtgcaatgtgttttgggttgtttagttattagttattacttggaatacaccaggaacatggcgagttggtggaattc

SEQ ID NO: 1002 - DNA, 137336 bp, Arabidopsis thaliana
gaattctgatgtctgaattgatgaaaactcggttattcctgtgcagagtttcaaacggtacattacatacaaaaaggacttcaactcattgctgctcgttcttctcaaagagctcgtaaagaacgccttgaagtttgaagaaatcatttcaggatcgaactcaggactacctacaatcgaggttaagatagaggaactgcagacaaaggtaagttatcatatggttaggctaaatttagaagtatgattcttaatacctttttaacaactcttatgtcttacatttgcaggccaaggaatacgacattgcagatctacgacccttcttttcaagcacagatttttccaaagctcacttcgagttggatcatggccgaggaatgatcaagtgtccaaaaaggctgatcacttggtaaaacaagaagacgagcttcaagttactatcaacttaggtttatttatcattgcatgaaaaaaatgttggatatttaggaagatagtttcgttttgtgttaagattattaaagagctgctcaaagatttgctgttaggattatgcaatactcatcttaagatattaacgaagcattcctcttcctcaatactttgaccgttgaatctgagtaaaactcaggtggcgatttttcaatcggtatgtgagaaagaatttcggatgctagcttttgataccgcaagttgttaccaatcaaagtggcagtgtgaaaaacaatggaaaaatgtcattaaaatccttctcttatgttgacttttcaaaaaataaccaacttttgttgacatgaccatattgagcattctgttatgtagattaatagattccgataaatgagagtaattttttgttaacagtgacacctgttaattcaaaacgttatcattttcaacaacagaacgacgtcgttttgttgtaatgactgaactaaaatcccaaatttaatatacgattcctaaatcgagcaaaatccctaatcctaaatccccatacgatttgaaatccttatcccaaagttaatatacgattcctaaatcgaacaaaattcctaatcctaaatctccatacgatttgaaactaaggatttcattgagccgttatgacaaacgatgacgttttattgttagagggaacgttgtcattttcaaataacgagtctattaacacacaataaatttatgataacatggtctaacctacttaatgttatgcctgatatgaccaggtcaacgaaaatttggtatttatttaaaaaatcaacaaaaattgaatatttatttggaaaataatcctaagtttgatatttatttcgtttcgagaattgaagatttaaatcaacgttttcaataggtcgaagattttagtgacatttttctcgaaaaacaatgtaatacttgttgatctggctttatcatcaccattgtactaagtattctaacatttgaaagttaatgaaaaatatttggatacataagaactacatgccgtttttactttgacaatgtgaactccttgctgtttaaaataccaaggcacatttgtcgactgattcgtgtgttcgtcgagatttttttttgtttattgcaattcggagaagtttgggtcgttaaagttcgagtagggttcataaatatagtgaaaaccaccgtttggtgatacttcgtcgtcctcgacactctcagattcatcatcgaacctggtatgagctctctttcgtctttggtgctctactagttagggtttcgccattactatctccatcctctgttcccagagttagaatttttcttctgaaaacgcgaattaagctcgacgttgaaatgttttgctcttcagattaagacgcgaatttgagaggaagctttattttgtgtgtagatggcgaataatcctccgcagtcttctggtacccaggtttgctctctcttttagtcgtttcatgcttctatggaattcgaagtcactcagaagtcactcaattgatatgttctaagtaatttgatttagccaaatatagttgatcaatttcaagcgtgttagggttctttgatcttagtctctttcattgtttaatagcttggagcattcactcaattgatatgttgtcgcgcctaagtgtcagaatcaaacattcaatagctgttatttggtgaaagttttgttttagtgtaatagttagtgtgtgaactattggatgtgcttatgagacccttttccagcagtttcggccgatggtacctggacagcagggtcagcattttgttcctgcagcttcacaaccttttcacccttatggacatgtacctccaaatgttcaaagtcagcctccacagtattctcagccgatacagcagcagcagctctttccagtgagaccaggtcagcctgtgcatattacatcatcctcacaggctgtatcagttccgtatattcaaacgaacaagattctcacttctggatctactcaaccacagccaaatgcacctccaatgacgggctttgctacatctggacctccattttcttctccatatactgtgagcttctgcttttttcttgtatttgttattcggataactttttatatatgattcgttttcactttgctggattcttgttcctgcagtttgtaccatcatcttatcctcagcaacaaccaacatccttggtccaaccaaattctcagatgcatgtagctggcgtccctccagcagcaaacacttggcctgttcctgttaatcaaagcacatcacttgtttcccctgtgcagcagactgggcaacaaacaccggtcgcagtttccacagacccagtaagtgactacgtttactgatcacaaatatgttttggtgacttgtattgatgcctatacctactattaatcatgaaaccatctcttactaaaatgcgaatcatatcatgttgagttgtattaatatataaattgtgacaaccaacatatgtcttctgccatttgtagcatttcaatctttttcgctgtattattttgggatagtgtttttatctgaatcgagtgttcctcagctttctccgaattctttagacttagtaatttcatgtacttcctctggatcgttacttaggtcaaactctgattaggtttgaaaacgtaaggttttgatctagagaatcgtcaaactctttgaagcctcaagaagcccctagcacaaattatttcagaaccttgtcctatttatactcaattactaacttgctgatgtggcatagttgatgaactcttatcgaactcatttgtctagtctttatgtatgcaattgtagctaaatgtgcttgttggattttggtaacagggaaacttgactccgcaatctgcatctgactggcaggagcatacatctgctgatgggagaaagtatgctactaaactattatttcagatttaggccaaatatcttcctacatgtcactctttgtactgtagatttgtgttcatgcagttccaatttgaaattgattacttttagttggaaattgtttgtaagcttcttactttttgtacctttcataaggtcttccatgcttcctttttttttttttttttttccatgcagatgtctgtttcatggttttgggtctatgaattcgctttatctgatatatacttatctttctaggtattattataacaagcggacaaagcaatcaaattgggaaaaacctcttgaactgatgacaccacttgaggtaatacttacaaagtagtctgtcttctaagatgattttcattttactggttgattaagcttaccaggcttttagttggtgtgccacttcactagtgatgtaaatggttgcagctttgtctggaacaacgttgtttaatttgtatatttttttcactgattcggaaactccataactgtggagatatttattaagactgctacgtgctcatctgaaagcagctttcactttattgaaacaggctaccgatgcttttctgtttctcatttttttttttttgtgtaaatcggtgtcaactttgtaggcagtttggggataatttgctaattttttatgctcgttggattaagaatctcctgataatccttatttcgtttttatattaagatcaaatctaccgtatctatgcatgattttacagtttctaaaatctctttctgcagagggctgatgcatccactgtatggaaggaatttacaacacctgaaggaaagaagtatgcatctttaaatttcatttagtctttgtatcatgcttattctctattgttgcaactgattagttgttttaatttacgcagatattattataacaaggttacaaaggagtctaagtggacaattccggaagatttaaaggtctacctatttatctctctctcatgcacattccccaatgcaaagcctatgttaaacctgggtagttgttgtatgcagttagctcgggaacaagcccaactagctagtgaaaaaacgtccctttcggaagctggatctacccctctatcccaccatgctgcatcctcgtctgatctagcagttagcactgtgacttctgttgttcccagcacatcttcagcacttactggacattcttcaagccctattcaagcgggtttggctgtacctgtcacccgtcctccctctgttgctcctgttactccaacatctggtgcaattagtgacactgaggctactacaatgtactatttttccttgggaagttttgtttgatgtttatacactctgtcaagcctttgaatttaactgttgtgcctatcataacagaaaaggcgataatttatcatctcggggggcagatgattcaaatgatggagctacagcacaaaacaatgaggcatgattttaattttcctttctacaattacttgcctagattctaaaagtctattcttttgtattccgtttacctgctttctacttcagcttcatgaggtcaataataacttgtacaagttattggaagacttatgctcaataattactatacatgtgatgatgtggtggtgtcgttaatatttatggtctagcgttacaccttggtatgctttctaattattttgaattttttgttaggctgagaataaggaaatgtctgtgaatggaaaagccaatttgtcacctgctggtgacaaagcaaatgtcgaggaacctatggtatatgctactaagcaggtactttcttatcctaattttctcctcctgatatctctcatatctgtaccataatgttttatttgccattcatcaacttttgcactgttattttttctaggaggccaaagctgctttcaagtctcttttggaatctgtaaatgttcattccgactggacatgggaacaggtaatctggacgcatacgcaagtatttgtgtcactgatccatatggcctgcattctctccctaaccttctatttggttcattgctgacctgatccatccccttatagacattgaaagagattgttcacgataaaagatatggtgctttgaggacactcggcgagcggaaacaagcgtttaacgaggtatatagtttcttagttcctagctataatatgcaaatgcattttaagagcctgtctatataatgtaatgcagacttccagtctttatttgtgatgtaattatttattcgctggtagatttctactttaagtagctttatgcttacatctgattgtcaaataaattttttcagtatcttggccaaaggaaaaaagtggaagctgaggaaagacgaaggaggcagaagaaagctcgggaagaatttgtcaagatgctagaggtatgtactaaaggagtcagaagttagtgtttggtttgattagtgtgactgattagctgattatgttatactaatattgacctcaggagtgtgaagaactttcatcatccctgaaatggaggtgtggctttcagttaattacaagatctttggttcttgtctttattttatatgtgacatatgtgctaatggaaactattccctcaccagcaaagcaatgagtttgttcgaaaatgatcagcgttttaaagctgttgaccgtcctagggatcgtgaagatctttttgacaattacattgtggaacttgagaggaaggtaaccatcagactttttcggggggctttcgttttcatttgttgatttggctttttgattgtttggtgtgatactttgctctgctaagcaaaacaatgcatgcctatgaacatgaaggcgttggacaaagttttttttttttttttggttattacagtccaaatagttttcgacctcagtatgatcacaagagacatgtcatatttacgacgaagcaattatttgggtgggcatttagattgtggctgagataagatctggtgaaccagcatggtggctttaagcttctatagagaatatcgtttgttgctttgtagaagaggcaaattcattgtgtttgaattgacattatgaatcttttaatctgcaggaaagagaaaaggcagcggaggaacatcggcagtatatggcagactatcggaagtttcttgaaacctgtgactatatcaaagtatatcattgtttgtgaagcttattcctgcgaacctttctgtttcatagaccttgacataatgccttttataatatgtgtttgaaggctggtacacaatggcgcaaaattcaagatagactggaggatgatgacagatgctcatgtcttgaaaagatagatcgtctgattggttttgaggtaagtaacttcatcaagtagttcaggctgccacatagaatttgtttataatgtttgttattgcaggaatacattcttgacctagagaaggaagaagaagagctgaagagagtagagaaagtaaggtcaatgttcagggttgtaacctcattttttgttcttatgtagtccaatgctcatggtttcattttcttgtggagctaggaacatgtaaggcgggccgagagaaaaaaccgtgatgcatttcgtacactattggaagaacatgttgctgcaggcatccttacagccaagacgtactggttggattattgcattgaggtgtctgaccaatttagatctttactggacaaattgaattttatgttggattcttttcctcacttattttacgtacagttaaaagacttgccccaataccaagctgttgcatctaatacatctggttcaactccgaaagacttgtttgaagatgtcacagaagaattagagaagcaggtaatttggactacatatatatagtgtaattctctattggtagagtattccacctatgcgtgaatctgctagttatgataatcgaacctttttgtgttttgattgacagtatcatgaggataagagctatgtgaaggatgctatgaagtcaagaaaggcaagtcaaggatagcttcaatttctacttactaattttaccaattttttttatctaatccctttctctacagatttccatggtctcctcgtggctgtttgaagattttaaatctgctatttcagaagatctcagtactcaacagatatcagacataaatttaaaggtaaatagaacatgtgtcagtacataaattaatcaacagaaacggctatgtgtacattggaagatatattaggtgtgaagaagttcttgtaaagttcagttatatagggctctgattcatttatttttccgttgtttatcagcttatatatgatgacttggttgggagagtgaaggaaaaagaagaaaaagaggccagaaagcttcagcgtctggctgaagaatttaccaatctgttgcacactttcaaggtatatctatcttaccaggggtgactttctttttgtctggattcactgggacgttaaagataattttttgttttggttaaggaaatcaccgtagcttcaaattgggaagatagcaaacaactagtagaagaaagtcaagagtacaggtaaataatttattgccttgaataggttgcttcatggcttaccttacgtaaaaaaaggttgtggtattaccttcttaaggtcccattttgaatatctttagatcgattggagatgaaagtgttagccaagggttatttgaggaatacataacgagtttacaagaaaaggcaaaggagaaggagcgtaagcgtgacgaggaaaaggtactgattcttcatgccatgaaatttatttgtcttttatgcaagaacggatctcttagacttttattgttgtggacttttcaggttagaaaagagaaggaaagggacgagaaagagaaacggaaagacaaggataaggagagaagggaaaaggaaagagaacgtgaaaaagagaagggaaaagagaggagtaaacgggaagaatcagatggtgagactgctatggatgtgagcgaaggtcataaagacgagaaaagaaagggaaaagatcgtgacagaaaacatcgaagacggcatcacaacaattctgatgaagatgttagttctgatagggatgacagagatgagtcgaagaaatcatcccgtaaacatggtaatgatcgcaaaaaatcaagaaaggtaggtacaccctagacttgagttctgaaattcgttaaagatttaaaataaagagggatggttttttcttggtagcacgcaaactcgcctgaatcggagagtgaaaaccggcataaaagacagaaaaaagagagtagtcgccgaagtggtaatgacgagctagaggatggagaagttggggagtgatagtgaaattcgacattaatctgaaacctttctacatcccaattactttcttgattcatatttttacactgtaatgatatttttgttttcatttcatttctctgttaattggatatatactgaaaatctttgattcttactgtcaatggagaaaaaccacccaaaaaagagtactggagtttacttcctctgtttattgtttgacttgagacaaatcatctctcatcattgctttcctcctccactggccactgcaactatatcgatattacacttggtcctggaacttctcaacacacatatttatatgatctgttagcggttgtgacttgtgacaaagtacatttacatttttgttgtgcatacttaaatctcaacctccaaccgaccgaatattcatggatgctccttcaccatcgtcttatcaatgaagtaagcaactgcaacaacatacatgaattcacacatcattcattagcatcacctttgaacaaacacggtaaatactgaaacagatgtaagcaaatgttccaactttcttcttggacttaggagaatgcattcacatacctcaaatagctcgaatgcactacccttccgatacgtatcatctttcttcttggactctgtaggaagcacactgaataacaatgctctccatcctataagtaaaacagcagtacttcccattgtcaccaacacaaagctatatgccggaatgtgacctgatgaagctgacctaatgataattccaagctgtaacgaaaggaacaagctttaaacagtttagtagagataccaacaccctaaacctacaatgtcaaaaagattggtaaatgtcgccttaccggagttccgacaatccaagatttcgcagctgcaaccacagctttagactttcccttcattcctcgtccttcctccgcataaccccccaagaaataagcactcagaaaccatcctgccacataaagtttccatttttacttgaaacaaagcttctcaaacgcaagatagataacagagtaacgaaaacgaatcaatacccgcaatgaaagggtcagctgtgtggagagtatcaagagaaaaaacagggaaaccatggctaaatctcccaatggcagagaagataagcagagctaaaacatcaccacccgcaagtaaagccacacgactgaaagaaacaacacaaaacatttgagataacaatacaaaagcaatccttcctctagagagactaaaacaaagtaaagttagagtttttaattacccccatttggtaatgttagaagatgaagtagatgacggtttatcgaattgaatcacgccctcgagaggaacattatcttgacccacgaaaactgtttcatctcctgaagaagggatttgagaagctgaggttgagggttttgagttgacgcttccgtcggggttagagagagcgaggacgacgcggggacgactccggtgagtgtttggtgcagggaggagccatgaatcgggagaagagaaaggagaaggtttggatttggtgatgaatctgacggcggagacaggtccggtgggagtgcgaagaactaacattctcattgtatcttgtcaagccaatcgtccgccacactctcatattcatatcatcaattttcttatcagtataacgaatttaatttttttatgtaaaaaaaaataaaaattatgacagtgtaataaaaaagtgttttgctttgtggtgactataaatataaataatactcctttcgttttatattataaattgttttgaattaattattttattttacaatataaatttgtttctaaatttttatgcaaactatatattattttaatatattctaaatatttatatcatataattttttttatgattggttgattttttaaaagtaaatttttttatctgtgtgttttttaactaaaacaatttaaattatgaaacagaaaaataaaattttatttcttcgaaaagatcggaatagtgttcttgtgactgaagtaataaattatatgttacaatttgatcgatcatatacacaaaaaataaattaatatgcatactatggagtctacacaaattataatttatcctcaatattcacgttggcgcatcaaattgttgacattttccaaaaagatatttagtatttaccaatttagagattcaattttgaacaatcgttccattgattatttttttcttttttcaaagatagttctaaaaaaagttttattttattttattttattttttgttcagattttcaacgttaatggtggggcaaacggttatatcggttggtgacggtcttgtttctctgacgataatgaggtgcggttgttccgccttctaatgcgagttgtggtgaacttcccgacgactttacgcatccttctagtcgtaccactgatttaaagacaccaaaagagggactaaagaaagttgtcagctcacttgtcggaagggctgttgcaactggcggcggaagtcaaagacgggttggtggggttcactacgagtcgagacgattagcgccagatttgtcggatctgaggtggctaggtgtgcagaggcggttaggattttatttgagtcaaccgctctaatcattgttttcgtgtgaccggatttgaggttgtggcggtcatagaggaaacttgtgctggtttcggcgatggaggtgagagttcgatttaggttttcggttacttgggtggggactggttaagcgggtctattgtttattgtgagaattttcaggtcggctctgatgttggcttcgggttagtggcgagaatcgataactttggtcatgtcgctcgagtcgtgtaggagcagcaacgaaggcctattgctatcgccggagttggaggtggagccggtgttgcagaattaacagactttttcagatttttgtgcttgtgttgactaaattttcctttctctttttataccgattagcctgtataaacctaatattgtaatgcccattgagaaaaattaattttttaaaaaagatatttacaaatcatattcctatttttttcttattcattggtggctggctcggttaaaaactcattttcacaagaccgatgcctttcctttttttatataacactcatcactattgtgcagcttaaaagaagattggctcattgtcgctttccattgaagagatcgagtcctcaggttataggccatgttcgtttgtacacctggataatgcatccagatgatccacctaaatgatgcatttgagtgttctttgtttcctaatccggtagtccatctagatgaagcatctaaatgaatctttgttcgtttgattagtttattacaatttgtatctgtatctaaatgcatgttgtattaaaatgactaaaaatgacatatcttcatttaaatcatactttttagtttcggaaagaaaatattatagttttgatgaaaaaatgcaattttataactttggaagaaaatgtcattctcaaattttttggttttggcgggaaaacgcaattatgcaactttttcgttaaaatagtgattttatatgattttacgtttttggcgagaacacgtaagtccaccattttcccgcagaatcatgattttatagttttggagggaaaatatgattatacggttttggcgggaaaatgtaattccgcaaatttctcgctaatttgcgattttattgttttggcgaaaaatatgatttttacgcttttggcgggaaaacaaaattctgtaattttcccgctaaaccatgattttatagttctggcgggaaaatatgattttacggttttggcgggaaaacaaaaattttcaattttcccgctaaacagtgattttatagttttggcggaaaaatatgatttcacggttttggcggaaaaaacgcaattccgcaatttcccgctaaaccgtgattttatagttttggcgagaaaatatgattttatggttttggcgggaaaacgcaattatgtaaatttcccgctaattcgtgattttatagttttggcgagaaaatatgattttacattttaaggcggaaaaacgaaattccgtaattttcccactaaattatgattttatagtttgacgggaaaatataattttatggttttggcggaaaaacgtaattccgtaatttttccgccaaaattataattgtcggttttgtttaaatttggtatttgtgattttacaatttttagaggttttaaaatataaaatgaaaaaactagaaaataattaacattatttgatttatgatgtaattttttagtttaataagggtattttagtaatttacaattttttactatgcatcatctaaaatcatctgaatgcatcttataaaatagacattttttggatgagtctgagaaacgcatctggatactccacccaacttatatgcaaaattgtactgaaacgaacatcaatttgcatctacggctagttgcatcagtgagatgagcaaacgaacatgaccatatatgaaagttgtcttttctttaacaaactaaaaaccagcttgtaaggaaagaaaagaatgtaaaataaagaaggttgctcagattcttgctgaaaaggttgaaaaatatcaaaacagataagaatgaaacagattatcagaattagtgaatcagtttgaacgttaaggggtttgcaaagtgtgtagaggagaagagtacagtcaattgggtaaaccacatgaccatgaaagaatctttgacggacatgttgagcatgcctactaacttatatcctctattgaattttgtttgtaaatgaaatacctatttttatttaagaaatagatttaaatgtctcaaaagcaatctaaaacgttaataagtatattttgttaaaatacaaatctatatatacatttttgcaagacttttttgaagataatgttgaagatttgagtcataattcaagaattatttcaaataggtgggtataacccggtttaactctgttcggatcctggataacatgtttaattctgttttgatcttggataaaattaatttttgaaaaagttacctaaaaaataataattaaaaacgaaattaatgatttaattaccaaatctaatataaatagtatctctaaactaaccatatttgttatttaccttaactaatttcttataataattctacctaatttaaacctaaatatataattcttctttcacttttatttgatcttatactttatttattttgaatttatatagttaataaaatattatattttattctgtatatgatgtaatttaaatgtttttaaacggacatatattattcaatcgatgaagaaataatatgtgtacaatttcccacattgcttagaaaaattggacaatggttcagagccatattataaaaatgacaaaaatgattttgattacaaatgagcaggaagcttgatttttcaggcgtctaaaattaaaatggttatccggtttacttgggttctttattttaaagaattgaaactttaaaatgtttcaaaaaattataaatattttaactttatcaaaagttaattattataattttaaaaactttttataaagtttatctttaaaaaatgttttaaatatttataattttaaaatttataaagttttaaaaattataattgaattttataagaaatttaaactttataaatatatgtaaaatatattaatacgggacgatatattacaggagaaatactcaatataacaatattatatttttttgaagtttcaaattttataatattgaaatttataaaaaaatgataaaattatgtttaatttcacgggactaggttatatggtaggacaagtttgggtggataataacatagaatggtatattacgattgtacaatgtcccacatcgcttaaaaattggacaatggttcagagccatactataaaaaggaccaaaatgatttcgattacgaatgagcatgaaaattgatttatgaggtgtccaaaattaaaatggtttgtttactagggttctttattttaaagaattgaaactttaaaaagtttcaaaaaaattataaattaaattttacaagaaatttaaacaaaataaaagatattaatacgggacgatatactacaagagaaatcttagatatattgcgagagaaatcctagatataacaatcaaaattcaatgatgaagtttgggtcaatattaatcttttttgaagtttctaattttataaatatttgaaatttataataaaatgacaaatttgtgtttaatttcacgggacggggttatatggtgtgacaggtttgaatggataataacatgggatgatatgttacagaaaaaaccctataattaacaatcataatataattatacaatcttaaacactaaacaaaattaacaatattaaaaaaaaaacacttaaaactttattttttttaaaacacatttcgattattttataagaaatttaaacattataaatatttaaactttatactacggatgaaattttagaattgactggtttgggttgataataatttgcgatagaattaggagttaaatcctagaatgacaatcaaaatataattatacaattaaatactacctcagatgaaatcctagaattgacgggtttgaatcgatattaatatgggatggtgtactacgagtgaaattttagaattgactggtttggattgataataatttgcgatagaactaggagtgaaatcctagaataacaattaaaatataattatacaattaaatactaccacgggtgaaattctataattgacggacttgattcgatatcaatatgggatggtgtactacgggtaaaatccgagaaacaacaatcaaaatacaattatacaatattaaacatttaacaaaataaacaaatacaacttaaaactttaaaatttgaattataaaattttgtctcgcgatgaattatacatttaaatcaaacaatagcataaatttattaaatcatcctacaaagtattctattattttttatttaataaaaatataggcacgcggtataccacaaattaatatctagtattatattaaaaaaatagaactctactattttttttgtaatctagttaaccccggttaaaacatttatggatctaccattaccattgcaaatcatatatataaacttgagctatagactttataatctaatattctaacttggtcacttttaattttaagtgtatagttgagaatacgtagtttgggaagataacaaattctaacttggtcacattttaaaaccaaaacgaaactaatcatctaaaatggttcatgagatcacagtggttgttacatcatggttaagctttaaccaaaaaacaattcaagccttcacactaaaccaaaatgttaaaattccggtttagctcaaacttgttgcacatgacaattatgacgtgtacacagctggaatttcaatttcaatttttcgaaacgggtcttggaatcttgatttttcaaattttgaattttcctatataacggaaaatttggagttagaccgtttgaagaagaagaaaaacctctacaaatctctctctgatatctctctttttttaagaaaaccctaaattttcattttcgcaaaatgtctagagatctttttttttccggtgatcttgcttgagtcaccgacgattatgatccagaaacaacgatctctcaattcggttaggattatcgattcgaaggtcagttatcaacctctcgaatttagggtttcgcagaggcaattccgatgattatgaatcctcaattgatctgtttctctgttaattgttcgattactgttactacatctctcgttctttgtgtatgttacctaatttgttccatcggtgcgttaatcttttggcgtttgatttgctcgatcgattttgttattttctcgtcaataccatctacgatagttttgtgatttgttgatttggttttgtaaacgatcgcgagattaggatatctgttttaggttttgaattttgtgaatggtaatcaaagatcaagtggtgttgttatgatttgtatttggtatagattttgttctgcattactgtgtttccggtatggttcttggtctgattcttttggtttacttttctttttttttagatggtgttgagttttctttgcctgagaagaagaagaagaagaagatggttcatcatagttaaccaaggaagcggctctaaccttaggtatgttaataaacacaaaatgtctttggttttttccaaatatttgatctcttcaatctttttctcttgcttgatcttttgatattgttctttaaatatgatgttaagtcacgtttcttctgcaggtgcaatttccagagcctataatgtggcgtttcttagaactcagaaaatagagaattctggattcgcaatcaattgaagaatgtgtgtacttacatgcacttattcgtatacacatacatgcctgcattcatacatacatacacgtttgcattcatgcatccatgcacgtttgcattcatgcatccatacatgtttgcattcatgcatccatacatgtttgcatccatgcattcatacatacatgcatacattgattagttgcctacttgcttcccttgcaccctcttttgcttctttgattatttgtcttatactctgtttacttacttcttgcttgtttgcttcttttttttcttcttcattccttgcttactaatcagcttccttctttggttacttgtgcgctaactcgattccttattttcttctttgattctgtctttacgtacttgttacatgcatacatctatgcatcatatttgcttgtacgtacacattcataatttcttctatgtttctttgattagttattactcacttgcttccttgattgctttcttcttttattttttcttccttgctttattaccagcttcttggtttgtttgtttcctttcttgcttccttgactcttttgcttacttgcttgcctttgtattttcttccttaattcctttgttaataggcttccttgtttcattgcttacatgcttgatttcttacgtactgtctttttttttcttacttaattctttggttaacttgcttccttgtttctttactgtctttcttccttaactactgaacttgttttaaaatttcttactttctatccttatcgcttgccattttctgactaattgtctcagtttattttccactaaaatgtgtactttgctttagatagtactaggttactatttgaaattctacagatggagactcttaaagggtccatcaaggcaaagtcctcgtcatcattagtgggaaacacaaggatcaagttctacgattattcttttctatttaactttctctcttcgtttcaaattttagtatttgttagttttaattgttcagggtttgagagcttggtgtttacttgcaacctgcttcttggattctctgacacaaggttttaatgttgaataccgtgggaatcagataatgtataactattttaacttatcttgaatcaatatacaattatatgaatcgaaataagctagagaaaggtttatatgtttgtggtataagcagtggcataagttgctggaaaacttgcatcatagagtaaaacaagaagatcaaccagccacgaactcccacttgtaagttaccatttacaaatctatggataatttctattggatatgacaatttgccttttgttatgtttgtcttgctggtcttgtatacatttgcactggtggaacacgttttattcgtatccgttttggattttgttagcttaaagcaccacaatccatagctaagaaaacgtgagagatcaagttctagagaaaaaaacaaaagctggagcaagattcagatttgtggaagtaaagcttttcatggtaattcaacaaaaccattttcaggtcttggtttctattgttttgaacttatatagtatgttttacaagtttttgttgtcttctcaaatcagacgcaaataatgtcgcggcgtgcctctcaagtttttggtctatcgcaatggagctttaaaactgttgtgcgtcatctttttgtttcccaagtatgtttcttcaattcttcttttatgcttagtctttcgagttactttctcttttcttcttcttttattcaagtagaagattatatagtctatgtgagtctcaaaaacaaaaaatgttctatatggagatcggtcatttatgagaactgatcaaacacccattggttggtttgttccacttttcacattgttttactttaatgcagccatttgagtccaaagtcaagatctacttagagcagtaaattacaaattttcacatgaagtaattgtttatttgttttattgaaattgcaaaagtgagaatttacttgaagttttgtggttttcttgaattggggaattttatttatttgcaggttttctttcatccttgcacggtgaagaacaaagactctaagagaacattatttatgaaacgagttatgcttctctgcttccctttccaggtttcactttgatttttatcagatatttgtctttgtgctaatatatggtgatgaaattctgctgtttcatatggatttcgttaatgtgttcatgtgattaatacaacaacgaatatcatgatttggtaaaggaaacatgaatgcatcaaggtaaattaatgttttgtaaatttagtgttcttgttccctatatctaatctggtaagccaatgtgatagtcgttatcagagaatgacataatttaatgtgttccttaatcgtgttccttgtttgggaattagtacaacattaagctacagagaatgacataatttagtaagagaaacataaatgcatcgaggtattttaatttaatgctctttttcttattctaatccggtcattcatatttaggttactgaatcataagaggcacaaagacttccttacttaggctcgttagaaaaagctacttactgtatatatgtaagtgacataatctttaaaaaatatgtagaggaagaaggatgctatctccaaagattatgtcacttacatatatacagtaagtaactttgcatccagaacgttatattaacaactttgtcacaacttctttataacaattgcgattttcagggtgtggagaaagatcaattctattatttgcagctatggcttccatggttgagaaaccaggatgccattgatgcaactatgtttgggatgcttggtataacccttttcggttcgaccattttcactaagtgtccaagaaacaacttcttatgtttgattgggatttgcgcaggctcgagctagaatcatgttcacttccttccattcaaccatgtggataagagaactgctttgacttacatcaacgacagtagtaaactttctcctgattaggtgatgaatcttcaaccttaccagcaaatgtctttttttatccttcctctttatactaatttgattttcccagcaatgaccttagaaagaaggtgctctcgattattgacatgtgtggtcttaggttgttggctgttgctttctaggtacttgtttgacattgatactcatagtttcagtcttcttttgttattcttttctgcgtggaaacaaatgttcaattgtatgtgttcttatttccctttttaggtggtactagataattcgaaggaaagccctggtgcatggtgcaacaacatatggtaatttgttagcttgttgccactttttgatccttacgacatgacaatactgaaatcattcgaaggttttcaaatctcggtgttaatatcaagatgatcactggtaaatgtgctcacccattgatctggttgtaatagcaatacatatttaccattttccactaacattcttttggatgacgtaggcaaggtgaccaacttgctattggtaaggagtcgcagacttggaatgggaataaacatgtatccctttttcggcttttcaaggagtacgcgcaagcggtaggaaccaacaaaccccatggacgaatatgtctctcaaaggtagcatgttatgaatatgttttagaactctttgtgagaaccaaacagagtttttgccacatgttgtagatttggcacataagagacgtagagaacatacttgttggagcatcaaatgattcctccaaagaaaatgatcatattgggaagttagtgtctcgcggctgaataggtaagcatgctcggagcaatacgactagcggcaaagtccaactgccattaggaacaacctgagagatactagccagtcgagagataccaaacactcgagggccaattgagctagtgatatcaaaaagaggactagctcttctaatcatcaagtagagctagtaacaaggtgataaaggagatagagtcttgttaacggccgaagcttgatcagcctcttccacatccagcttccagaactctgaaaatctacatcgacctctttgatagcgtgatagtcatgtgtgcatgcatatattcatatgtgcttacattcatacattcatacatccatacattcatacattcatatgaacatacatccatacattcataaattcatgcatgcatacattcataaattcatgcatgcatacattcatatatacattcatacatccatacatttatatatacatgcatgtatacaatacaatcatgtgtgaatctatgcctacattcatgtatatttgctttcttgattcattgattgcttctttacttacattgtttacttgctttcttctttgcttcttttaattatttgatttcttaactagcttgcttgtttttttttctctgtttacttcttgtttgttactttgattatttgatcgtagttcactccttactgcttcatttcatttcttaatttgtgtgtttgcttccttcttactcccttcattgtttgctcagaccatacatgcaattaacttgtttacttattattgccagtttctttatttcttttattatttggcattcgcttactcaactgattcattcatttgcttggctcttttacatgtttccttctttggtttgtttcttttcttctgtcgttgttttcttacatgcttacttggcttcttttatttttttgtttactcacctcattgttaatttatttatttgcttctatttagttctatgcttctttcattgtgtgtataaaagattaattttgaatatatataaaatttacgataagataattttgacaatatgtaaaatcgaaacactaataaatatttgaataaccaaaccgaacccgaaatatattataattatattgacttgatgtagcccaaaattatttttataaatccaaaaatatcaagtactataaatagatcaaaattactaaaataccaaaaataaccaaaaatcgaaaaattaaacaaaattttatcaaaatctaaccaattttttcattatttcggtacccgaatcgaagtagccaaaaccaaacgtggcacgcctatgccaccaggcctaaactataaaacccaaaaaactagaatcgaacctgaactagtacccgaacgcctgaactagtactcgaacgcctaggcctaacaatgtatacgtaaaaatataaaactttatcacatttcccgattttcattaattgtataataattcattatataggggtgtaacactttagctagagatattccaaaaataagtcactcgggattagaagtgggcgtttggatacccattcgttagggtatttctaaattttgggtttggatcggggtcaagtccgatattttgggttcggaaactggttacccgaagttctcaaaaatcaaaattttaaaaccaaatatatccaaactactcgaaaatacagaaaataactaaaaaccttgaacacttttgtattcaaatttactcaaaagtagattaaatacctaaaattattttaagtatctgaaaatctaaatattttgacgcttagattattgcaaatataaatattaatacgatcaaatgattcttcaactttttttgttaatctcctcattacttttaacaacaagtcaagaaattgctcgatttgttttgcaatttcttgacttgtcatcacatgtctccacagttctcacatgtcatcacactacttagtgtaccacaaaaaatctggtaaaccatactatcataagaggaaccaggagaatggagacatttgtccatgcatctagcaaattaaccagatactcatgttcatcttcatgtgcctcatattcgtgtatttttaatacgcgtagttaagcaatatatgataagctagaattatagtttattttactatattaattttgactccacacaatgcgtggaataccccctagtaaactataaaaaaaaatatgaatagaaagacgtaaatctttttgaccttgaataaataagaagcttaacttaacaagcatccaaaatgtatttttgtaatccgtttaattttatcagaaatattaaattttaaaattttatgattgtgtatcatatttaaactagattttaatccgcggtatatcgcgggacgatttattttttaaaagtaagatatattgaaacttgcaaattttattcttataaaatatttatattttacagtttataattgttaccacaatttttagcttaaagttttatattttatagtttaattttatatatactaacattatacataccacataacatttttggttttatataatcttttctaaattaggatgatttgatatgtttaatattaatggtcttaaaaaataataaattaaagatttaacccgtattgaaacggtgatttaattatattttactttttttattaatgttgattcaaaaacccgtccctccaaatccatcttgccaaaaagccatttattttattaatattaattttatttatgatatgactctaaattataatctaaacattttagctaataacatagaagtgcaccatatttatttaataggggaatgtaccatatgacccgaatgcacttttacccaaatccaccaaaaaagtcttgcaaaaatactatagagataagaaacgatagtcggttttgataggtataagattagcaaatatattagttagcttaaattagttaaagaatacaaattaaaaagatatattacactttattcgaatatagtataaaaacttatataacacagagatttgataattttttaattgttgaatacttttttgtgctaatttttatgtgattaagatttagttgatttcgtatataaaatattaaattgttttacgaacttatttgtttataatttggtaacagatagatatttgaatattcagtatattttgcttaagtttaggaaatctttgatgacccgtctttaaatcaaataagccctataattaagagatgaactaggatttaacccgcggtttaccgcgggcaatcggtttatttggttcttatactaaatatttgaataaatttgatatcctaaacttataaatataaattttttaatcagacataactaaataataattgagatttttttttggttgttatttagtgataagaagaatgtgttaaaatgtgtttaatttttcttttgttatttacttatttttgttgaacggattagattgaagtgaattaaaattattgaacggtttagattgaatcggatcatatcaagtttaggagattgttaagaccaaattacccttaatgattttgaatagcaaagaacaaaatccaaaattgaaatcaaaattgaggccaaattagacaaaatttcaatttgtacttcccttttaataataagaggatattgtcgttaaaagattttggtaattaatgacgtcattaaaggattttgtttttgattaaatttttctaatggcattgtcatgtaattaactacaaaaattaaggttaaatttaaaatgtacttcccaaataatatagtaggatacttgtaatttgtatcatttatatgatatttatatttatatttatattttataattgtcattaagtaacgatataccacataagaagtttgttttgtacaatcttatattaattagacagatgttatatgtctaacactagtgatattaataaataataaaataagaatttcatctgtattaaagtagtaggttaatgatgttttatttacttattaatattgtttcaaatccgttccgccatataactccgtctcggaatataactcatcgcatattattttaattttcctaatattataaacttttattgattttaaatacatcaatcataatattaataataatttaaatgaaaaattatagaaaataaatcgtgattgtcaagttttcacttttgataattttttcttgtaattagtcaattagtgttatattgtggagagttgaatagtctcattttgcaattttagaagatcaagggtatatttccaaaacattgcagttttgaggattcaacttgcaatttacccttttcaaaaatcactttcgacaattaccaaaaaccagttcccccatttcatttcacgctttcttctcttctcatctcagagctccgtgatgaagaaatggttagcaatcgcagcgacggtggcgataattgcaataatcgttagacaaggcacgacacaatacggatggaacaaagaggcggcgttggaaaagctaaaggaatggtcagatcggctggggatttgggcgattccaacgtatgtagcggttcacacaataaccttagctctttgtctccctcacgccgtcttctttgaagctggtgcttctatgctctttggtttccttcctgctcttctctgtgttttctctgctaaagttctcgccgcttctttctccttctggatcggcaggtctgcttctcaattgcactgttatgtgattcaaattgatctgttggatcgttagtttgtgtcgctaatgtacgaatttgatcgaaatgatttggatttagaacaatgattctcacatggcttatcttggcttcgtagaaagtatatgattcattagtaatacactctggtttagtttatgttatcgtgttttgtgaatgcttaaggttttacttggagatggtttagatttttctttagtgcaccattgttgaaaccttttgcagaacgtttattgaaatccattaaattgtaagcatgaatgataggaagggaatgtttgtgtgaagaaatggtgtcattgttggttattcagcggtaagataacaccgttgttcaccaaaaaggcggagaagatgcatgatattttcttgcgagatttagatggatgtcttcagattctataatggtgtttggataagagtggttgttgtcttgtgtatgtgacggagatgtaaagaaccgttagatgcttgtcatttgcttgttaatatatgctagggaatgatttgcaatattcacatttatgctggatttttacatggcttcatagaaactatatgcttcattagtaacactctgatttagtttaagttatcgatttctgagattttacttggagatgtagaataaactcttttgttggttttgattgtcctgctatcgctgaaacctccgtatacagaagttttcacgaaaatccattctactctaagcattataggaagtggatctttgtgtaaagaaatgatgtcattttggctgttcagaggaaaactaacaccgttattcgccaaaaaggcggagaagatgcatgtcttcctattctataatggtgtgtggatgagattggttgttttcttgtgtatgtgatggatatgtatggactaattgttaaatgcatgctgtgattctaattgccaattaatatatgtaggagaatgcaactaggatgttgattaaccttagcaatgtgatatgcagttttatttatttatctatctattgggagcacttgcattctctcatacttttttgaattttcaggtttgtttttaagagttccaccagagctacagggtgggcgcatagcaacaagtacttcaatattctctcaagaggagttgagcgcgatggttggaagtttgttcttcttgcaaggttctcgcccattccttcctatgtcataaactacgctttggcagctactgaagtccggtttgtagctgattttctgttccccacggttattggctgcctcccgatgatcctgcagaacgcatcagtcggtagcctcgctggtatggctgtggcttcagtagctggaaaacagaaaagtcaggtctggggttatgttttcccagtacttgggatactgtcaagtgttctgatttcattgaggatcaaaaagtactcagctggaattacagaggcatcatcagatacctctgctaacaactctagtttagcttcatctgaaactgcgaatcccgcttatggaaccgatggatccaagaaaagtgagtgattatacaaaccatgatggtggtttttgatcgccggtattacactttgtttggtttgcagctatcagattctcaacatcatggcttattttggacgagttaggcagtatcttaatagtaacaaagcattagtttttgtacttcttaagttaaaagcttagaacaaaacaacagtgttattttctataccagacacaaaaactgtgtcgttgtaataacacttaccataacattttctttcagtgtatgtttaaagccgtttatatggttgaagcaatgtgactaaaatttttgtagcattgaaacaagctatatttgcattgctatggtcttgttttgtgactaaaagacttggatgcagaatggatataagttaaatgtctgattttgtaaataacttatgaagagaaaatctttattcggtaagagttgttttctcaatgtagcagttcactcatcattttcaaacttcaactctcagagaacacaaagaggttagacagtgcagatgcttatggttgagaagctttacctaacaatggtacaaggcggttttgttgggatcacatgtgaagttaggcacatggattcgttcttggagttggtacaaggacttctaaaagacaacaatgaggtataataaggacaagttgactatgtctctctcttttatcttaacattctaaattaggatttggtaaactgagagcagttagcttcttgaatctctaaagtataaaaaccctcaccgttttactactatctcatcttaaaactcccaagtaacaaaaatggctatctcaaagcttattcctactcttgtgctctttgttttgttctcttttgatgttagtgttgctcatccaggtctaggatttggatggggaagtaatagtcccattggaggatctttttactcaaatctttacccacaattttaccagttctcttgtccacaagctgatgagattgttatgacggtgctcgaaaaagccatagctaaagaaccaagaatggcagcatctttactcagacttcacttccacgactgcttcgttcaggtaaaagtatctttacctatttttgttttccctttatgtgtctcttaagcttaacacttatacactacactctgtgtgtaaacagggctgtgatgcatcaatcttgttggatgatagtgcaaccataagaagtgaaaagaatgctggaccaaacaagaactccgttagagggtttcaagtaatcgacgagatcaaagccaaacttgagcaagcttgtcctcaaactgtctcctgcgccgacattctagctctagctgctcgtggctcaactatactggtaaaattaagagaccttcaagagaaactattggctcagttacaagttatatagcttatatttatcgaatttgtggttcaatgcagagtggtggaccatcatgggagcttccactagggaggagagactcgaggaccgctagccttaatggcgcaaacacgaacattcctgcacctaactcaactattcaaaatctcttaaccatgttccaacgtaaaggtttgaacgaagaagaccttgtttccctatcaggtgagattaacatgtatttatcttttgtttaaggagttggcaaggaaaccaaaccgagaccggtttcttaaaaccgaatgataacaacgtttttaaccaaaccaaaatgttgcaggaggacatacgattggagtagcgaggtgcacaacgtttaaacaaagactatacaatcaaaacggtaataaccaaccagacgagacgctagagaggtcttactactatggtctcaggtcaatttgtccaccaacaggcggtgacaacaatatttcacctctagacttagcctctcctgcaagattcgacaacacatacttcaagctccttctatggggcaaaggcttattgacatcagatgaagtgcttctcactggcaatgtaggcaagactggtgcattagtgaaagcttatgccgaagacgagagacttttcttccaacaattcgcaaagtcgatggttaacatgggaaacattcagcctcttactggttttaatggtgagatcaggaagagttgtcatgtgattaactaaagaaactgtgtgtttttgcattattattgtattaaggggtgattaagaataagtcgtgttatgtttttcgatatgttagtgatctaattaacgtctttgaatgaaaatggacggttgttttaagaggtgaacatgaaaatatggtagtttttactgtattctttatttgggttgcgtccgtcttaagacaacaagtatcttcagactgcagttgtcaaagcgagtaaccctgtttaaatatttgtaagtaccggtcacaaacaagtacttagaatgatacaatattctattaatttatagaagcattatttatctataaattatacttattaatttatagaaagttttttctatccactaataagattttttcattataaaaattatctttctagaattaattatcaatgtttagaagacaataccaaacttttttaatgcaataaaaatatttgaaatgaactataacaaaaactaatgcggatttaagaaaaagcaaacaatattagagttatatttcactaaagttttctaaataataatcattaaaaattaaaattagattatcgattttattttaaatgtaagctaatgaaaacaggtagcaagtattttgtaaataactagatctggaccttcggtgtatcatgtttctcactttttcatttttgattctttttaagtatcatgaattatccatccatgtgaacaatttggcagaactggaaaaccgccgccgcgtttccacaaataaaatctacagtgtccataagaaagtattccctataacactggcggtttttgtgaggatacaaggcatcctgatattcctcgacacgacatctgtaaatgatggacatatcaccattcacacggagggtaacaactggtcctttcaccggccatgtcgtgtttcggaagcacatgtctactctgatgaatccatcaccattagaagcttcgaacatatttttagtatgatgtctttaagaatgttatagtttggtataaagaagagaaaactataaactatttaagaagagaaaattataaactattaaaaaagagaacacaaattcttaccaaaagttgcggtgttgaacgttcttttactattgctagagcttaaattgaatgtgatgatggttgaatcttgaccatcagcgataagagttaaattggatttcatattcccaatgacaacgatttcaacatagatgcttgtcttaatataaatgacgaatctcttttggctgtgttgaggtgccgctgcaatggccacattcactatattgtaatttccggtcacatccttcgcgaccagaatatcggtaattttctttagagtctgatttataagaaacataagaaattctatgcgcattagaaagaaaaaaaaagggggaattgtttctccattgttgcttaatttctgggaccatattggtttttggggtttatggttattcataaattatagtgagccttttgtgatcatgatgcccaactatgattgtttttatcagaaacattgggctttagatttttgggttattattttcttggtccatcttgagttttgatatctttttggttaagtttttatataaagatatgatgagctttttgtgattatgatgcgcaagtaacaacgtttttaataagaaaatttaatgtaatgtttttagagaaattacctctaatagctccaaaaaatattaatcaagctttagaagaacaaacatccaaaaataaaatgaacataatttaattttttccataatcaaattagtttagtgaatctattacacaaagtgtatatatatttacgttttttcctgaaagattggtgtattttaaaggttaccagtttatagatagaaatctaactatacgattatcaaattataactgaaaaatattaggtttttgttttatcacctcatcattgagatatagatctttcttgtcaacgtgagataaccaagacgggccattgggaaccaccaagttaagttcggtgttgtctctcagcgaaatagagataaaaagggctaaagcttctcttgccctagaagtgaggtcctcaagctcaggatcgacccgacgtttatacattcaccaatttcgtcgatatatgtgatgtagctagtaagaacgccactggagccaagtgtggacgtttcaagatctaagattagggaattctcctcctaagatttcattcactgaacggatcattctattttctgccactccatcatctcctcaaatagatttgtatcctccttcacaccaagcatatcattctccatgtcctcatgtagttttgaatcttccatcacaccaatcatagccatgtcgatcctccgcacggaatttttcaaaacgatgatcaataactcacgacgtctcatctccgagagtggtgcggaaatcgtcttaaggtccaacaaaaggttttgacatgactgttcatctcattctttgctaacgccaataaccgttgttatcatcaagatcgaaaaagaaaaaaactttaaccaacatttttgaaagtttttttttttctttctttcgtctctctttagaatttagattatgtgaactgaggaaagaggagagaggtatggtggtcttttatacaagcaaaacaactaaatcaatttaccttttaaataattgtattcaataaacgacaatagttaggaaaaaaacttaattttgagatcaatctaaacagttcagtgcaatgtgaattgaagctataattcagtgaagtttggtttaattatctacaaagagcaattcttaattgcgttgtattagtttcaagagcattccatttgaaagattattatggtcatcttttcacatgcataaagtcataaactaatgaaaatttcttagcagtcaaagaaacaattatgcatgtgcaagtgaaataaatgtcttaactaaaacaaattggtagatgattgtaactttgttttatcttttcttgtttatagatagtttttgtttgtatctttctgaaaatagtataaagactaaagttgtatttaatgtatggtcttagagccatgagggtggagagagagaagtagattttgacaaattaaataaatatatatatatatatatatatatatatatataaatttggatttgtccaatataatacagatcaaaataattaaaaaaaaaaaaatctttgatccttgcaaatgaaagttttgcaatatgtttagtttaaaaactatttaacctgttaaaaactaattctctttttctttctttttcaattagaaataaactcattaaatccaagaaaaaaattatttttgtaatttttgaattgttcaataagaatccaaattttaggcgctaaaatcaacattgaatcttaaaggtgtgattggtgggaagtgagaactaaaaaaaaaatagaaaatgaaaaactgaaaaagttaagaaaaaaatagaaaagtggtccaaaaatttcaactaataaaagatagaaagaaaaattgtcttactttatcctttttaagagaaatttagcttgaatacttgttttccatgtactttaaatggctaaaaatgaatttggtagaaattggtttcatccattttagtttaggctaacaacaatgcaatatattctcaaccttaatctcttgcgtgtgaggacaatatattttagtttacgctaacaacaagacaatatattctcaaccttaatctctcgtgtgtgaagacaagacatagccattattattctagtactaaataagacaatatatgcctaataaatagaaaacccgtaggtgttttttggagtaaaaaaacattaagtgaaatttgtaaaactaaccaacaaataaattataattaagaaacaaaagaggtatgatattctgtgtataaactacaatataaactaaaatacccttattttttcttgttttttagtcattactctagtacactataattaccatcaccaccatgcgctgcaaccatcaccatcatcgcaattcgcaaccaccatcgccatgtcgtcaccagcactaccactgcaactgtcgccaccataccaacaaccatagcgctgtcactactacaaccatcaccatcatcaccaccgaaactgctacaccaccgcaaccaccttaatcacgatcattattaccatattgctactaccccgaccaccgtaaccatcaccaccgcaatcaccatcaccactatcaaaacaaccagcacgtcgttaccactaccaccaccatcgtcagtccgtcaccaccactatcaccaatttttgaatagttaataactttttcttttttttttatctagaacactttgtcctatactatttattctattctatataccgtttttcatttgaaaatatacatcattttcaatttttgagtttatacaagttttacacatataattatggtttgggtataagtttttttggtttagcatttagtatattaaattaaaattgatttatgaatgagttatgaaaaatagtacaatatattcttgttctattcctatacatcctaaatagtacaacatatttttacttacacatactattcaccatttcacaaatttacatctaattttaaaattttaaactatgcaatatgtagaaaaatatggtttttgtgcaaaaaatcctacaatacaatttttttttaacccttcaattaaaaaaaaatgcaggtcaatactaccaacttgaaaagtgagccgcaatataaactacgtcgttttggatattttaaaataaaaaggaatgtttcaagagtgttttgaactcaggacctctagaagatataaaaccttacctaaccaattgtgccacataaaatttataaactcttaacaataaataaatatatatatatatatatatatatagacagcctttatgttcaacctgaccaatgcaaccaacgatctcatcagaatcacgcccctacatatcgcatgattcaattttgtaggctctacaaccttccattgagatggcaaaccgccattggttgtttaaaatcttatgtagacgctctagaagaaaatagtctcgacttttttttttttttaaaagagcagttatgtatttgagaatgtgccggagaaaaaaaacaatactattatatatcagaattgaataatacatatgataaatcatatatataatggataaggctaatgtgagtgtataagtctccaatgcttcaagctgattgtaccaccaaatctttttcaaaaaactaaaaattaaaaattaaaaataattaaaattttcaaaaaatcagaatttaggcagaacaaattgcaataaagtttttatttcttgtttctacaaattaaaatatttctggacgtattttttaatcttaagaagataggtttctttaattaattttttattctttattttaatttttggaattgaacagaagctgatgaagtgaatgataacggatccacccagccggacccaaatagccccaaaagcccttaattcatagctaacttaacccattcctcaagaaaacaaaattactttaaaacagaaaaaaagttgataaattgcttcagtgtcaaattctgagatctgtaaaagatgagcgacggagacgacgctgctagacgccgtaccgcggcggtgactgattaccggaagaagctccttcatcacaaggagctcgaatcccgtgtccgaacaggttcgatttcaaaatcttcctcattctcctctttcgttttctgggtttagtttgtgggtcaaaatcgaatctagggttttttcctactcttcgttcccattagaaatctcgagactttacttcaattagtgacgcgattttaggggttttggagtttcgaattgaattggttccaccgtttgtttcacttgattagtcaattttgaagtcgatctcaagcttaatttcacttgttatagttcttataaactgggtcttgtggttatatgcagctagggagaatttaagagcagctaagaaggaattcaacaaaactgaggatgatttgaagtctcttcaaagcgttggccagattattggagaagtactacgtcctcttgataacgagcgatgtaattttctatcttgctaccttatgtttttgattgaatactacactttgtgttttctatcatctaaaggtggaattttttcttcttctttttagtgattgttaaggcaagtagtggccctcgttatgtggtgggttgtcgtagcaaggtggacaaggaaaagcttacttctggaactcgagttgtcctggatatgactacgctgacaattatgcgagcccttcctcgtgaagtatgcttgatttcagtatttttgctttttttttttgtagctgcttagtgtatttgtactggttttaattcgatggtatgtgttggtaggttgatcctgttgtttataacatgttgcatgaagatccaggcaacattagttactcagctgtgggtggtttaggtgatcagatcagagaacttagggaatctattgagctgcctctcatgaatcctgaacttttccttagagttgggattaaacctcctaaggtacttgatctctctccagtcctttcttttgttttcacaaactatctcatgattcactttttatgtttccctgtgccgtggttacctgcatgaatggctaaaaagagttgaaacgcacttcaatttccataatgctaattttcatttctctcattccagggtgtccttctgtatggacctccgggtactggaaaaactctactagctagggctattgccagcaatatcgacgccaacttcttgaaggtttgattttgttgttgaaggtttggtttggtgttctttttattataccttgtctgtgctaaataagctctttttttacctttatgtttaggttgtatctagtgcaatcatagacaaatacattggagaaagtgctaggttgattcgagaaatgtttaactatgctcgtgaacatcaggtagaataccatctctttcctcttgtcttataccttgatatgctttatattgaagttcatgaattgtctcttaacactccttcttgggggctagccttgtatcattttcatggatgaaatcgatgctattggtggacgccgttttagtgaaggaactagtgctgatcgtgaaattcaaagaacacttatggagttacttaaccagcttgatgggtttgaccaacttggaaaggtatgacctatagttttagaatagtactcgtgcataaaactgagtggttacggtgtgaaacttgcttgttggggataacttagttcaaggtagttttgttttataactcatgtttcaagtggttactttcattgttaaatttatctgtttcccaaaattatttgtacaatggaatatcttctgatacttgggagataatactattaggtgaaaatgataatggccaccaacaggccggatgttcttgatccagcacttctccgtccgggtaggttagatagaaagatcgagatcccgttgccaaatgaacaatcaagaatggaaatcctcaagatccacgcatctggcattgccaagcatggagaaatagactatgaggctatcgtgaaacttggagaggtttgtttgtttttcttaaatgtcactgcgttgtagtttttgcctttgttatatattatagatcccactgattgttccattcaatcaacatccttagggtttcaatggtgccgatctgcgtaacatatgcactgaagctggaatgttcgcaatcagagcagagcgtgactatgtaatacatgaagacttcatgaaggtagaaacaaaaataaatactccgcatgtttacatatttttttgtacccaaacttttctgcttatcaaattgtctgttgtacaggctgtgagaaagctgagcgaggccaagaagcttgagtcgagctctcactataacgcggattttgggaaagagtaagaaaagaataagctcagagaagaagagagggcctaaagggcagtgaaaaactctgttattcactttgaaaaaacaagctgatgattctgtttcagtttctcaatgttttgttttgaggttctagtaaacacaaaaattcttgttttagtaatgacaactattttctgtttgtcctatatttttttattttattttctgatcaaacatgcatcctgtatatctaaaatgtcagaaaactcaagtgtcgtaatcacaaatcttagcaatgatttttcatataaaaaatgttacaaaaatcaattattaatttataatattagtgggaccatatttttatataagattttttaaaaaaattattatcttattattttatcgattttagttaatttttatatttgtccgatctggaactagcaaaatttattaatttttcttgtttattaatttataaaatttatactgtattcctatcaataacgatgagtgctacaaatgtgtgaaatgcgattcagatcttcacaaagtatttgctagccttccttgcaaaaaatatttactgcacaactataaactcattctacaacttctgtgagctaatcatatcctattacgaatgatcaatataacttttacgactaagtaatcatttctatagctttttatggtgaacgattttgtcgacgactttataactgtcagttctatatgtaccacaaagattaacaatagatggttctacatgctgatggtagacaattttactcttttgaaaaatgaaccataatgaacgttaatttttgtcttaatctattgacaaacgtaaaagcatcctcaacggtgaggctctctgaaatgatcattggattaatagaaaatattaattttatgattttcttatttaattaaatttataataattaattgaattccatcaatagatcaaaacatggtgaatcatcaagagactcaaacatccatcctttcactggacctgcttttgcaacaaatacacctcgtctggttgaaattggtgaatcatcaaggcaaagtgagaatacagtgtctgagcacttgatggaaaaaggggattcatctaagagaaagaatatggctggtcctaggaatgaagaaactgttaggcaacacaagcatcaagataaagatcaaatgataggaggtattctgaaacctcctaaaaaacgttaacactctgctaattctgtcaaagtttttgtttaggctgcaatggaggcagcttaaggcgtattggttttttgatttaggctgctttggtaactagtttagttcggcagctgttgctttgaataactatgcggatatggtcatgtattaatttctggttatggcatatctgctatagtttcgtttgctttgagttcaagtggagacagcagctcctgggttgcagaacgatgaggatagggtcattttaagactttttggtaatgacttatctgttgttggttctgtttaaacatggagttcttgttgttttagtttcaattccatgttgtagttttctgaatgttgtcttatgctgtagtggaagttccactttgtaacttttacaaaactggtttgaataaaaggcaacttatgagaaaaaaaaaaaaagatcaaaacatgtggtaagtgaagtcttaaaaagtaaagacacggctcttaaacgagaggtttaaagtcggttgtttcacgagtgggtctctctccatttttttttttattgtttcaatttttcgaatttgtgtgagagttttctgttggaaatggtctgagacatttttttattattattttattaataaaatagataaatgaccataaataaaaataagaaaaaaatatttggattgaatcagcttttgtatatctctaactaagctaagtagactttttgtttgactttggcttcttaaaaagtttatatctcatcatcccgaaaattttatagaaccaaaagatgctcacgagttgtaatcctgatcccattgcctgtaaaaaataagtccacatatcattaaagtatcatattcaaattgaaaattatgatatactgagagattaatcgacataatatatatactttagatgataaaatctatattttggtttggagaacaatacttttgtgttacaaaaaaattcacatattaacaaaacaaatggagaaattgatgaaatcaaaatatgtaactaatgtaaaaccaaagcaaaattaacatattataaaatatgaagatatcttgttgacgaaaataatataaacacaatttcttggtagttgggaaagatgaatgaataaataaataccttgatgaagatgggattatcagctgatagactgacgtaaacgaggaaaggtccacacacaattctcgccaatgtgaatatagtggcaaaacacacctatcaatatcatcagttaatataaagcatgtcggtgcttaagtttttagaagcttccttcatacaataaaatagatttaactttgacttaatgaaatattataaataaatctagagaagtagatttgggttttacaggaagacctaaactaataaatcttcaacgtcaattttttttctttttctttaataaagtgtgaaatttatagatcgaaagataggtctatgtacaaggtaaaatgtcataatctaaaacaggtatctaagctattagaagcaaaaacagaacataacttagggataatgcaggtgtgaccatctctccattaaacaaaacgtcaaaaaaatttaacaattgcaattgaaagttgccattcaatggaattaaaaccataacgaccatagactttttttttcttcatatccaacggtggtcccggttttatactatccaactacataataagtatagccgtcatcgaactagtgacctagtgtagacagtttaagtcaaaaatactcgatgattgtgcattattccattttctaaaagaatatacaatcgttctgtttgcatttaactaggagttgatgatggagtaaagactacattaacatgttttaatatctatccatttaaaacttgtttagatcacacaaaaagatgatatatgtatactcacatcggcagctagattgagtttggtgtctttgtatccaatctctttgagaatctccctaaggtggaaaaaaggacttgatatctctgctacccacagtgtagccacgatctcagatccagacttcgaaacaataaatgataccaaaacttagtaaccacaaactctcatatatcttctaatagtaatcattgatttcgagacaaaaacaataaaaataccttttggtatgcaagtccagctataaaaccaagaatgctaacgaaatgatgaaccgcgttatcaatgctaaacacttgatcgaaatgacaacatattagatcgtagatcatgtacgacaacgaaaacgccatcacgtccatctgttgtgtgttttgttttatcaccagtttggttacaatgtgcaaaaagagtgattatatatagttaagtgaagtgatgatgtgattaataagaacctgtttatgagatggcttagaagcaaggggacaaacagggcaagacaaatcttgaacagagagtgttgctaaagtgacagcgatagtcgcgtgagccgtggagagaagacggttgctgaagctgaatgagtagcttgagaagattctccgggtgagaatgaaggccacaccccatgagatgactccaaatactattatcttaattgctcttacttgttcttcctccatatgatcacttgatctccttttttcgcaagccaaggcaaaattttgttgtgatgacaagagagatggagaggaataaaaacatttcagtgatgttagtagaccgacattattggtggtatgttagttgggaattttgggattcaatggtgtggatcccatacacattaatgtttctgttaaaaattgacctataaagatttgatccaaagattttggaattatttcgtctagctctaatcacccaagttatttcctttaaatggtgatcattttttttgtttcttagagtatcttaagttttgtccgaaaaaaagaaaaagaaaaaagtatcgtaagcaagaaaaagaaaaaagtaccgtaagcagtagacattatgggacgattggtaagggtgactgtaaagactttaactttaaaaatagtaactgtagaaagtttggctgcagagactttgaattttaaaatctgatcggtaacaaaagctttaaaaactgttactgttatttatttatatttattactattaaatataaatgatatcaaaatttaattatgttgtaacatagtgacaaaacaaatattttattaatagtaaaaaaaattaaaatacaaaatttcttaaataaatattcataacaaacaaaatgcaaatctattactcattcatttaaaattttaataaccaaaatttgcattaagaagtgggataaagtgagaaaaattatggagcttcaggattattatgataaatgttgttttgcttcgtcaaattatccaaacgatttttcccttgtttcgaacataaattacttccaaaattattattagtattctgaagaattctttctttttgaatagcacttaaacctttttttgttattattcaaattttaaatgaccaacatgaaccttatattgtttttgaaaaatgttaattatgtaaactctcttacacttacattaatgttgatgatgaaaataaaataattattagtaaaacagatcttaaaagaaagagaaaaaactaataataattaatttaagaaaaatgatttgtgaaaaaaataaatataaacttgtggagatttttaaattatcatggggaaaagaaaaaagaaagtttttaattttattttgtttgaaagccatgtattccagactttacaaaaaagaaaagaaaataaagaacatacaaaaaacttaaggctataagaactcattgaaaaactaaagtaaaaaaagcatgattggcaaaaataaaactttgaagactttagaatactctcaaacccttgaaagttcttgccaatcactcctatgtgtttattacatatggagtgtgtaaagagactaacgaccaacaactaacgacctcaagacaaaagcactgcatatatgtcttttctataaaataagttgaggtcaactaactgtatttttataaaagtcgctataagaaatttgaatttgtttttttaggtcgacggaatttacttacttccaattagattctcaatcaaaagcggtttagaaatattaaaaattgactatacagttattcaaaatatcaagttatattcgttttatcttgtcgtattgatccacaacaaaccaaataatatattgggtgaattaaatttcactgctcagacgaatgcgaaattaggaaagtatgagtgatgatttcatatttagttctctctcctcccgacaacaaattctgacatatttgcccctactcagcagagatattgttggatacgtaatgattgtgcaacatttaatgcccctgaaaaaattattgctaatgtttcttacatggaaatatatccttaacataacttcaacccaagttgttagtgggtaagacatgtatatgaattagtataaaaagaataatgatacagtttaggatgaactaaatgtggcaataatgtaaccgctacagagcagttggagtcgccgaagcaggacacaagtatgaagataattaggttagtcgataataagttatttgatatggtatcatagattatattagaagatagttgatagaagataagaataaataagactatgcccaatagtagaagacgataaccagatagcagataataaagttaatatagttgtagggcttcaccactcgtaatgaaatgttgagttattacacgtgtagtgagagtaccgcaaaaattcgtatacggtaataaagtatccgataataaatccgttaggggttaaaacttcaacacgcgcaataaaatgtcgagatattacacaaagtaaaacaatatgaaatgtcgagataatgagatagcagatattagagttaatatattcataatagagttaatatattcaccgctcgcaacacgtgagacgaattctgaaccgcaaaaattcgtgtacggtaataaattatctgataacaaaccaattaggagttaaaacttcaaaacatgcaatgaaatgtcgagataacgagatagcaaataatagagtttatatagatataggtcctctcgcaatgaaatgtcgacttattacacgtagggagagtaaataaaatgtagaattctgaagcgcaatgtcggtaataaagtatctgataataaatccgttagaggttaaaacttcaacacgcgcaataaagtgtcgagatattacacagagtgaaacaatataaaatgtcgagataacgagatagcagataatagagttaatatattcataacagagttaatatattcactactcgcaacacgtgagacgaattttgaacagtaaaaactcgtgtacggtaataaattatccgataacaaaccaattaggatgaaagagacgaagaaaaaatatgaggtaaatatagattggaccgaaacgacgcctcgattgaaaactatcaaaataatataaaattttgattcacccaccaaaatatccaaaacaagatcttctactattcacctgacacagagaaatataaaagctacgtttagatttttactagacataggggtacatgcgtctttatttttgcaacagtagcgccgaaacttttgggaaattagaacctaaatactgaatccactgagcatacctagtgcaatttccctaatatatttctataatttcaaaatcatatatttgccaacaaaaataataaattccttgttggctagctacaaatttagtacaatgaaaaattaggagtggttcaatatcttttctcacattaatgagatttaatcagcagcaaccaacttgttggaagaaataaaaattattgcttataagcattcaactttgtggcataagtaaaagaattcaaatacaaattctttcacacaacaaaatattggatggagaaggatcaagaatcatgaagtagaaacgagtgcaatcaccaattatatttcatgatatggttacctatttgacaatcttactattagacatctctagcttcccttcctattgcttaattgttgatcatttatttttgtttcttagaattcctttgagtagacattatgttctttttacatatggaatgtgtaaaaagttactatatttaatcgatttattttaaacatttgaattttgttttaggtcgacggaatgtactaactttcaattaaattacctagtcaacactacaactagttttgacgatacaaaataggttagcatatattaaaaattgacgttcgggttattcataatatcaagttacatttgttctgtcggtttgatttgatgcacaaaaatccaaaaaacataattttgtagaaaaaaccacacatgctataattctttcgtttccctacgaattaatagtctgtaatataatcattgggttaagttattcaaaatcgttataatagttttctcaattttaaaaatcggctaacagaaatatgattagacttcgtagtaatttaatattttttgctgttcaggtttaaaaatgtatagtatcatattttgggttggaaaaagcatccaacaaattgttcttactgattttggccatttttccacacaatgtgcatagttttttggtaccatgtcaaaactatgtaccacattacctatatctaaaataggttttggtgatacaatattgcgtcgcaaattcaaacaatacaattcattaaaacttgctataaaacttgacaaaatatttgtaatatccactctattcataacttcatggaacaaagtagggtgagttaagaatatatacatggaagaagttttaattaagaatgtatacatgtagatttgatatttgggtgagattaatcttgcaacacaaatattccaactatacccctataagtcagagatatttgtaggcgattgaagaaagatatagtgcattaaatgcgtcgacagaaacgggacattaaattagcatacctttagcagctacatatgtaactaacgataacataacaaaacaagtaagcaaaatgttatcgaactaagttataatctaacatgctgatgattatccccctataaagaaatttaaaaccaaattaacaatattgaagacaagcgggttacgaaaatgttacccgataatagtgtgattaacaattaacaagccacacaaagaccttaaccaaaggttgtcaactacacaaccgttttaaatatttattcaacacacaaactatctaacctggtcgttaccgactgtagtgttgtcgcctcacatatcaatgtcgccttacaatagaagagatacagtcggaattgcgaagctaaagaaggagtaaaaactggatattttgtttgttgtcggatatgtatgttaataattaacaatctgttttgtgttatcggatatcagatattttgttatcggataagtatgttaacaatcggatattttgtttgttatcagataagtatggtaacagaagagatacagtcggaattgcgaagttaaagaaggagcaaaaactggatattttgtttgttatcggataagtatgttaacaattaacaattttttttgttgacaatcatttattttcgtttccgaaaaaaatgtatggacgaagtgacactaatctaacataacaggtaagaaaaatgttatcgaaataagttacaatctaacatgccgataatcatcctccaataacgaaattgaaaaccaaattaacaatattttttcacggccggttactaatttgttacccgataatagtgtgaataacaatcatgttggacaatggtatttctcatcaattatgcgggacaataatatctgttgtctgacataatattaggctaagggtaataaaaaaacttaaaatataatagagggatacaatagtatttataaactgaacatagaaaaggaaacagtagtataatgagtgacttaattttacagttttctgagtacatatagtgataatacccaacaaagtatagtaaaagttaatatttgttgaaacaaaaaaaattcacaaattctaaaatctgaaaacatagatattgttacactttctatacaatttactatcatggataggttatagataaagtgaattgcaaaactaaccaaatataataattgaattaaaaatctcagacctatttgaaatattaagaaagtaacatatatagtaagtaaaatgaccagaggtgaaaatggtggtggtggcttcggtccggtgatggtggctccggcaactgtgtctcgaagacagtgactccggcggtggtgaagataataaaaatataattgtatttaaattgtttatatatattgggttatatatatgcaaatttctataaaaatcaattcgtgttcggcaagagcgtgtaataaaacatgagaaattgttcaatatcttttcaaaggcaacaaaataaaacaaaaagtcaacatcgtgttggaaactatgcctgaagccaaaaaaaatactaaattttatagacgaatcattgaactcagttaatactttatttctgaaatcattacactcaatttttttaagactcgcgcgttactcgcatataacgggggatatataatatagggatatcgttttgatctgatcaactaatttagcaaaatattataatctactagactataaaatagtaagcattaatcaagcataagatgtattacacacttgtttgtcaaaccaaacaaaaaataatacatttttcctctttgaagatcgacgagctgatcaatggcgaaatctcactaccagcctctgtttcttctccttgcatcactcttgttcttgcctgctttgcatgccgtcgattttaaatactgcaacggtacgtatcaattttttaagtcttaagttactttgtgggattttaccgtgttgatatataacacctattcttgttatttgatcaatcaaaagatttagtttgctcctatctctatagataaaacacctactccaaattaattgacataccaattctctttccataatatttttgtaaactacgagagaagtcaaccctgtagtatctcgatgtgaattcctaccgaggttgaccagatcagccagtagaatttatcatatatatatttgcataaaaagatatgtagacttgccatctttgcaactgttgtaggtattggatacgtcgataaaatcactaaagtggagatttctcccgatgatccctcaactgttattacaatctccggtcttacaagtaggcaatatattttctaatttccgtttcaaatttctaactctctttttttctaatatatattttcttgatatgatccttttatgcatatataggaagaggactcgtctatgctggaactgtagtcgtggccagtggaattggcgaatttaatatcccttttaaatactacgacttttgtcagttgtgtaaatgccctatgctaagtggcaccaactttgttttcactctttctcaaattctcattccaaaagcttttgcggtaactattcttagttttttacccttttcttaaagaaacaaatctgagataaaatgctgaactaagcactctttttctattttcttgtttttataacatgtgttcgtagagtgacaagcttgctgttacgttgagtttaatatctagagatcaaacagaaggagtgtgcgtctacttcgatttccctacttcagctaactctatgcttaatcaagctagcgaatgaaaatatgttttcaagtctttatctatattagtctctctctcgctacccttaaccgatttgttatgttgtattgttggtttggtttctataatccgggacgttatacccaagatgaaattacttgatgttatggcttctctcatcgttcataaaatgaattttaatttattttccaaagaaatatatcggaaacgaaaccacgatgatctttaacaatggattggctttcaacatataaatactagataaaagtttgtgtcatgcttctgctttgattttatgagtagtttatatatatatatatattgttaaattatatacattcgataaatataaaatatcattgttctaccttaaaataggtgtgcagattcatatagctagatgaaaggtaagaaaatgaggtagaaaaacaatttttataaaattatagtaaaaatgataattgtgttgaatagcacactgatgaatcttctatttgtatgataaaacttgtatgactttttagattatttcttcattatatatatatatatatatatatatatagaatttaccatattataataacatgtccaaactaggaaacttaaaacggaaacgtacatagtgccttccaaagcgagtaacacctatacccgcgatagaaggacaatcacagaggacatgtaagatagtctcttcacctccttcacaaacctgacatgtacttgtctcaccaatgtgtctacgaaaccttttttcatttgtcataatcgcttggtgactaaccaaccacaaaaagctcggactctctctggtgcaaccactgtccataatcgatcaaagaagcttgacatattttggcttcgtaactcattatccgtcaaaagagagcatacgccgatttgactgtaaaccatccatccgacgtctctcccatgacaatctatcctttgctccggtcacgttatcaaggaccaccgctgccagctctaatctaatattatgtgaaacaaaaggcacaatgttttctagaacccagcctgtaccatctcgctagtagtccttgagccacacgtccacatgaccactaggtaactccctggttgctctctttactaatgatatgtttgataaccatttatcagcccaaaatcgtatattccaaccatcccctagcaaccaactgctcccatgaaatattacttcccgcaggtctgtcactacactccgccaagttgatgagctttcactctttttcaacatccaggtccagtcttgtagatcacctaccttatatttgcttcttaatatctttgtgaaagtaagagcaagacggctactttaggtaatgtttgaatgaactttccttttgatattatttcacttgagttctaggttacatcacaagttcccttttatagctaaacaatgctagggtttcaatcattgtgaactgacaaatgtctcaatcttgttatgctacgcatgtcatcaagcaatcaaatttgttctctgtgatgattggagccgtacaacaagcgctcctcttctctgtcattattctggctttgttctcttgcacaggtggacttagccgttgagaagatgaagaagacttgttgggcttctcagacttgctgggcttctcatttaagttgatattggacttgttaggtaagtggcccaatatccctttctctttgtttactgcaacgacatcgtcttgactccttgactttcagctgcatctgagttcttcttcgatcttgtttcagattcaggagctgaaggcggagcagtagagctcttgctaatatccccctgcaaacccggtgtgggtggcacaactacaccgagtttgtacctgagagatgtaaacgcattgaacggaagcgatttagtgaagatgtctgcgatctgctcatgaccaggtatgtgtctgacttccaacagtccaagagccactctttctctcacatagtgatagtggttctcgaaatgctttgttctcttgtgaaacgctggatttgctgttaggtagaccgcagagagattgtcgcagtatagttgtggtggttttagaaggggtactcgcaattccttcataattgagctgagccatgtgatttcagaagctgcttcagagagagttctgtattctgcttcagtggagctctttgacacagacgactgcttctgagaagaccaggagataaggttcagacccagataagtgaagtagcctccggttgatcgtcttgtttcaggacaaccagaccagtcactgtcactataagctcgtaatgtgcaatctgacttcttcctgaagtttattcccatagtaactgtacccttaacatatcttaaaatccttttcagcaacaagaaatccagagtagtaggagcatgcatcttttggtaaacatagttcactgcaaactgaatatcaggtctggtaagagtcaaatattggagcttaccagcaaggctgcggaaatatgttgggttttaaaaggtatcctgattctgtttcctttgtttgtttagctgaagaagcagaggagtcggcattggggcacagtcactcatcgatgctgcaatgggtaagtcctctgcatacttttgctgagataggaatagaccttcagaatgaaattgagcttgaattcccaagaaataatgcatctgacccatatctttcatcttgaatcttttgttgagttctgcaaggagagaggcaagtgtttctgagctgtttccagtaatcagcatatcattgacatacaggagaagaagaatgatgtcttttcctctgctgtagacgaatagagatggatctggaatgctgcagtgaaacccaaattccaagaggtatgtactgaacttgtcaaaccatgctctaggtgactgtttcatcccgtacaaagatttatgaagatgacagacataatttggtttgtctggatctacaaaacctgcaggttgagccatatagactgtttctgttaagtcaccatggagaaatgcattttgcacgtccatctgcttgatatcccactccataatcgttgcaagatgtagaactcctctcacagtagctgttctgacgactggactgtaagtttctaagtaatctatcccttcagcttgattataaccttgtgttactaaccttgctttcagcttttgcagggatccatctgcatttagtttggtcctgaaaatccatttgctgcctaaaacaagcatgtctggtgtataaggaaccagagaccaagtttcagcttctttgcaatttcccatttcttctcccatggcacctgtccatcctgggtcttttagagctgcagcaactgtcttaggttcagggtaagacactttgtgagtcagtaaagcatatcttgggtttggctttctgatcccactcttttgtcttgtggtcatagggtgagtagactgagttacaacaggctcttgcacaggttcttaactaggtaacatttcttcttgactttcattttgagttgttgttgttgataactgatctaatattctttctgtagactgatctgacgtttcttctgcaataccaggactgtgagaagaagaagagaagttgttgcctataggaacatgatctaagcccgccgtacacccataacttctttcctcttccacagcaggtactacagtcggtcttggtattggtattggtagtataggtgtttctcttgtaggtagtggaggaaaatcttcacttgtgaataaactgtcatctgatttaggttgaggtttacttactgtgttgattccctttgtccaggctagcatcaaaggagtaagacttcctgaatttggtcttgaatgagactgagcaaaagggaagacagtttcatcaaagatgacatggcgactgatgtaaacccttccagttgaaggtaagaagcacctgtaccccttgtatttatcattataacccagaaacacacacttgagtgatctaggatcaaacttgttagacgcataatctctcaaggtgggatagcaggcacaaccaaagactctgagtgctgagtattctggaggcttaccatgcagcttctcataaggactgtacttctcatctagagctgttgtaggaaggagattgattaagaaactcgcagtgtagaaggcttctacccaaaacttctgaggacgggtactctgaaacatcattgagagaccaagttcaataatgtgtctatgttttctttcagctaacccattctgttgtgaagtgtagggacaagagataagctgtttgatcccgcattgttgtaggtgatcagttagctttctgcttgtgaactctccccctccatcacactggaaagatccaatcttggtttgatattgattttcaaccatatcttggaacacagtaaaggtatgagtaaagtctgatttgagctttaatgggtagaaccagcaaaatcttgagtagttatcaatgaacactgcataataactgaatccttgatttgatttaataggtcaaggaccccagagatcacagtgtattctctctagaggtctagtagctacaaaaagttgaagcagaaaaagggagtctaacacttttcccaagctggcaagactcacacaccatcttggtacttttatttccaacactgatagatttgtttgcagatagcacttgaaggacttgagagtgaggatgccccagtcgttgatgccatatatcttcactcgctccttgctgtcttgaagagtagagtgcttgaactggtgagtccttcaacacataaagtcccttactatgctttccctttgtcaacagtttccttgttgccttatcatagattcgaacatcatcacagtcaaattgaaatacgcagggatagtcattggtgagcttggaaactgacaaaaagggtttagagatatcaggacacacaagaacatcatttaaaggtaagttacctgaagtagaaggaagactgcctaatcatgtgtgtgttatgggaagaaagtttccatttcccaccattactgagtcacttccttcatacagctgagtctgactgagcttgtgaggtgcattggtgatgtgagcagtagagccagagtcacctacccattcaccaccggattgatctgtgacatcagttatcctgagtattgcaagagctgctggcagatcctcatcttggtagctgttgttgaaccgatgccaacacttcaaagcatgatgaccaggtttgccacagatctgacaaatgactctttctccatttgagttttgtgaaatttgttgatgaaaacctctaccacgtgtggagaatgaatctttgctttttccactcccaaatctttagttgccttttcctcggttgttgttgttgttgtagtaaccagaggagtctgatcttgaagcattgaaagccatgtgaggtgaagtttcagtatcaggaccatagctgttcagcctatcagcaaatcctgtcagccttgaaatcacactctcaaaggtaggtggtggctgagtatccattgaaccttctacagatgttttgataggctcatactctctacctaacccatgaagtgcagcaaatatcttcatctgttcactaacaggactgcctatggaagctagctgttcacaaaccctctttatctccttaaggtaagtttccatggatttatcctgtttatctatggtttgaagctttctctgtagctcaaagagtcgtgatgaagataccttattgcagtgttgagccaaagcattccagacttgataggaggtggcacagttgacaacttcctgcatgatgtcttcattcagagatcccaacagccaggctcggactacttggtcagatctgttccaggtatgatactctggatttggtacctcaatagtaagaccatcgatgttgttgaatggagttgttgcaggaggaggcttgagtgacccattgacaaagcctagaaggttttggccagaaagaaaggactcaaactgtgtcttcttaagagagtagttttgctcattgagcttaacagtgacacagttggagatgtgaagaacaggaggtgagtagagttggatagattgatccatcatagaccgctgtgctctgataccatgaaagtaagagcaagacggctactttaggtaatgtttgagtgactttccttttgatattatttcacttgagttctaggttacatcacaagttcccttttatagctaaacaatgctagggtttcaatcattgtgaactgacagatgtctcaatcttgttatgctacgcaggtcatcaagcaatcaaatctgttttctgtgatgattggagccgtacaacaagcgctcctcttctctgtcattattctggctttgttctcttgcacaggtggacttagccgttgagaagatgaagaagacttgttgggcttctcagacttgctaggcttctcattttagttgacattaggcttgttaggtgagtggcccaatatccctttctctttgcttactgcaacgacatcgtcttgactccttaactcttcagctacatctgagttcttcttcgatcttgtttcagattcaggagctgaaggcggagcagtagagctcttgctaatactttgctcacaaacacgtatgatcatgtaacagtctccatcctacctttgtcacaagcgatgtgttcaaatcctttccagaccaccctctgtccgtggacgacaaaccctatcccaagcaaccaaatgttgttttctcttttctggtgtacttccccataaaaagcctcttgaaactttatccaaaccatcgccaatcgattttggtaaagatattgtgctcatggtatgaatcaatatagatgccaacactgatttggtcaatgttagtcttcttgcaaactcaaagagcagcctttccatcccggtagctttgatgacactttttcgaacaaaatagtattagcgcggagaagatgagaattctttaaggatacttttgggatggttgtatggaaacttgggctgtatggaaaaaatggcggaaagcacttggtcgaccaatgtttgccatgggagtttggtggagcttgaaatagaggtgtggttatgtgtttggcgaattggaaaaatgtcgggaaagagtaaagtttaccagagaattgggacaagaagtaagccgtgcacataactcacttcgggagagtataggtacgggtgtgagagttgagcgaatggtaacgtggagaccaccgcgggacgagtagttaaagctagatacgactggtcctttcacaagaatccagttttgactacagcggggggactcatacgggatgcaacaggtagttggtgtggaggatttgctctcaatatcggtgtttgttcagctcctttagcggaactgtggggagtttactatggactttacctaacttgggagagacatatcacaagattagaggtcgaggttgattcggagttggtggttggattcttaagcaaggggattagtgattctcatcccttgtctttcgtggtacatatgtgtcatgactttttatctaggaactagatagtctggacttcacatgtatatagggaggctaaccgcctagcggatgagttagaaaactatgcttttactttaccattaacctttcatatgttaaaggttgttccacatgttgagacgatttttcaggatgatgaccgcgaaattgcgtttctgaggcatgtccgtctttagttttttttgttttttggggggggggggcggaagttgttctcccgggttgcacagaaattagcgagtaacaccttaaacacataaaacgacaccaaacccgagcacattatctatgaaatataccaagccaagttagaagaagagaaacactttgaggattatagtgatgcttccttgatagcaggtcaagtcggcatctaatagagttattaatatcctgaattagagctgagcttggcctcgaaaagttattgtgaggtctagagattctttccctccaaatgagataaatagacgcttgaaaagccaacttaagaatcaaagcaatgttcttcttcctgctaggatttttaagcatctgactcctgcatcaaacaaagatggcagagaaacatgggccttgcagtgaaagaactccatacttctatagagtaagagcaatagaaaaacatatgttatcttatattttccttaattttatattaattctttgtaaagtttaattttcatatttttactactttaaaaagaaatattttgtttttttaaaacttaataattgttttgtacttgtaattggttttagaaagatatttttttataaaaaagggtatttttaaatataatgtcttttaaaaactacaaatttgcaaaatatttttataaatgaataattattaatttttcattaaattagtactatttaaaatttatagttttttatcagttgcaagtgcaacattattaatttatagagattttagtgtacacttctataaataaatcaattcattgagattttttttcactattcatcaaaaatattaaaattaagaatagtaaaaagctcttcatttgcataagaaaaaaacaaaaaacagaaaacaaaaaaaaaagacaaagtaaggaggccagacagcagacccgtctctctccgtctccatctccgccatgaccagctcttccgctccttcacgcaaggtcgctctctttctctcacatgtcttcaaattcatgtttctctttacaaaaactttgatgattcaatctgagaaattgtgttctttcattcatgcgtaggctttaagcaagatcgcgtgtaataggttgcagaaagagctttctgagtggcaattgaatccccccactggatttcgtcacaaagtcactgataatcttcaaaagtatcaacctttatgtctctgtctttgaaatgagttttttttctttctgtgattttgatttgaatgcgtatctttgtgtgtgatcttaagatggacaatagatgttaccggagctccagggacactttacgctaatgagacttatcagcttcaggttgaatttcctgaacattaccctatggaagcaccccaggcaagttttgttttttttctctgattcgtgagattttgaatcaaactgtgttcttttgttggttttggtgtctctttggttggctagaagtctctcactgataaaattcttgggtttgcttctgtagagagactttgttatggatgtttcatgttttaattcgaacttattgtaaaaaagttttttgttttatgttttggtgtctcttggattggagctactgtggaggagaatgacttatttttccctgttgtgttgagcaggtagtgtttgtttctccggcaccttcacatccacatatatacagcaatggacatatttgtttaggtattgcttgctatctcttggttactgtctgctctgcatatgcttatgtttagttttgatcaaagcaagggtttgtcgaattgatatgtagatgtagaatcggttagactctgcatttcatagttttctggtcaaacaagaaagtgaatattgctgagttttaagatatgttgatgattattgataagtgttatcactcaaaactgtttttattgtatacccccatgcgtgtagatccttttccttagtatctatgatacttcattgtttaagatagagttacttagacatgttgtagcagcctctccatgtttgcttttacttaaacgtttaccatatgatgaattgcattagaatcgtctgtcttagattgtaggttgtattctttaccaaaaccgaaatctttttcagatatcatagagctctcatgtgtctgtactcatttgcctctaagttggactctaatcaaaatcctcaaaaagctctgaaccaatctgaaattatgcaactcttactaccatttacgacttagcagtccaatacatggttatcaaactgaaaagctgtgttgttggtttatcagatattctatatgactcatggtcaccagcaatgacagtgaattcagtctgcatcagcattctttcgatgctatcaagttcacccgcaaaggttctttcttcttcttcgtgtttccctattgacaagttacccaaagtactgtgaattatgaggtctgaaactaagaatatcaatgtgttttttattccgccttattgcagcaacgccctgcggataacgatcgttatgtgaagaactgtaagaatgggaggtctcctaaggagacgaggtggtggttccatgacgacaaggtttgatgcacgaccaagattaaagagaagccttaatatgttaatgatgacatttaaaaatgtcaaaacctaactttttgtctcactcttactatggaatatgtcaagtgaagagctctgaattacataagagaacactgagagcgggaatctatatttcgtactgaacatgtccacaaaaagatcaattaatgctaaacaataagttgtcattaatgccaatagttattacacaaatgtttttttcatccaaatgtctctaaaaatgtatatatacatttattaggatttttgattttctgatttgggtctgtctattcaataaatttcctctctggtggagaggtgactgtcaccaacttcttccctaagcctaagggaaagatttgttagagttgagccgaatatttctctctcgccaaatatggtaaactgaggcttggtacgctaatttgagaatgaaagccacctttttatcccggcaaggatgtctaagccatcttgcactatctttaaacatccttggaggggtaacacgtgcgttagagcagaaaaacgaccatacctcgtgcgagaaaggacaatcaaagaacacatgctgccttgtctcatcaagcgcattgcagagcaggcaaagtgaagggacctgaatcccccaactaataaacctatcacaaatatgcaaacgatttctattggccacccaaacaatgaaagcatgaggggaaatatttcaagagaaccacacctaatcataccagtccactttaggaccagtagggtggagatggtgccaagtatcacaggaccaaaagttgtttaaaattgatcacctctaaaactcaattgatggagtttcaagatattttcaaaattgatcacctctaaatattctcaccaatctacttcaataaaaaaatatttattaaaataacaatgggaagaaactccatatacagttacatcgatgaaaaatcagaactaacaaataaacaaaactatgaaaaaaaataagaaagaagagacttttaactagtaattagttagcaaatcttaaaccaatcgaaaacgaaagtagcatatggttgagtagatgacacagacgcttagtggtgtcttaaaatgtctaaccaccttgtgagacgctctaaaggtgacaactttggaacattgagtgttgttccgaccacgacttggagcttaagaccagccccacagtgacccggttctgagctaatgaaataatggattcctggtttggtgagcttgatgatatcgtggcctgtcttatgcacggctattggagaagtcgggtcgcagtttaagaattcaaggtcaccgctgatctcgtagacaccgttgacttcattgttgtattcgaaaaggagaccgtctccgacattgaactgtttctctttactccagttgtaatagaaatcactgtcgtaaacgccccaacttttggagtcaccaaccttgtagacatgtctagaaggaataatcttgctcggtagtggtagaggactcggactcgacgggtcatggacgacaaaaacgccaagcctctgtcccgatgtacattgagtatggtttgaggtgatgaagtagtaagaccctggttccgtgaaggttacgacatcatgtcctgtgttgtagacggctttaggaaaagaagagtcgcagaattcgtattccaaaccaccggagacttgtgtgacgtcattgaggttgtgatcgtattcgaagatcaaagaatctcccacgtggatctctttatcctcggtccaatggtaatagaggtggtccttggcagtccatccatcggagtctcccactttgtagacggtggccgaacaacaaccgaagagaagtgtaaatatcacaatcacgaagctgaagatcttcttcattcttgctgtggccatgattcgttggtatacacaaaacaaaaaggaaggaagaaagatgaacaaaagctgagaggcgaagaagaaaaaggttatgagatattgaagaggctgaatcaaagagagagagagttgtgttgttgttgaacgatataatgagttgtgaagagatgacctaacctatcattgtttatagggtaaattgcacacagtagccattgatccacttttaatttcagattttgacaaagtgggcagggcctttcagctattagccattaagccaaaaactgaccaaaatgcccctgacgacctgacgaaactgaacccggtttgtacgtacggaccgcgtcgttggaatccaaaagaaccgggttcgtacgtacgctgttcatcgacgagaaatgcattaaatgatttctgggtttcggcgaagttgacacttgagattggaataaaaaaaatttaaaattcgttgggctcagaagtttttaatgctaaatagttttgacaagactaaaactcatgattacctattataatagagattatattgtaagatattttgataatttagattagaattctgggtaaaaaacgtaaatcgaaattctgttaaggtgaagaaacgaaaatcgaaattgtgttacggtgaagaatctgaagttttcagttgctgttttacaaagtttgaaggattgaaggggagacaatctgtgttctgggtaagaaattcgtgttaatcctaattacacttgagaacgtgatttgaatgatacgtttttaaaaatttctgggttcatacattgttttgttggagattctatttgtatttgtagatataaatgaaagctctatgttttgtttagttaaatttataagtacataaattgttttgttaagattctttttgtcttcgttgacataaatgaaatccttcaaaaaagatctgatttttttttatttaatgttggtctgacctgagaaatttatgttgcaggtatggagttacctgtattaattatggttggtgagtggatatacaaagaagaaggttggaaatttgaagctgaaaaaggaagtttcggacgctgtgtacgtattatagacacaacgacgtacacggatttggcaagtacaatatgtgatgttttcagctataagtttagtgaatggaaccctataataagttactggatgcctggaaagatgtctgatatgataacaagtaatcgccctccagtatatattgagaatcaaatcagcctggatacatttatgttgattcgtaatggcgatccttttgttaacttgtttgtgtctttttaccctatcggcaatggaggcaatacagagacagaggttacaaatgttgatgcagctcataatggttacgaagatataaatgtagatgaggaggatgacatagatgaaggtgatgaggatgaacatgaggatgaggataatgaagaggacgaagatatggatgtacatgacgatgacaccgatggtgaaagccgtggaagtacactcgaccctacagtagactttagtgaaggtagtagcgaagaatacgattacaataaatggggtgacatgaatgtggaacaatatggaaatggtcatgttgaggagggcgtcgtgaatgacactcaacataccgtggaacccccaggggaattcactcgtctattggcatcgtgtacgtcgacgggtacacatgtacctcatgtagaacccactggtgttttggttgactgtacaccaacctctgctccatccccgacgtgtcaacatggtttgtaccaatgtacgtacactagagtctgtgcagaggagacaagatgcgaaagtgaattagttgagcacacggatgatatagctgagaacgtaactggagatgatggtatagtcgtcctagaaggggtttctgcaagtgggttaaatattgaatctgacgacggtctagtgacaacaggtgaagcctacgaagtgtataaagggttttctacattgcataatgctgagaatgagttgctcgatactgatgcggatcctgtattcgatgatttagccaatgttcgagtcgatgtgacagaagttgaattgagtacgtcaggtcatccgttgtatgtgggaagtgttttcaaaaacaagcaagtcatacagcagaccatgcgacttgttgcaatcaaaaagtgcttccgctacaaacaaactcggtcatgccctaaaagattagagatgttctgcgtagatcgcaattgttcgtggcatttgactgcacatgtcatacccaattccaaatgtttcaaaatcacagggtatgattccatccatgtttgcaagatcgacactcgaaaggattatcgtaaacatgcaacttacaagcttttaggcgaggttatgaagaatagatatagttcttcgcaacggggtcctagagctgtagatttgcctcgattggtcttaaatgaccttaacgttcggatctcatattcttcagcatggagagctagagaggttgcagtaaactctataaggggtgatgatatggctagttacaggtttttacctacatatctgtatcttttacaattagcaaatcccggtacaatctgtcatctccactccactcctgaagataaaggtcgccagcgcttcaaatatgtattcgtttctctctcggcgtctataaaaggttggaaatatatgaggaaagtcgttgttgtagacggaacccagctagtcggtcgttacaaatgatgcctccttatagcatgtgcacaagacgggaacttccaaatttttccattagcttttggggttgttgacggcgagaccgatgcttcatggatttggttctttgagaaattatcagagattgttccagatactgacgatttgatgattgtctcggacaggcattcttccatatataaaggcgttagtgtggtgtacccgaaagccaatcatggagcatgtatagtacacctggagcgaaacatatcggtgtcttacgcaaggtacggtgtgtctggtttattctttagcgccgctaaagcgtatcgggttagagattttgaaaaatactttgaagagttaagaggtcggagccccggatgcgcaaagtatttagaggatgttggatttgagcattggactagggcatactgcaaaggggagcggtacaatatcatgacgagcaacaactccgaggcaatgaacaatgtcttaagcaaggcaaaagcctatccaattgtctatatgctagagttcatccgagaggtcatcatgcgatggtttgcagcaaggcggaaaaaagtgtcgaagtgtaactctttggtcaccccggaggtagatgaacgtttccttcaagacttgcctgcgtcaggaaagttctcagtcatgatgtctgggccttggagttatcaagttacttcaaagactggtgagcattttcacgttgtcctagatgagtgtacgtgtacttgtcttaggtacacaattttaagaaccccatgcgagcatgctctagctgctgcaatacattttggcatcaacccgaaggctgttgttggattgtggtatagccttcaagtgttttctgattctttccaagaacccgttttacctataccggacccaaaagacgttgttattcctcaagagttatcggacatgattctcatacctccacgcagcagacgaccacctgggagaccacccaccaagaggataccatctactggggaaaaccgggtaagattttcccccatcctcacttctatgcaatttttccttccttttaggcgccttaccattttttaactttcagaaaaagaggcagaaaagactcattcctaatcagtgtacaagatgtcggcaaacggggcataacaagaagacatgcaaaaaccctatttaggcctcgcgatggttagagtttacgtctccgtgcttttggaagctgttctacgtacgtttttggaaatcttttgatcagtctatgtagtaatatgacatattattttgtctgtacgttaccttatgtacgtacgtaagtggacctcgtattatcggtgtatttgattatccttcaactttttgtcaatcccgttgttttctgtacgtacttttggtaaacgttttcatttgtacgtatattgggtacttctaattatacagagttgacggttacatttttttgctatactgttacatcaatttgggaccaatcatcgcgtctttctaaaatctatttaagaaactggtgataacacccttaattcatttaaacaaaattccacacccatcacacacataagacagaaagtcggtcattttggtttttgttattgtcatcatggatgatggatatcatgccatttccgaactttgtcccatgatcacaggatggagtatacgcgcttttgtggtcagggtgtttcaaaaatgcgtgggcataaatgagttcgacctgggtctcatcttggcagataatcgagtaatatttcgtcaacgtctttctaacgtttttactttcacataccgtacatgtccctaatcatgatgatttgttgtagggaatgcgttcccgcatagagactaccattaatcgttgccttgcttcattttactctgaccgtatccgagaaaatgagtggatagttatcaatactttctcagttcgtctccacaacgagggaatacacgcaacgtcccatgactaccggatctgttttatggatcagaccattgttaccaaagtatcgggattgcctgcaataccgtattatgattttactccttttgactacatcatcgagaggacagtttctaccagagtgttagtcggttagtatatttgactgtctattcatttttgtaaatatgtacgtacacataatgcttttatcttccattacgtacactagatgttattggtgcgctcattgaggttggcaacttgaccgaagactaccgtggacggaagcttccttttaagataatggataaacagtaagttgtttatttttaattatttagggtttagggtttgttatatcctgtgtataatatatattctctgtagcaaggaagttcttcaatgtgaagcacaaaatgaccaagctttcgaatttcaaagattcttccagcggctaactggtcctcaaaacattatcgcactcgtatcctggcgtctaaccgggattcataaactgaaggctgtgaccaatggccccatctccaaagtcattgctaatccggatataccggaagtggaagaaatcagagtcgtcgtctattagttaattattgtttcttttattctaaataactacagatttgtaaccgaatttaaacatatccctacttttatgctaaagttttaccttctaattgctacagtttacttattacaaatacagcctaattgtaatgactttccatggacgtacaattatgtttttgtacgttcaaataggtgtactagatgtataatgtaaacaaacttagttccattcataagataaacaataaaacaaggaaataaaaaaacgttaaaataagagtaggaaatacaaagcataacaacaaaccgagtagagcatacaaccatgttaataaagccgaagcatataacaggaaaacatatgctttacaaacaacacgaaattatagccgatgcatagaatgggaaatcagatgctgaacgaacgcctttccttaataaaatatgcacaactccctagcataccagtagaagaagcaattgcggcagcaggctccgtagctgcaacgacccaagcagtctggtgaaaccacgaacctccatgaacgattccacaaacgagttccttcagcatgcagtcgacttatgtgatacataaccaactcccccactgtgtttgcagcttcgaatgatggcactaaatcccagaaagtcgcgttcacggcttcaacctctcgtccgttgccagttgcggtgaggaacagaccatgagagaaacatgcgtaagcgtcgatgggcgagatagaactcaacatggttaaaccatgagcaaccgtaacgaaattgcaagctaaacgaaccccttcaaggtaaatcgccggccttgctccacgttcaagcaggagggtgaaatatgttcggaaaggtgtttccggcaacacgaaatcaggccacgtcataaactcatccatgttgatagcggtcggctccagcgtgctaacgagacctctgagtgtttcaatgggagttacggaaacgggtaagtagttgacgaggatgctgagtgggttaggtagctgaatggccagtaaatttccgccggtgggggtgtggggacgtccattgccgagactgagggatttatttgtgagtttaggttatatatggcgtagtaagagcaatgaaaagtgtggagaagatgacttgtcgaggagtacatgttatatagaccaaatggcgaggagacaactaattaaatgtttcacgtcccacttacatattgtaggtggtattaatattggacattaactcgtgtttacatgaaaatagtaaactataaactatttccgattaaaaccgaaacttcaaattacaattttcgagtttattggtttatgtacgttcagatttacacgtgtacgtctatattgaaatttgtatttattatgcctggccacgtctatcacaaaactgtctttttgcgtcaatccaatcatgtttattcctacatttatagtaactttaaagttataatgtaagtacagaaagaagtatggattacgaaacttcaaatttattgcttacatccgaataaacccttaaaccgataaaccttgtaaaccagaggttaagcacaaattgaaacataactttatagaagcattacaagaacttgaacaacttcacgcatagaggataaaacgaaatagaaacataacggcattagaagaactaggaacataacttagacgataacattaaatcacaacttcaaataactagtagatttatatgactagagcatttggctaactcgcctagcacaccaccagaggtaacaacagttacacacgttcttgaacggtccagatacaatgtagcaaagcaaggcgcaatctggagttttaataccatggctgttaggataagagaacgtcgatccgtaagtattattatatggagggcgaaacttctttaaatcctccaggaactcctcacacaaatcccgtgtctcttctgtccccaaaggataatgattgcgtccaaataggtttagaaaaatggctcccatgtaatcattcccgtcaattatgtaaagtatcgcacaagcaagtgtagcatgggcttgtgatggaacatgaggtcgtaagaggttgatggctcccttaatgtcacgttcatgcgttaaaacacgaagagcttcaaaatacatggcagtcggattgccagcatccacacacattttgaaaaaggctcgatgtcggccttcttcttgtgggccggatggatgatggctgccatcaacttggtagtcgtcgggatcctcacacatgctaaaaatattagcacctttcaggacatccggacggtaaacaacatctctgccacgtctgcctgaccgtagtagtggctgaaggtcccaccagcatttgtgcgccactgtcttagcaatctttgcgagtaaatcgtcaggaatagttgggttgaccatgttagaaatgagatactccgaagaggtcagatcattgtccttttaataaccgaggagggagggtaacggatggggagatagcgtttacaataaatttgccaataaatgtacgtatagagtaacagtgtacgtacatttataattctcatatttgcggtataatccgaaggaaatttatattaaataattgatatatgtacgtctaataaggagttacacgtgtacgtatagagtaacagtgtacgtacatatataattctcatatttgcggtctaatccgaaggaaatttatattaaataattgatatatgtacgtctaataaggagttacacgtatacgtatagagtaacagtgtacgtacatatataattctcatatttgcggtctaatccgaaggaaatttatattaaataattgatatatgtacgtctaataaggagttacacgtgtacgtatatttccaataagactaaagttcttgcaattatgacaagtgggagtgtatttattaattaacgcatggcacgtcaattgaataagactgacattcttattcaattcactgacatatatccttacatttactattacatttatagttagaatataggtacttgttataatgtaagtacttgttagaatgcaagtacacctaccagtttagtttgacaacacaaatatattattcatgacagatagaaccaaaccgcatgaaaaagacacagaagttgtaaataggaatttaaaggaaacggaaacaaaacaacataataggcgcattgtggatgaagcaaaaacaaaatacataggaccaaacccctaacaaacttgaaacacgtgacagtgtacgtacaccaaacacacgtacaaatgagagacctagagaattcggctaattcgcctagcacacgaccataggtaacacttgttgcaaacgttctggtatgcaccagaaaccatgaaacaatggtaggcgcattgtggcattttaattccatggctgctgggataacagaacgaacgagcgtaagtattattgtacggcgggttaaacttgtttatctcctcgaagaactcctcacacaaatctcgtgtgaaatcggaatccaatggatgatggttgcgtgtgtagaggtccagaaacaacccacccatataatcataccccgcacatatgaatatgatggcgcaggcgatggttgcatctgctcggacgggtgcatgacgctgcatgagcttaagtgctccattgatgtcagtttcatgaattagaacacgtattgcttcgttatacacagccgtcggattgttagcgagaaggcaccttttgaaaaatagtcgattgcggccttctccttggggtccggttggattatggccacctcctacttggaaatcatcgggaacacggcacaagctgtagatgttagcgtctttaaggacatccggtcggtagacaatgtctcttccacgagtgccggatcgtatcagtggcttaaggtccaactagcttttgtctgccactttcttagctatcatagcgagcaagtcgtctgaaatagtgggattgaccatcttagaaatgagatactccgaagaggtcaaattcttcctctcatttaataaccacggatggagatattgttggggaaattacagttacattgaatgacaaatttaattttacattgatggatgtcaaatcaatggtaccgcttgtatacacaacagtcgtgtaatgtgtacacgtggacacgtagtttgtacgtactttggtcagatatcttgtttttgtacgttgttaattactacataaaatgttgcatagcatacaaaagtaataaattgtttagaaaacaaacaagtaaatgtaaacacaacaaaacacaagttccaaaaggcatacaaaacacataagtttgcttcagttgcaacttcgaataactaggttaatggcccaattccatgctcgtagagctcgactgcgtaacccttacggaagttgtacatatcatcttcttcaatcgaaaacctgtcctcaacaggagtgttaagcatgtacaactcaataaacttcatcgcgtacggaccgcaatctccggtagttggattctgtggtagacgttgattccttatgtatgtaaaaggagtcacgggataaggcttatcgagataatctttgcatgtcgctctgactaggtacggtagcatctccattattggaaggatacgtgacctaaccacagactcccgcgtaagcgaacgcaaaggatccatgatttcaataacacgacgttgcaggcatatagccaacccaacccaatgcttctcagctttccagttcatgggaacaaatatgatgtccacatctctgatccaatgcagctgtggttcacgattaaggcattctcccttgggaaaccgtgtgagaagtttgtcccatttgaaagtgtcgggtttacgacaggatctgaatgcattggcacagcttgacagaaggaaagtgagtctgggatccacaacgacataccgatttctcttcatatgctccccgttcttatgccacatcaagagtgccatcatttccatgtgctgaaaagtacataaaagtatgatgttatgtacgtactttcaaaaacatattattacatatacgtacaattacaacagtgtacgtaattaatggtcacttacgtatgagccaacccaatcattagcctcggctagagtagtgaagaattcgttgtccactttccgaaagccgaaaagagtatggcacctgaaattagtaagacatatgaaatagttaggattgatataagattgacaaacaatcagataattgtgtgaatgcacagatgcataccttttttctccttgagttatagtacataatttctggaatttagcttcgtcaaccttctccaaaggattgtacaacgaatcgccagccttaaccaaaacctccgggcctgcctctctctcctcaacaaatgttacatcaggatcttttttatcatcatttttggtgtcatcggagaaggtaactctccgtcttacacttttcttctctttctcattgacgggagcaacgattgcttcagttttagagacacccgcttcgacaacatcgtcctcctttcctgtctgcaagcacaaaatcatataattagattggtcatggaaacaggtacaagagtacgtacactatatgcccgtctagttgaaatattaataggtacacgggataatatactgacctcttcggggatggcaaccttttcagatactttttcttcgagaacatcgtctttcaattgagtaagcacctaatgaaaacaatttaacaaacttcaaattataactccgacagtaatgttattaatagttagctaataaattacctcttcagggacggcaaccttctcaggaattttagatacattttctgcgagaatatcgtccttcaattgagtaagcacctaatgaaaacaatataacaaacatcaaatgatatctccgactttaatgttatagttagttaggaacttaccttgctaacaactacggttggtgaagacgggtcactgagattcgcttcataattaaaatcccctacagtcgtcggagaaacaaatccaggtaacgcagtgtccttcatatttagtaaccaaataattggttatatctctaattggcaaataagcgttacaaagagcaaaatagtaacacatacctccaaggcttcatctacaacggttggagatttatcctccttcaaagcttcctctccttccccacaaattgtttcagcctgacctcattatatggagatggatggccattgtattagtcaaactcacagcaaaacattcaaaggtgcgaaacagatttcaaaaacattgtacgtacactgggattgccatcttctgtaacttcaaaagcaaattcttgcctaaccttgacctccggtgactgtggctcctccaactgttgtgactcaggagcaacaacttcttcttcaggattaccaccaagtcctttctgaacgtcctatacaaatgcaaagcatacaaattagaaataatatgtacgtacacaaaaattagtagtacgtaccctgtacctgatgggacgaggaagatacatcatctgacattttctcaagggctgggtcagacagtattgggtcaggcaagagttgttcaaagttaccaccatcaggaatgccatgttcgggctgttatgtcaaaagtaagaacattaagaacataaaatattttgtacatacaataatgaaataataagaacacaagttacctggtgagatggtgatggaacacgatcgacattgtcttccattacagagtcagatacattttggtgtaactttgaagaatcttcttcaatctccgagttccctccttcctccttcgaaatcaaaaccatacaattggtcagtaatatttctttttgtacgtataataaggcataaattataacatgactattacacaagtgagttacctcttcagttgatgatgctccacccaaatatatgttttccatatcatagtcagagacggtctgttttgctgaaacttcgccatccccatcattgcctggtacctcctgtgaataaacaccaatataacgcattcctaagtatttggttgtacgtacacataataaaaaccttttttcgattgtatttacacaaggtacatgctgtagacgtacctcgacaggaagactaccagttgcagccttcttgggagtattgttcaacctggaagatcttcttggaacaaattttcttggtttggtggatttctttacagattttctctgtacctgttcagctgccttctcaactcttttgttcgccttctcaacccttttgttcaccttctcaacagttttggtcaccctctcaaccttctcagatggtgaatcagatttgtgagatgatcgtgggccttcttcctttcggtcctgggactgtagagcagcacgtatctcttcacggacaaatacttttaaatcttcaaactttttatccaaaagttgtgtttgcctcttgaagaaactcctcaattcgcccgcatacttatcgaacgcttcgtctccaacttcaccatcagcaccattgggtccaccttcaccatcagcaccattgggtccaccttcaccatcaccaccacttggtccaccttcaccatcaccaccacttggtccaccttcaccatcaccaccacttggtccaccttcaccatcaccaccactgggtccaccttcaccatcatcagagtgactaattttcctttttttgttttcaacaggatctgacacccgtctttgcctcttcaaaataactatattaaacggttaaatcatgcattactactcttagaggaacctaattctgatataagttatacgatgaaaagatatggttacctctctctccagttgctgagggccggacttgcttcttaggcgcatcatcgcctccaacccacattttttcattccactcctgctcagatttcaacatccttaaaatgttatcaactcttgggtcctctttttctttcctccatacaaaagattttgggcaattactgtctgctgggtccacaatatatgtgatatccacctacatagacgatcattgttaatttcagagtgtatgtacttcatttttttataccaatgtacgtacaacaacaactgcacaaacctgttcagcagactcgcacgccaatatggtggatgtcttgattggacgcaatttggaaaggtttttaatagtcctctctgtaaacacggcggtatctccttcagaaggtaggagactagcaatagacggtatagttgcgaatgcaaggagttggagtccaagtgggaagccatggagtgcataagaatgttgcttgcaaccactccggagttttttaacgtcggtgtctcctttgaaacttgcgatacgctccaaagtaagcagaaatgatgtccttccccagggatatttacagaagaaatcaaggttcttcgtcagctcaactgtcatctcatttggtctcaaaggaggagacttgtcacatattagcacaccatccacaatgataattagggcgagagctaatttcttccatgcaggcatgtcagtttcagaaatcaatctatcccttaattcttcaactgttggcttagctttatcatctccaaacagagtagcccacactgtattttcaccttcctcacgctgcataacactttctacatccttatctttaggataggttccacattccaaaccagttataagtgcccattctcttaatccgagcctaataggatgaccagcgaataccatccacatctcataacgtttatttgtaactaactgacggcatattaatccaagaacaagtttaccagaaaaggatgccttgttagtagggatcctaaagaggtcaccaaatggagaatctagaaggaacgtcatttctggtgtgtccttaagcgcagctgctatttgaccaatgtactccgctctggagtacgcatttatcttcgccttgctagggtagtgatcgagtgcaaacaacctctgtggtaattcacccggatcattagaagtacttcctgaaagttgagcaagacgaagaagttcttaacacgtacactatatccaaataccaactaaacataaactcgattttcatatacacgtacaccgaaaccttttatactcaatcaactgtttttggcggaaaaaaacaaaatccctttgtcaattgaaaatttatgagttgaaatctctaaaattaacctagattttgaatcaatcattctccaaacgaagttagggaaaactaacccagatttgtcgtcgccgccgatgcctcatcaatatccgaaactcctcgccgccgactactcttcctcgtcgccgccattagagctcttctatgaacagttaatcgataaacccaaaaagcgtattattgttccacactttaacacgaaccctatcgaaattttctccactttagcaacgactagaactcgaacagagcctcaatcggaattgtgattcagttttgtcggaatttctctggttcttcgaaaccactcttcgtttcgacggaactgttctgctttctcgaagaagacagtttttgatttattttcagttttaaaattaataattttaaatatttaaattattttgaaaccagaaaacggttaaggaaactgaaccggttccacgaaacgaaaccgcctccgtcagtttctcgttggagggcaaattcggccattttgggcctaatggctaaaacgtggttgacccagcccactttgcctatttgtgaaagaaaaagtcacaagggtgttataacgtgaaattttcttttgtttatataatgctttgtgaaccctaatccctttatgattttgttttgtttatttccttttttccagatttaccgaagattcggattaagattatttttggttagatttatcttttcttattcttattaattaatttaatataaacaattatcctatttttcaccactgatttaaacaaaaataaaaaaaaatactttcaactgaaaaattgtattattttctaaaatattgaaatttacactacaataaagagcaagtacgtttaaatacatacaaactagaatatcaacaaagaatttaatatttgatcaatatatttgcaagttaattttgaaaaatatcacattgaaatatatatatatatatatatatatatatatatatatataaataaataaatggcgagtttatatagtaaacatgagtgtaagggaaatatatgaaaattggtttcatggatttctttgaaagaaaaaaaaaaattgagaattacataaatcttgctaaccaaatattattttttttaacaaaaagagtatttaaactttaactttgaacaaaccctagctccccggaaaataagccgtcgccgttttcatcttcttctccatggagagttctagcaaggaatcggccgccaaagttgttcgattgggtaagcgaaagccggaagctgatttggagaccaaaccttttctcaggaaacataaggaaacgtctgaggagaaggagacaacggaaggatttgcttgtagtcttgagcaacaagataatctaatctcagcgaaggctgtttccgtaacgctctttgtatccgagctctctaggcaaacaaaaatttcagatatcatcgatttcttcagtgatgttggagaagttgttaatgttcgaatttgcttaagccacacgggaagctgttgcgttctggctttgttgagttttcttctgctagtgaggcaaacaaggcactggaaaagaagaatggtgaatatttgcacgatcaagagatttctcttaaagttgctcagacaagtccataccgtccaatcaagttttgcatcgagcacaaggtttggaaccaagactcctttcaactagatagccttgtcatcgaagaagatgagacacctcctgattttgttgacgaagtagtcattgtttccaatctctctcccctaactaaaatagcacatatcaaaggtttcttcaatggtgttgcacaagttgttagcgttcgacttgttgtaaaccacgagggtaagcatgtgggctatggatttgttgagtttgcttctgcttacggagcaaacaaggctctggaagagaaaaatggtgaatatctgcacaatcataagattctgttgatgaaaggacatgaatctcctggttttgctgaggaagctgccataacaaaaacgctctttgttgccaatctccgtgactccattcagatatcagatatcatcaatttcttcaaagatgttggagaagttgttcatgttcgacttattgtaaacagccagggaaagcatgcgggctggggttttgttgagtttgcttctgctaacgaagcagagaaggcgctggtaaagaacggtgaatatttgcacaattacaagatttctcttgacggagctaagacagctccacaccgtccacccaagttttgcctagatcacaaggtttggtacgaagactaccttcgaagagagagccttctcattaaagaagttgagggagtggaaggacttgatgaaactcctgattttcttgaggaagttgctgcaagaaaaaatacagtttttgtcgccaatctcccttacaactgtcgtctaatagtaccaactatcatcaatttcttcagtgatgttggagaaattgttcatattcgaattattgtagaccacatgggtgagcctgtgggctgtggctttgtggagtttaattcttccaacgaagcagagaaggcgctgcaaaagaagactggtaagatttctgttgacgtggctgagatagcttcataccctgttggacccaagtacaacgttgctaagaagctttggtacgaagacaaccttcgacgaggaatgcttctgaggaccaaaccggatctgaagaaaccttcactgatgagtttatgctgcggtcagagggttacccttctctgatagaagaagaaagattttaagctctttggtgtgatagaatgtgcaactctttttgttattagttcggctttatattatgggatcctggttaagtttttgtctgaacgtaaccttaagctaagatatgcttacttttgaatgtcttggtgttaaatcactatataccttcattattacctaaacgtataaaaaaaactttaactttgtcgaaatcgctgctaaccacataggtattaagttctaaccgaaacaaaaccaaaaaccgatccataatcctttggttcggttcggttagggtttatgagacagaagctaaaaagacaccatttttagctttggaagataaacagagaagaagcttaacacagagaagtgcgcgggaatggcgagagtttgtcttccttgttctttccttcgtacctctactctctcgattctcttccgttcaccgattctctccacaaccgccgcaatttcattttgctcgtcgtcggagttcgccgactctgtagccaaggatgattcaaaacgcgtaaaaattcactcatctctgtttctggatcaaattcgattacggttttagggtttcttacaatttagctgctttcagggtcctctcaagcctgggctttacctcgtcggaactccaatcggaaacctcgaagatatcactttacggtactcttcaatatctaagcttctttgcattgtttgaaatgtgttctgatttctaatgcttagaatttgttagtgcgattcgtgtattgagatctgcggatgtgatactctctgaggatacaagacactctgggaagttgctacagtattacaatattaaagctcagcttgtaagttacttgtatatggaaagtagtagtagtagtctctttggtttttatcatgtgatggttttgaatttatgaggtttaggtttgtagcttagttatcacaagttcaacgaggctcagagagaacaagcggtgttgacacggttgaaacaaggagagattgttgcacttatcagcgatgctggcacaccgggaattagtgatcccggtactcaacttgtgagtgcatattatagcttctcctttgagcttttttccaggctagttttgtttataatcaacttacttactagtgtgttacacatagtctgaaaatgttctctagtcacttataagctgaagagtatgagaaacaagtgctatcatctttcctcaggctaaaatgtgtgcgaaagaaaatatagatgtgattccaatccctggggcttgtgctgtagttgctgctctttctgcatctggtttggagacagatgagttcacattcggtaacttcttctccgatttaccggtcaacctgatgcgaacctggctttatataaagtttataatttctgaactactttgtttttaatacagttggatttcttcctaagcattctggaacaaggaaggagaggctgattgtttcatcaaatgagacaagaacacagatcttttatgttccccctcataagttgtcacagtttcttgaagaaacaaccccttactttggtgaatcaaggtttgttgcatgtttcaagcaagttatgttaacatctgctggattgatatctatgtacatccactttcttttctctcttgttccttattgttgatatttgatgaattaagcctctctcaatgcgatatcttttatcttctagtgttacgacttagaagcagtcccatgcctggtcctgacatagatttatggtgcaggcaatgtgtaatagctcgagagattacaaagctgcatgaagaggtaacatcctttatcactttatatgtaacgtgtgttagtaatacatgaaactttatggtaaaccccccactgatgagagatgctcttctactatagttttggaggggttcgatagcggaagccaagcaagagtttctgatccgccaaccaaaaggagaaatcacgcttttgatagaaggaaaggaagaaaccaaagctgaaaatccaacagagtctcaacttgaagaagagttgagaggcctgatctctgatgggcatagcctttccacggtaaccattttgatttgagaacttactcttcttggaaactaagcttcaattaccatacgttacagatatagaattgaacttagactgttcagttcatagatattgatcgatatgtgacttaatgacttaatgattccggatttaacatcaaactttatcaggcggtgaaaacggttgcagaaagaacatcaatgagaaagaaagaagtatattctctggcattgaagaaattcgggaagcagattcgggtagaagaagaagatgaagctgatgagtaaaatgagaggatattgccatgtcaaagcttttgcttcaaactcattgatgtcatgttgtaaaactgttgcgttaagtctcacacctcaaagctcttgagctttggatcttgatttggtgaatttagagtatagtaagagttagtacctccagattgttttagtattcacttggttaggtttggtgctgataaaaattttagctaccaaaatggatactcattagaaaccaaactggtagcgtttgttatatgttaaaataaattattgagaaacaggatcttacattttctctaatttagtgagagtttttttagtaattgacaattattcaaattattatatgaatcaccgaaaatactattagaagtaataatagattttagttagtatatacttaggctatacttgtgaataatagaagtggttaagggctcggtatagtccggtttattcatctaaggtgaatctcttggttatttctggtttagtagagtctgtatactatacatgattgtaataaactctttggatcattaatgagaaattgagctttcaccatgttttccctctcgttcatggttcctattatggtatcagagcattttctgctcttgcttctctgatttctcatcgatttctcattgttttcttcgtttttcaccgttaaagtgttgaatctatcctggatttgtgttgatttgagctctagctgatcagaatcacctcctgaagcttcgattcaagttccgttaacacatttgagcttcgatctctctatccatggtgaaacagaagaagaaagcgcagaatcggagttcttctccaacatctgagtattcaccgatgaagactcgagctggttcttcatatccagttgccgatgacatcgttgaacctccgtctctcaaaattacggctaatcgcgatcgttttcaatcacattccgcagcgattgaatcatacgacaatgctcatagtccgttcttccttcactcatcagatcatctaggtctgaatattgtttctcatgttcttgatggaacgagttacaacaattggtctatagctatgcgaatgagtttagatgcaaagaataagttgagctttgttgatggatctcttcctaggcctgatgttagtgatcgtatgttcaggatctggagtagatgcaatagtatggttaaaacttggttattgaatgtggtgagtaaggagatttatgatagcatactgtattatgaagatgcagttgaaatgtggaatgatctattctcaaggttcagagtgagtaatcttccaaggaagtatcagcttgaacagtcaattcatactctgaaacagagaaatctggatttatccacttattacacgaagaagaagacactttgggtacagctggctaacactagagttctcacagtgaggaagtgtaattgtgaccatgttaaggaattgctcgaagaggctgagactagcagaatcattcagtttcttatggggttgaatgataactttgctcacattaggggacagattctgaacatgaaaccacgtccaggcttaactgagatatacaatatgcttgatcaagatgagagtcagcgtctagttggaagtactcccttatcaaatctgactgctgcctttcaagttcaagcttctcctgttattgattctcaagttaatatggctcaaggttcatacaagaaacctaagtgttctttctgcaacaagcttggtcatttggtagacaaatgctataagaagcatggttatccacctggttccaaatggactaaagcgcagactattggttctaccaatcttgcaagtactcagctccagccggtgaatgagacaccgagtgagaagacagattcttgtgaagagttctcgactgatcaaatccagactatgatttcttatcttagtactaagcttcacactgcatctatctcacccatgccgataacatcttctgcttcgacttctgcaagtccctccgtacctatgatctcacagatctcaagtacattcctgtcactattctcaaatgcctattatgacatgcttatttcttctatatctcaagaaccggctgtgtctcctagagcttgggtaatagattcaggagccattcaccatgttacacacaatagagacctatatctagaattcaggatcttagaaaatacctttgttagactcccaaatgattgtactgttaagatagcaggcatagggttcattcaactgtctgatgcaatctctctccacaatgtgcttatattcctgaatttaaattcaatttgatcagtgttagtgttctcacaaaatctttaaaaacaaaagttagttttacgtctgatgaatgttttgttcaggaacttacaaaggagttgatgattggtagaggtagtcaagttgggaatctttatgttctggattcaatgaaaataatcatactgtgtctttaaaaggtaccaattctatgagtcctgagttttctatttgctcgtctgttgttgttgattctattacatggcataagagattaggttatcctgcttattctaagatagatttgttgtctgatgtattgaatcttaaagataaaaagataaataaagaacattcaccagtttgtcgtgtttgtcatttgtcaaaacaaaaacatttatcttttcaatctagacaaaacatgtgtaaggctgcatttgatttggttcatattgatacttggggacctttctatgtccttactaaagatggttttagatatttcctcactattgttgatgattttagtagagccacttggaattatttgctaaagaacaaatcagatgttttgcatgcttttccgactttcattaatatggttcacactcaatatcagactaagctaaaatcagttagatcagacaatgcacatgaattgaaatttactgatttgtttgctgcacatggtattgttgcatatcattcatgtcctgaaactcctgaacaaaattctgtggtagagagaaagcatcaacacatcttgaatgttgctagagccttactgttttagaattttggggagattatgtattaaccgcagtgtttctaatcaataaattacctacccatgtcttatataataagtctccttatgagaagcttaagaacatacctcctacttatgaatctttaaagacctttggttgtttgtgttatagttcatcttctcctaaacatagacataagtttgagcctagggctagagcctgtgtctttctaggatatcctctaggttacaaagggtataagctattagatatagagacacatgccgtttctatttcaagacatgtcattttccatgaggatattttttctttcatatcatccactatcaaggatgatatcaaagagttatttcctctattacagttccctgctaaacccgatgatttgcctcttgagcaaacatcactctctgatgcacatccacatcaagatgtgtcatcctccaaggctttggttcctttcgatccacagtctaaaagacaaaagaaacccccaaaacactttcaggattttcattgttataataatactagtactatcttatatcccataaaagactatatctcttattcatatatagttgagccttttcatgcctttattaacaatatcacaaatgcggtagtcccacaaagatattcagaagctaaagattttaaggcatggtgtgatgcgatgaaagaggagattggtgctatgattcagactaatacctggagtgtggtaagtcttcctcctaataagaaagctattggttgtaaatgggtcttcactatcaaacacaatgcagatggaagtatagagagatacaaggcacgtttggttgcaaaagggtatactcaagaggagagtttggattatgaagaaaccttctcacctgttgctaagttgacttctgttagaatgatgttgttgcttgctgccaaaatgaagtggtcagttcttcaactagacatttctaatgcatttttgaatggagatttggatgaagagatatatatgaagattcccccaggttatgcagatcttattggtgaatctttgcctcctcatgctgtttgtcgtttgcataaatcaatttacggcctcaaacaagcttctcggcaatggtatctcaaactgtccaacactttgaagggaatgggttttcagaagtctaatgcagatcatactttgtttatcaagtttgcaagtggagttttgatgggagttttggtctatgtggatgacataatgattgtgagtaacagtgataatgcagtgactcagtttactacagaactgaagtcttatttcaagttgagagatttgagtgcagctaaatacttttttggtattgagattgcacgttcagctaaagggatttcaatttgccaaaggaaatacattttggagttgttatctactacaggttttcttggtagtaagccttcttcaattcctttggatacgagtgtcaagttgaacaaagaagatggtgttcctctgactgattctacctcttataaaaagttggttgagaagttgatgtacttgcagattacaagacatggtattgcctatgcagtcaacactgtgtgtcagttttctcatgctccaacaagtgttcatttgagtgttgttcataaagttctccgatatttaaaaggcacagttgggcaaggtcttttctatcctgcagatgataaatttgatttgaaaggttacacagattcagactttggttcttgtaccgattctcgtcgttgtgttgctgcttattgcatgttcattggagactctttggtttcatgaaaatcaaagaagcaagatacagtttctatgagtacagcagaagcaaagtttcgagctatgtcacaaggcactaaggagatgatttggctttctaggcttcttaatgacttcaaggtgccattcgttcctccagcttatctctattgtgataatacagctgctttgcacatcgtcaacaattcattgttataagacacgggaggcagttgaatcaggttttattaaaaccatgcttgtggagactggcgaacatgtggctgatccattgactaaggccatttatccggctcagtttcacaagcttattggcaagatgggagtgtgcagccccactaccatcttgggtgtgtgtgtgtggtgggggggggggggggggattagcttgtatatacttaggctatacttgtgaataatagaagtggttaaaggatcggtatagtccggtttattcatctaattaaggtgaatcttttggttatttctggtttagtagagtctatatactatagatgattataacaaactctttagatcattaatgataaattgagctttcaccatgttttccctctcgttcatggttcctattagttagaaagtatattaactacagtcaggctcggcagcaaaatatattatagttttaagaagcattaaattttgagaaaaagtcttaccgtaaaactgttgtagtctcgattttaaagtaacatctactaggtactaattctgaagttaaagatttgatgtatagttatatattgacaattacaaaaacggtaattttagtggtataatatagttattagtgtaaatttgttttagacctatagtcaaatttaacttggtttgacacggatctatactcttaagttttaggatagcctttatcaaatctgatcgtcacagattggaaaacaaaattattttacccaattctatctaaacctggatatgagtttgataatgtttttctttattgtataataaacgatagtataactgtttttacgtaagatatatatatatatatacaatattttcttgattttattttatgtttagatgaataaaataattatttgtatactatattactgtatgaagactttacataaatataggaactttttatgtgtttttcctacattcttattcatacaaggataataataatgagcaaattcaaattattcagttttttaaaacaatcagttacaaatatataaatttcgcggacaaaattacaaatatataaagagattttgaatcttataattttcatcaaatattgtagtttatgatcttgttaccgattgatatatgttagagtaagacatagtttctgtaaaagccaatgttgataagggtgaaatagaatctctttcggttcatcgatttagggcttgaagattgtttctttttcttcagattgtgtctcatacatttttgaaatgaacataattcttatgaagtgtacgaaaattttatcataatgtttgggggaatgatgtcctttgaacatgaaaatattaattttgaaacatatgttgacctcttattttatttacaatcattgcttgtcaaatgaccacttaatattgatatgagaatgcttaacattattatttacacgtataatgtcatttcgtctggatcagccatacaccgacgtaaacggaacggagattaagcggcgtttacgtgtataacaattttcaataagagtgacaaacggcgcttaaacggcatctcactcctcgttatcaacaaaactaatcaaaagctccactgtcactgcagtgcgcatctttttactcttagtttttgatttatatctttataatcatgattccataatcatttttaatccagtcgtcacaaaatatccgatattcacatatcaatttatttttacgcatccactaacgattcatttttcctttttgggcatccactaacaatatttaaagacaaatgcatacacgaattcaaatcaaatggtattataagctgtgatggtacacggataaacataaactacgaaatctatgtaacaatctaattcgtgttgacttgacaaaaatttggttttggctaggtatgatgatagaaaaacactgataaattatttaaggaaaaaattcggaaaaaattcgaaaagaacttcaactaatttttatttgaaattttaatattcaactgttttttattggaaaataaaaacataatatataaaattgatcttaaaaaatacgatataattttgattggtgaaatcatacatacaagttaacaagcgttaatttgggtgacataattgctaaagtggagttaatagttaacaagccagtttgaaaacaaatgaggggactgtaattttttacttagtccagttaaccacggatttttaactattaatctcggtttaacgattctgttacccaaattaacgtcttttaactcgtacgtatgatttaaccaatcaaaaatatatcgtattttttttacaccaatttaattcattagatttttattttttataaaacaattgagtattaaaattctaaaaaaaattaattagcgtttttttgaaattttcccaattatttagctatcatactatcagttatgatcatatatagctatatataatagaatttatctatatgaaaacagatattattcacgtaattaaagaaacaaaataaacccgttatagctaatctattgtgacaacactttttcctaaagaggaacaataggtggcacacaaatcagaaatcataggtccaaatttgtttacgtaaagaagctaggttaatagaagatgatgagcacatgttcaaaatcctcgtggaagctaagttttaatcattttggaaggacattgagtgaaaccaaagtatgcatggaatatggattgagaccaaagtatactgtcgtccacgacccaatgaaacaaaactaaaaataaatgtaatgcacatgaactatcagataaatttcttggaataatatattatggatatatgtataatgcaaaggataaaataaaagaattgtaaatctggatcacgatcacatgcaatggagcccagcaaacccatcaccgtgttgcttcttcttctgcttctccttgttgtcgttttcgcacatgtttctatggtccggttcctattaagctattataaatcatgatttcaacatcaaacctaattcattatctcatcgactttaaatttcattagtcggtgtgggtgttgccagttttatttggtctatattgtttattggattataatgtccggttttctttagtcaaacatgaacttttttgttgcaaagtttttatttggtatgcttttgttaacatgaacttgtagtccggttttcaatatagttttaaaaggtaattagccaaatagctttatttgattaacgaaaataaaaaatgtcgtgagaactattcttttgcgtttttctcaaatgaaattatatctgatatttaaaagactatataatcaagaatcatttgtttcttttagaaactttcacaatttttcaaaataatgctaattaacaaactgttcataatgtccgtgtcttcccgtattatatattatgtatgtaaacaagatttctcctaattggctttctaaaccttcaattaatacaatactggacaaaacgaaaaagaataccgatcatggctcgtaatctttctaaaatactctgcatgctataattattcttcccataattaatagtaactttataaatgacataatatacaactccttctgtttcattatatttgtagtttaaggaattttgtttttctgcaaaatgttatttttattcatctatgcaaaaattaatatatttaataatttttgaccaattatattttacagtatattttcttattggttgaattaaatgtagttaatgatatttttatagaaaaaaagataaattaaataagatttttgtgttttcttaatctttgtgaaaaaaccttaaactacaaatatagtgaatcagaaggagtactaattaaatagtaagtatagccaattcatttatgataacatttaatttaattatgtactaaaccaatatagttgatatagttgttacttgttagagatattttttccaaataaacataaacgttattagcatagggccccctacttaactatatgcgtttgtcatgcgagatatgaccaaaaaatatggctcacattcgtttggtaagattagcgttagtcagaaaaagcgaaacacaaattaatccaattcactacccgtacatgtataatctgagaaacttgttactattttagatttattgtaattgtatctcatctcatgtatattttgcctaaatactcataaggaataaatagtagatgtgatgtgacgttgttgcttttttgcctcggcccttcttccatgtggagccatttcctaactttaaacttttgtctcttgtttctctcattaaaaatgattcaatattaacaaaatttcttttgcaagttacattttatgatatgaaaataacactaatatcaataagcaaaaatacgttaaagcaaggatattatcaagatatttttttctatagtaattctctaagactataagtctaaacctataaatataacgaaaatgtgtagaataaattatttatttttgtatttaaatggtttcgaaatcttgagaattcactttgtcaagatgaaacatacaaatttaaactaatatttagaaataagttctactttcactttcgagtttctacatttttaacttgcaaactacaaaatttatgaaaattcagtctataataaaattaaatattgaaactctaaaacttgcaacaaaaaaaactctgaactacctcaagattaaaatctaaaataatttatttttaaaaaatatgaaaaattgaaatataagtaacacataattccaaccacaataaaacctctataaattaataatgttgggatgagaaaattaataatttagagaggtattaatttatcgataaattaataattattaatttataaagagattttacaaattttgtattttttttacaaaaatttgatataaaagtagttttttctttaaaattaattatttttctaaaactaattacaaagaaaaaataattattaaatttcaaaaaataatacaaagtttttttcgacgtaataaaaatattagaattaaactctacaaataattaatggaaatcgaagaaaaaataatactaagtcatattttaataaatattgatatatatatatatatatatatatgtgtatatattagtaaatttacataattattaatttataatattgatgagaccatatatttatataagattttcgaaaaagttattatcttattaatttatcgatttgtatcaatttttacactggtcccaactcgggaccggaagaatttattaatttatagatgttactaatttatcgaatattaatttatggaggttatactgtagtattaacaaatcatcaaatacgatttcacacaaaattttgaaaaaaaaacaaaattagtaatctaacaacacaagattataattgcatttccaatacacaaatcaacaactcttcattctcaacaaccattcaatatctaaatcaaaattttctacaaaacccatagaaaagcaatcacttttccaccacaataaaatcgaaaacaaacattttgtatgtatatgtaaaagttaatgcaaacattaatttaaaactatatggaaagctccattaatttatttttaatctcccaactaattcactacaccaattttgtatgagagtaggcgacgaaaccacaagtacctatatcagagaatcagagaccaacgtcacttatttacacactctgttttcttttttttggttgcttcttctctgatctttctttctttttttttttttgaaagaatcaatttccctctcaaatcagaaatctaaaaatgggaacaacgatcttggttctctccaagatcctaactttcttactaacaacaatgctgattggatccagtgtgatccagtgtagtagtgtaacctacgataagaaagctatcgtcatcaatggccaccgtagaatcctcctctctggttctattcactacccaagaagcactcctgaggtaagaaaaatcgaatctttatcatagaacaaaaatgggttttgtttaaatttgatgttttctttttgtttatagatgtgggaagatcttataaagaaagctaaagacggtggcttggatgttattgatacttatgttttctggaatggtcatgaaccttctcctggaactgtacacaattcttcttctttcttgttaaattcttctttaaagttactaactttatcaaatctagatttgggtttttggagttttagattctcttctatactatgagtgaagttggtggggttttgttttttttattgcagtacaatttcgaaggaagatatgatttggtaagattcattaagacgattcaggaagtgggtctttatgttcatctcagaattggtccttatgtttgtgcagaatggaattttgggtaatgttcattaaatttctctttaaaaaagtcaatttttgaaatttgaaactgatttcttgaaagttgtgttttttttttttttggtggcagagggtttcctgtgtggttgaagtatgtagatgggattagtttcagaactgacaatggacccttcaaggtaataataaatgttggttattgtttaattttggattagtatagtgttaacatttgtgtattggttaaagtctgcaatgcaaggattcacagagaagattgttcagatgatgaaagaacatagattctttgcgtcacaaggtggacctatcattctttctcaggtattatacaagttcactaatctttttttttttttgtgacattgcttaaaaggtttgatctttgaatgtattagattgagaatgagtttgaaccagatcttaaagggcttggaccggctggtcactcgtatgtcaattgggctgcgaaaatggcggtcggtttaaacacgggagtaccgtgggtgatgtgcaaggaagatgatgcacctgacccaattgtgagactaatcttttaaacttttgtgattgataagagtagtaatgtactatgttgtaatttcttgtgcttcttgttttgtagataaacacttgcaacggattctactgtgattattttactccaaataaaccgtataagccaactatgtggacagaggcatggagtggctggtaaaaacaaatactttctttgcaaaactgtaatgttattagagacacaaaatgtttactgattgtgtttgttgtccactatgatggtgaaaaggttcacagagtttggtggaactgttcctaaacgacctgtagaggatctagcatttggagtagctcgtttcattcaaaagggcggttcgtatataaactactacatggtaattagtccttgcacgaacattacgaaaaactgttttcggtttcggtttcattctgatgcttgttgtgtggtgatgtgacagtaccatggaggaacaaactttggacgcaccgcaggaggtccatttatcaccactagttatgactatgatgctcctatcgatgaatacggtacaattttcttacattcagttgtgcaaaatgttgtttagccttttacaattttacgaaaaaagtctgttttttcgatgatgcagggttggtccaagagcccaagtacagtcatcttaagcagcttcatcaggcaatcaagcaatgtgaagctgccttagtttcttctgatccacatgttactaaactaggaaactacgaggaggctcatgtgttcactgctggcaaaggaagttgtgtagctttcttaacgaactatcacatgaatgcacctgcaaaagtagtgttcaataaccgacactatactctacctgcttggtccatcagcattcttccagattgtagaaacgttgttttcaacactgcgacggtaagtaatggactagtagttgctgttttggtgggaaagcctttagttgcatcatgttgaagctaatatgaagttgttggacaggttgctgcaaagacatcacatgtgcaaatggtgccatctggttccatattgtactcggttgctagatacgatgaagatattgctacttatggaaaccgtgggacaatcacagctcgtggattgttggagcaggttaatgttacacgagatacaactgattacctgtggtacacaaccaggtacattttgaatatccaatagtaacattatctttgcttctcaaacatgatttgttcttggaaaatgaatcggtgtttccggggattgcagtgtggatattaaggcatcagaatcattcttgcgtggaggaaaatggccaactcttacagtggattctgcagggcatgctgttcatgtgtttgtcaatggacatttttacggtatgatacattcttttgctaactcactcctaagaaaacagctgtttcatcattttctgtttgaatgaaataggatctgcctttggaacaagagaaaacagaaagttttcatttagctcccaagtcaatctacgaggtggagctaacaaaatcgcactactgagtgtagcagttgggttgccggttagttctaaggatgaaataaactgcatgtttgttttagtttctgttgcagactgataaatattgtttcctttttgtgtgttgtgaagaatgttggaccacattttgagacgtgggccacaggaatcgtcgggtctgtggtgcttcatggccttgacgagggtaacaaagacttgagttggcagaaatggacttatcaggtgagattcaataatgcttacaagatgaaactctcatggatagttaacaaccgaaactaaataacatttccgccttttcgggtacttcaacaggctggtctgcgaggggaatcaatgaacttggtctctcctactgaggactcctctgttgattggatcaaaggctcattggctaagcaaaacaaacaacctttgacatggtacaaggtaaataagaaactctgacttgtccaagccctttttaaccaataatctgtaatattaagtcttgagtctagttatagtagacctatagacatgacaagctgaaacatgttcacgttgacccaatgtgtatttgcttatcacatatgcaggcctattttgacgcgcctagagggaacgagccgctggctttggatctaaagagtatggggaaagggcaagcttggataaacgggcaaagcatagggagatactggatggcatttgccaaaggagactgcggaagttgtaactacgctggaacatacaggcagaacaaatgccagtctggttgtggcgagccgacacaaagatggtaacaataatgctttgttcttaactatacattttcgagctacttaagctctcttctagtattaaaatgagtcttttttgtatgtaggtatcatgttccgcgttcgtggttgaagccaaaagggaacttgttagtactttttgaagaacttggtggagatatatccaaagtctctgttgtgaagagatcagtaaactaacttaaaaaataaaaccaatattgtgtgtgcattacactaaaagcattactcgtgctgtgtttaatttatccctctttgtgaacagaaaccatatttgaaactcgagatagttataatacaaaatgtgtagtaaaaatgcatcattttattatataccaaaggtaaaattaaactttgaagtaatagcgatttaggaaattaggatagagagatttagaaaccattagcaatcaagcagaagcaacatggccactatggtgcacaagcttccgctggaggatttcgcagcgccgaaaacacgatcaataacttggccctttttcatgaagacgaaagtgggcaatattgtcctaaattcgaaatcatcacgcggtgcaatgcaatctaacggtgaatttagtgggctaaaggtcaatggtgtgatgatgacacgatgctcttgacaaagttcctatgacgaccacgcctaaggtcaacggcgtcgtagtgacacgatgctttttttttaaaaaaaattttagcttgcatcaagacttgaaatgtaacttaacggagagcacggtagagggcagatcaacaataaagtcgcgattgacaatcttatcaaaggagatgtctaaactattcacactctcataataaattatcctattgcctatcttttaataaaatcctaataatactccttcatttctaagaattttttaataaaaatttcacatttttttaaaaataatatataatgacaattttaacctttatatacactttaaaaataatactaaatttctatctaattatttaataagggtaaaattagataaacagttttaaaatttgcattggaaatataaaatttctatttttatgacacaaattattttctaaaaaattcatctttgtgagacggagagaatattaacctattagaattatgaatcgtttaattatagagagaataaagtgctctacatactatattatagcacatgtttagtgctatattgtaaagcactaaaccttatagtgtttagtgcacatgaatactaaacatatgctataatatagtatttttctggaagcattttcttctaggagaagcatcctctttctcatgtcacaattttcttcttccaacaactttattttctttatcatatctgagttttctttaccaaaccatgaaacattttcttcaaatctcatggtgagatgctgcttgaaactttttggttgcagttgggccaattcaatctctctctccctcttctcctcaaaaatcggaattatcgaaagcggatgcagtttttccaaacaaacatccaacatgctgcaatacttgtaagtttagaaaggtagactgcagcagatttggtggtatatgggcgggagtattggcaggttgcattgttcttcagtagccttatcatcagattcgctttacctctttggatcgaagagacaaggcttaccaagttagaagcaaagtccggattttctttggcatagccatacagaagatggtgtatatgtgtaaacccatatgcgacaaaatgctttctcaaagcttcagaaggagcatcatgaatagagatcttctttgacctcttattcttcttcttcttctcatgacaaaaaagctttgctgctatagatgcatccagatgttgcaattctgttggaggagcatatgaatacttggtggtagatatgagaaccgacgagataatttacaaaatagcactaaatcatggctaaatactatctctcgagctgatccatgatttctgaaaagtctttatgtaaccattgaccagttaatgaaggatcaagaagatcaactctacatgaaagaattattgagacacgtcatgattaagaccaacaaaactgaaacaagaatcataagctagtaaattaaagagatttcaagtaaatgaacaacaaggggacaaaaggcagtatccttaaacatctaaccgggacatgtcaagattgaggtagttttctttcacattctcttcaagtgcctaatgaagaataaggttaagaaaattgtatcagaataagaagactattgtccctttcactagtcaagcatatatcactcatcttcaccaacctatataataattttagatttccacttaaagttttttatcttaacgtttattaaacactattatatatagaatttttatgttagcatttattaaaccctattatatagtaaccaaaactttttttttttttttgccatccgattaaaattaggactcaaacgagccaaaactgaggaatgttgtttacataagttatatgaagcggttcagtgcgaacttttcgcgctaagttatccgcttttacatttgcattacgagaaattaaggataaagaaaagtatgtgaattcttccctgtcgctctgtagttcctccaaataagctgagaacgtcggccattcggttggagaagacaccatcttcaccagatctgaacagtccgtaaaaaatgctacatcttggctgtcggcaccaatcatacacttcatcgcccatagtagagcttcgacttcggtatgtaatggagatagacttcttcgtagattagcagctcccatggttggtggctctccggttgctgatgtacaaaaccatcatgtacctgaaaacttattgctttctttccatgatccatccacaaaacaacgatatcctgaataagtattatcatttgagatatctcgcacccgagttgttttgtccgatccgaaactaccttgaatttcagtatgaagctcagcttgagctaactaccacaattgtgcctctttctctgcgagacgtaatatctctagaggatctttatccacattttcaaatatcttctcattccttgctttccaaatataccaaattaaccacggataaaaagatgaatccacttctttaggtattcttgagaataaatgatccaaattcgcaagaatagagttgaaaggaaaaaatcttgggaccgtcgggatcgatgaaagagcccatatctgccgggttgggtggcattgaaatagggtatgattaattgtttcctccatagcaccacatctggcgcaaccagaatcacaattaatccctctcttccgtagattttccgtaaccggcacacaacctgataaaacttgccataaaaagtgtcgtaacttaggcgggcattgcactttccaaatatgtgcttttagagttttgatatctgggccaataaaggctaaattaacatcaaaatgatctagtcgcgtcgtatgataaccagatttaactgtatattttcctgatttggtaaaatgccaacctaaagaatcctcttttgttgacgaacccaagtgcattgcacttatcagaaggacatcttccggaacaaagatctcgtttaagaaatcaatattccaaaaatttgaccgactgtctatgagattgttgacttttaaagatggatcaattactgaaccattacttattgctggtctcgggaattgagctggaatccatggatcctcccagactgagatggatgccccagaaccgaccctattaattagtccttttttaaccagagatctagctgaaattatacttctccaaccataagatggagaatatgattttaatttatccagaggattagatttccgaaaatatcttcctttaaacactttagcaaagagtgaatcaggaactgtaattagacgccacaattgtttggctagtagagccgaattaaagtcgttgacactacgaaagcctaagccaccatccgccttgctactacacaatttattccaagccatccagtgcattcccctggactcaccatctgaactccaccaaaatttcgcaaccgcacttgtaagtttagaagtaattgttttcggtaatctgaagcatgacataacataagttggcaataccgcaaccaccgatttgatcattacttcttttccaccttttgataagaattttgccgaccatccatttatccgagtttgaagtctgtctctaacaaaagagaagattcttgtcttcgaaccacctagactttccggcaatccgagatacgaacccattccaccaatgctatgaatacccaacgctgatttaatttctgcttttatatcatcacctaccttatggccaaattgaatcgatgatttggaaaaatttatcatttgtcccgagaccgcttcatattgttttaaaatacccaaaattactccgcattgttctttattagctttacaaaagaataaactatcattcgcaaacaacaaatgagagactgatgggcttgctgttgccactttgatacccgtaatcaatttttcttgctctgcctttcgaatatttgcaatgagcacctctgtacataggataaatagataaggagagagtggatctccttgtcttaaacccctctttgggactattagtcctctaggttgtccattaagtaggaccctatactggactgttgtgatacaccacattatccacgatatccacttttcacagaaacccattttctttaataattcctcgataaaattccattcaactctatcatacgccttactcatatcagttttgatcgccatgaattttcctttacatgacggattagttcttaatccatgaaacatctcctgggcaataagaatattgtctgaaattaaacgtccttcaacaaaagcagagtgtgtttccgaaataagacttggaagaatcttcttaagtctttgacaaaggatttttgaaataattttgtacccgacattacaaagactaatgggtcttaattccgtcattcgagtcggtcgttccgtttttgggatcaaacatatattagtcgtatttaactgtttatcgaaaactccatcttgtaaaaaagagttaaccagaaaaagcatatccatttttatggtagcccatggtttttgaaagaataacgctgtcataccatcaggccctggtgctttttccgggtgcatcaaaaacaaagccgctcttacctcatcttctgtagcaggtgtcgttaagaagtcatttatttgatccgttattaaagttttaacctctgataaagattccgcaatattctggggattcgacttattaaacaaagtctcaaaataagacaccgctatatgttggacatctttatcctctgcaaaccattttccattttcatcatgaagtcctatgatccgattcctagcccgtctctgttttgttagagcatggaaatattttgagttattatccccaaccttcatccataaactcctacttttctggtaccaatattgttcttcatctatataagcctccttcaaccgtattgttaaatccgttatctcctcacttgttctcgaatcatctctctgtgccgcatctatgaactcatttttaatatgaactatgaactcatcttttattgcagtagggaaaactgatctatcctcgtgtgctattgatatggattatttttgtagtggatcactaaccaagtcctaccagctctaacctgctgtatgcagtctgacgcttgttcaagtagagtcactatgtgtctatgctagtcccatcgacaggcctactctgacgcgcctagagggaacgagcggctggctttggatctaaagagcatagggaaatgtttgaatctacaggtcagcttcatcttctcttgttttctctgtttcagttcttgttcaaggataaaaacagagaaacgttggataaaacttcaaggaacttaaagagatatagacgtgacgtagatggagaaatatgagctgttgaaagtgatttttccatagtattacataacattttcacacatttatagtggaaatcagagaactaatcactgctctgttcataactacatattttcaacctacgctctcttatcgtgtttaaaaccagtcttaatgtgtgtcgctattttcgtgttcgtggttgaagccaagagataacaaaccagtaatcgaaaaatcaacatagttataatacaaatgtgcagtagcaatgcatcacttttatttcatacgaaagataaaaactttattatgatgcaaagagttagaaactgaaatcaatcaagcagaagctacaagaccaccatgcttcatcagcttctcattgatctcatctttcgcagcaccgacaacacgatcaatgatgttgccttctttcatgaaaacaaaagtaggcattgcctcaactttgaattcctgagcaacagcttgcaattcatcaacatcgatcttgaagaagacaacattagtgaacttcttagccatctctgcaaacactggtgcaatgaaacggcaaggtggacaccatgatgctgtgaagtctatcacaatctggtttcaatcaaaatttcagaacaaatcagaacacaaacatcattcaccactaaactaactaatcaagaaaaccctaaaccataacgtaatcaaatcaaattgaaaaaaagccctggacataacaagagaaagtaaagtttctataatttcagaccatatcaggatacaattatcattcaccactaaggtagctaatcaagacgaaccgtaatccctaagtaaagtaatcaaatcaaattgaacaaaaccctagacaggacaagagaaagttctagcttctatcaatttgggaccaccagagcaagatatgggacaagaacgggatcaaaagcaaccgtttctcgaacatcattcaccattaagctaactaaccaagaaagccctaaaccctaagtaacgtaaccaactcaaattaaaaaacaaaaaaaaccctagacaggacgagaaaataccagtttctatcaaatttcagaccaaatcaagacatggtacatgaacatgataaaaaccaaggttttgtatctaacatgaattaccagtttaccactagatcaagaaaactgaaaaccctaagtaaagtaatcaaatcaaatagaagaagaaaccctagagaggagaagaagagaaaagtaccagtttcttggattcattggcgtctttgaccttctcgttccaaacttcgagggtatggcaagcaatcacttctccttcaccggccatttttattatttgttcttaagcttttaagagttttgtttgattgatgagttttttttggtgaatgaaagaattattcttgttgggatcagcttttataggcaagacttgaccacctatacctctacctcttctcggtctttttttttaattattttcctaaaatgagttcgatcttgacgcgtaggagtgtgaagggatccaacggtttatattaaacgattaaagaataggcatgagtctaggtcaacggcgtgatgatggtaacgagtaacgacagttctagatgtagaagacacgcatgttttgtgtgcacgatatatgagtttatccgttcttttctcgtccttgcagatataaaaaagtaacgtttgtttttgtcggcacgaatataagtttttttctatgtgataatttgtggactattccgagcttttagacgtgcaaagttgaatggaaactttatctaagacaataagaaaaatattatctataatatgctagatttatgttttgaataataatgcaagctgtttttgatcaatcttctttattcctctaataaatcaaattctagtaatgttctttcactaatgatagaaccgagagctggctgtatgtgtgtttacgctttgacactaattttattctcaaacgacgtcgttttagactgattaacagtcactaacggataataacgggtttctaggttctattaattactgataaaaacatgtctattttggtcaggtcaacgaattgttcatatcttaaatggtagtcaacgtttagttcatgttttaaatggccaagttgatgtttaaaatgaccacaatttaaaacttgactaataaagtcgttaacagatgataacagacgttagaagttccgttaataactgataacatcatgtctattttggcctggtcgacgaatgatcatgttttaaaagttagtcaacgtttagttcatgttttaaacgaccgcatacgaagttgacgaataaaatggccattttttgaaagttggggattaaataacattttttcctaatttttagtcagtgtaggttttatatccttttttgttggatgattatgtcttgtgcccttccattcatacgtgactatgatgaatgatatcaacctagcaccacataaaatgagctttttcagatacagtatttcccaacaaattaaagaatcagaagtacaaagcaaatctatctattttattattttcatactaattaacctttttcactggtaatctagacattgttagagttttcttgttatgttcttttattattaacttagggctaaccgagagtgtttatagatactaaacgatctggttactcaagatggtctacatgtgttgtacacttctcctcgcaatacatcgatcggtctatgttccaaagtgtagcgctccggccccgtgtacacccctgtcttctccaatagccccatcgcttcctctcttccgtattttgactcatacagcttcaagtactcataatcctgattcattctccaaataagccaactggaacagtttttcgttgttatctgattggtaaaactataaagttgacgtacctgtaagccactaagaaggcgctctagcctaagtgaagcaactggctctgaagaagatgagaaaacttcaccggggtagtaaagaactccatcaccaggaggaagaccgcgcctaaactttacctattcatttggttatataatatcatgaagcaatcgatcaagaaacatttacaacagaactaaggataagaaaataacctcggcgcttggaaccgttgccttctcatagcaatttgcaccccagtacaagaacccggttccaccttctttccacacacgccacatcactgcccgttgctgtgtaccacgcatccccagatgccaatttgggtgaggatctgaaggtccaaggcatatgtatgtccaccattcctgcaccagcaagaaaagtcctctttatgattcttgttgctaaaatgctaacacatacaggaccactaatgagcacatcattaagatgaccttgaatcaaatttaaccattccataactacagtactttgatcgacatatgatgattccattactaccaaagctagatgtattcatgtacacgtgcaaacgttttcaaagcttatgataactaattaactatattgaccaaactctagtctttatttctattcagttaagtatacttcaggtgtatggaccagacgatttcaaacctcattgagaataacatagacttgggtcaatggataatattctctaaagaagaagtaaaagggttgatggagatctgagagaccctacctcaccattctctgtctgcaattcgtcaagaatatccttcaccaaatcctcccggttaccaagcacccactcactgaatatcaaaccatgatttaacaacactgagataaaagattaaagtaacgagagcctagttgaaaacagatttctctataagttcaccaaattcatcagactttcttaaatcatagattcatatactaaactcacctgcctccatgtctatccaagtaggtgagtggcggaaaagggaaaatttaagaccaaagacgtatttgctcaaaatatattgacaaaggaaatgatttttttgttaactgacagatgatatacaatttattctgaaccaattaggtgtcttttaataggtataaacacaacacacatagtacacccaccggatattaaaattaaagattggtaaggttaagatcttgtcctcattaatcacaaaacctaagtaagagaaggcaatttatttgaatgattaaattactgccacctaagagaatttgaatgatcaattaccttgtgcagtatatctgagtatagggtcgaaggagatttggaactttgacaaaagattcaaaaggtgtcggagcaagaggtgcatctcccggtcctacaaaaaaaaaagagtaagactatttgactaaacttctcaagtagctaaagcattgttaaattatgaactttaattcatagtcacagtttaacctagtagatttcagttcccttttcaccaacatacatgtatgaatatccataagctctgtaatgaagcatatgatacaactaccagaccattgtgaaaactgcttacaaactaacgttacccaataaactaatattatgggctgcataataacatagtgtggtatactgatcaacctactgatacaaactacatttatggttcaccattgaccaattttggagctcatatcaacaggaagacaaagccatgagaaccaataaaacagagccccagcagaaaataggaagtaaatttgagagacagaaactaattaaaacatgtgaattccacaaaaaataaaccataccacagtagtatgtagtcaaaacacgagaatccggggcataggcgtaaatttcactggccatcttgcgaacgttgtcaaagtgctccatattcagtggctgccaaaaaaaattgaatagtaataagaaagatgtcaaaaagttattaaaagtaagacaacacatcaacgatggtacatgagatatagaaatggaatagaatgttactattaccacagtaaaactacatccttttgacaatcagtgaaaaatattaatgaagcatacctcatcccacaagtaaaagtaagctttgttccaatggggtttacttctcaatatctcaacttctttccgcagataactttcccttgaatcatccctgtttgcacatcaacaggcagatgaaagttagtttgggtacctacaaaaaaatcttgagtgggataacacatgcataccctgctataacttgtctatacggtactgcatatgcggcaagccttgaatcagagagatattcatcagattttggatgatcagctgtgaaaccaaaaagtggaacgcaaatggagagctcagagcgtgaagcaaaacgattagcttgcacaacacaaaacaaatacagatggtgcataaaaaattaagaagaggttgcagtaccaggccatggtgaggtgtatgtcaagacacgcatgctttcaccccatttgcaaaagtacggactgatccgatactgaagaagccatttaaaatggagatccaatttcttgtaccaatcttcacttccatgttcaacagcaaaacgatcctcaataacagtgtcagagacaccaataacagcagggagtgatggagtcactggaataataaattcccaaactgtcaatcttagcttgatacgcagtgaaaggtttgaaacaacatcttcttccatcatatcagttgatccattcgtagaaatgaactccgaaaatgatggagagaagagaattcttcttaatgacgaacttgcacatttaattctttctacctaaaagataagctgcagatcattgacgcgtaaaatatttatcaaaggtgaggcaataaagtacaaggaaagtaaatattaccacttcatccatgggttttccctctattggttccataatatcaagacaggtattaagttccacacagagctgatccttctcatgctttgccaagtgagaagaaccgctgttaccaaacacataattggttataagtatgtcaaatccatgatgaacaaaataatcattttcacactgacataagtggacctgtacgaatcctaaagtagatcaaagaaatggtatacagagagagactcaccctccatcagttttcatagcagaaataatgatctctccttcatattgaccaggaggctgcccagtaggaacgtctattgagacccaaatgacacttgtttctctacaacaggaagcattccggctatgtcagtctcaggaaataagacagcaatgtcaccacataccagattaagaaattggactagtgagtggtcgtaccctggaaataagctaagttgagaaacaggcaaatcaaggggcaccaaagcatcaggaacgcctaagacaggcaccactcgccgcaactttagtgactggccaacaaccaatctgcgatgatacaggaaccatgtcaaaatatgaaaatattacatttgataccaaagatatcatttacatgttctccaaagaagaggataaacatgatcaaggtttaacagctcacctatctccagcagaagagcataagtcactgcactgaacctgaacaatcccggaagggctggaagcagcccaagaaactttaggacgcatggctatctgaaaactttctctttcatttctagccgccaaaagatttatctgtagaaacacaatatggaagccatatgtaactcatgcatcaactcataagaaacagaacgataaatcagttattgatataactcctctaaaagagatcttctgtatcatccccacggaccccacctttcaaactagttcatagaataggaccaggtaccattccactagaatatttacagctaattcagagttaaagcttttggactccataaacacctaacagaacataagaataaacactaaccacaagcatacaaatagaaagcttacaggctctagagctcgaggtgtttcttgtgaaccaacattaactgtattaggcatacaccaaacattcaccaaatcagcagttggaacctctgatggatctgtagattgtttaagtggctcagcatcattaaacccataagctgttcctccaccagccactccttctactggcacagtcatctcttgagatactacaaaattctcaaaaacgattaaagattgtcttcaatcatctataagctaatttctacaatcactttccaatttcaaataaaaactacgaaatagaagctagcttatgaaatcttcaagcgtttcgttctcaaagaagcacatcgagtgataaattttcatcaactcctattgagataatctcgagaaaacgacggagaattgcgatagtagagaagaaattgaaaattgagtatgtgattgtaccgtacgaaagagaattgagtcttattattaccattgttgtccatttttttttttggttttccgagaaagtcgcagagaatctggagattctttcagggcttgaagaaggaggagagacgatcgcgttttgcgagagatttgtgaaaggaagccaaagaacacgtaagggagttcaatttcaagctttttgttttgttttgtttttcttagccgtcgtggctaaactgaaaaagtagcttgcaggctttaactcattgaagcttttttgctgcaatattcttttgggaatttgcaacaaaatggtttatgaaataaaagagagttaaatttttttttatccaccctaaattttgtttaaaaaaaaaaaaacactttaaatttgtcaactatagaaatttttttacatatttttagaagatttcttattgattagttgattttataaccaaaatcatatgttatttgattattaatttgttcactattaaaatacaaaaatcttttaagccatgttttatctaattaaatttacagattttaatcttcttattttttttatacctttttaatttttgaagctaatttggttttctaagtaacactaattatttatagtcagtttttacaaaaaaaaaaattgtcgtcttaaatttattatttattacaaattatgataagacgatgcattttactccttctccatgctcttcatgcacaccttcaatgatcttctctgcgtagaatcctggcgaacggctataattatacatcgttggagatctcttgtagttcattaatctgcaaatcttctaataaatggtagtattgggactcaacctcatacctcttagtgtagaaccattaatgaacccttccaccaaagtttttacaattaaaacttaaaataaaagaaaagccttaattaatcaccccataatctagtaggggtagtttttcataacatgaagaatactgaaagcatgtacagtatgttgcgtcatcatcataagctgttatttgcctaaggtgtgttagtctcttaagtcctttgtagtctttggactgattcgaaagattagtgtgatctcattatgaaataactttctcaaatctttttttgccaataatcagaaaccgctttttttttttcattgacggtgaccttggtgggattgatgcaagttttggtcttgtcttctgatagagtgatgaagacttctttcgagaataaaagttatggaagtgggatgcccataattcagtaaccaaagcgctctcttatttccatcagcctcaatacacacaagcttatacacatgtatatgtgtgttgttgccacgcaataaatacttggatttgcatttgaaatggttccaaatcaatttatgacaaaactgaaaataattacccaaagaccttgaggtaacaatttcagcatagtagcagcagcagctacaacggtcaaagcagggcgcaaaccagagaaaacagcggactaaggccacctttgacggttgtaggagagctctacgttccatggcttttaaagggtgagtctcctcctcctttagctggatccttttgcaatagcacatcatgattgattgaagccaattgtgacaaattctgcatcatcataacatgctgttaatatcctgtacttcaataataattatcccaagacagaactacccaacaactccaatcaacgtaaactgggattcatatttcagcttttagcagccaaatttaccttgaaagaaaagttaatgagcgagagataataaggcggagaatcaaacttctccaggttggtgcattcatccaactaaaaaacacacaaaagcaggaaaaataatttgcgatagatacgatgattgcaaatagagtacctagagagaaaaggatggagtttccaaatgcctacctcgtctcctgaatctggatttgacccactgttgttaccagtttcagtatcgctgcaactgctttcactaaagcgtgatacgaaatagcttgtgtcatttatactctcaggttgcggaacaaaagcagcctaccaaaaagaaataaaaggaaaggcagctaaggctttaaagaacctttcactcttcacattcataatatgcatttgtgaagactaagctcgatttgatcaaacagcttctgctttattttctattttctttcttcatccagtaagtaacatgtatttatttgcataatttgtcttgaatgtaaaaagaggttccgagtggagtacttaccttttgcaaagcaagattctcccagtcaactccttgaaaaaagggatgcgactttacctgaaaatgagaccagcgatgttactgaaaattttagtaatgaccacaacaacagcatctaataggcatttgtttctcaattgtgcggctttaataaaaagtaaagggaaaattgaagtaacctctgcagcaccgttcgcccccagtcgcttttccggctcatggacaagaagcctattacggagagaaaatgaatctatatgaatatgagaaaaagtagtaaacgtcaaacctataaagtgtttataatatttctgtcaaacttaacatctccttaacggtgaccagcataaagtctaaaaatcagctgatgttgtaggtaaccaatatgcagaaactaggataaatgttaattcattagctggaaatatagtaattctgcttagagaaacatgaatgggactgtgggaaagacggatgatatgaaaacgggagcagaatcctcaaaacagacctgttaatcaaatcctgagcttcataagacatttcaccaggaacatctggccagggcattttaccattgaggatgttgtcaaatattttctgtacagcaaaattaaaaaggtcaatctgtgatgaattgtacacccattggaaactagattttgtttataactcagctcaatataattcagagaatcttttgccaaaaagacatagctactattgttcaatcagatatatgcaaacaaaattccaagtgttattatgaaaggggaatcaagtaaccaagtcccaaaaatgacaaacgcacaatcacctatataccaaacgatttctgtgatttgaatgtttaagatgcctaaaacacattggactccaatgaacaaacatattattatgataccactaagctttaatagcttcaaaacttgttgacagcttcagacctagattctagacaggaaaaaccatgcttgaaagtccagaagtaaattttaatatgtacgcacctctgggcgggatgcggtaaaaggtggaattccagttaataattcaaacaagacaattccagcagaccaccaatccgcagcataacctgcaagcaacaccaataaggtaaatacaatttactggtgcttcatgaaagcctgatttaaaggttgtatccaaaccgtgttcagttccaagaagaatctctggtgccaagtagtcaggtgtcccaacagccgaatgccgaattctttcttcttcttggttcttctgaaaatgatgagaatttgttcttggggatacatctgactcatggccagataaatcaattgtgttgtttataagaccaatctttgaaagcccaaagtctgttagctggtaccaaaaataataataagttaggttgtaaaacaaagtacttcaacaaccaaaagggaaaacaatattagtatatggttattttcatatttttgtacaggcgtgggaaaacaatctgtgtttgcacatctgctgcatataactctcttttttatcaagtaaagaagggcatctttcacttttttttgtatgcactaaggaaaaaacatttgaccacctaactgcaagaacatattagctacgtgagagtttaaatatcagaccttgatgtgcccattataggcgattaacaggttatcaggctttagatcacggtggacaatcttcagagaatggaggtactccaatgcaagaacctgaaataaatgagaactctttcttaaggaatccaaacaaactttggtacagtatggatataaagccttcaacttaccagttccgcgatgtatatacgagcaatttcttcgtcaagacagccaactttctggagcagagagtatagatcaccaccattaagatattccattaccaagtagagattatctctgcaggtgaatgagtaaaaaaatcgaacctgcattaataacatcaggtgttcagcctttgaaagaatattatagttggacagtagcaaagaagtaaaacatttaccaaaaaggggtatctgacagttattagtatatttcgctcttgtagtatcctctcgatatcatttttccttatcatatccaactttttgagtacctgcatatgagctaaacaagattagcacatggacaagctgactctgaatagtacaacgaataacaatgcagcaattgatacaacatagggatttaggatactagcctgattcacttatattagcttttcaagtagaattttcataactaagaattccatcttaagagtttttcattatgagaggtttgaacaatatggcaaaaacgactaggctgtctaaaattggacaaaagaatctactactatttaactatatttaaatttatattcttgtcactaaaatatatggttcaaagccctgcgcatatctatctgcaacaaagcgaaataaacaccaatctatctgcatcaaagaaagaaaaaacaaaatgcatctacctttattgcaaaaaagtctccagttgttcttttgcgtgcaagaaagactttaccaaaggcacctctacttattggtttgatgatctcaaagtcatcgatgcttatcctatctttcagcagtaactgtggagtagccgatgcatgctccaagacatcttcactctctttaatgttacccaccgaacttttatcggcagtcaattcacgagcatgtaaatatttctcgctgtaggtaatatcagagttagtaaaacttataggacgagtgcagtagttagtatactattgcacagtgaatttaccagagaagtttctcgatccgccccccgaaagtatctattacaagtgctttgagcttgccctgcttcaagacagcttgtatgtcttgcatgcatgccattatatagtcacaggacccctctttcgagaaatctgtgcttgctccacagcgggcaatatcagaaaggtccatcatctgcaagatgaagaaaacgaagaaaaaacactggaagatattatgcttcgaaatgtttatttattcaaagatcagtgaaacaggtaagaaaatgatatctatatgatctggagaatagagacccgccatggacaagtaacaaagtaatgaataagaagaagttgaagctaggaactcgctataacctagagaggttataacaagaggagaaattctcaacccatcaatggcatcagtaatactcgcaaaagtttgagcatccaaagttttattgattaagacattaaggattctaagattccagcaacaaccaatctatatatcaaaaactcagcatgatatgacctaattcaatgtataagaatggatactgcaaggcacagtagtaaactagtaaagcaacatataacgctgaaccaatacttaatctacctaaaaagagaatataatggaaacagaaaactaaccagtcgaagatcctcttgctctggacaatgccgttctagccaataggagtcaaagtgacttgttctgggggtatttgttgaagatactgacgtgatgctacctgttgatgatgaagtggcatgatggcaaaatttggcccctacatggctcttaaggtgaataggatatgtgtaagactcgtctatgaaggcagtgtccatctcgtgcagatcctcaaacattccctctaaacctttattccgccattcgtttatcttgggagaacaaccttcagatgcaactccagatttccgcagaacagagttttccaagccaccagcttgagtgaaggaatttaaacttcgtgaatcaattatctgttccagtatctcctccagtttcaaaaggcgctcatcaacatccacacaatttatttcacatttatctgcgtatgcacatatgtaagagtgcggttccagatggaagagaggaacttcctcctcacatatcctgcagattacataatcagatccgcctaactcttttccaggctcatttgacatcttatcttcatactcatcgctcaaataaaatctttgttctaccactttactatcaaattgaggttcatgcgatggaaattcttgtttagcagctgcataaccttctctagcagcattattgccatgatcatttggtaccacataatcaagtgctgtctctgactccaaagattctttgtctcgtcttttgaatttctgcccagcttcatttctttgatattcaggataaccagaaccagaatcatcaactctaggagtagaaccccaatctgtttccaaagcagggatgcgttctaaacattccttaaatttgcgaaaggagctctcatcaattggctcagtctccttctgaaacatcacaactcttgtacaatgagtcaatataaaaagcaactgagagaacaaccacttcacaagtcctgcttggcactgtttccttttcctagttaagtcttggacaatagattcacaagtagcacgaagttgagcagatgtcatctccatacaggctcgagccacatcaagtaactgctctgccatttctcgatcttcaggacatgatggatccattttctccatagcctctttgacatctctgacaaagacatccagcttcttatccacagtctctttagcaacatcaaatcttgagtgaagtgagcccagaagttcctgaaaatcattgcaattcaaaaaatagaaccaaataacataattagaccccaacaaaatgagtcactggactagctatatcatatatggcatagagagtttaattgaattccttcaattttagaaaacagaactcaaccctgagaagtttcatcaatttgtatagcaatatcttccgacaattttcaaactcaattaaagaaaattctaaaacttaagattgttgtagtaccttcagatcgttatagctgtgcggacgagggtagggagtttgaacaccaccccttggtcctaattcatgggaaaagctctttatacccattgactttgaacagggagggttagtttcagatatcttaatcatcttctcttcgtctttaccagagttcttgcctcttaacttgatctcctgccaccaaaaaaaaaaacggttaattcaaagccaatcccgtcctttcatggaaaatccgaagcaaaactacattttacctcactactcgttgtactcgagcaagcatattttggagggtgacaagaatacttgggtttataggaagcaagccaccttgacaattttgttcccttacgctctagtagatatacgaaacagagaattaacaacactcaccagcaacaaaacttatcaactacaatatatgaatctataagcacatctctcattttcttctttctgtagcagagataacaatttttttttttactatgatcatgtggaaatttttgatatcctaattgatcatacaaaccataaatctagcacaacgaattctaacttagtactgagaaaaaaaaaaaccataaatcagatgaacaaagggaaaaacaaaagttcataatcttaaaatcaaaaccttgtttcgaagagccagtggttctaccatgaccacgaggaacaatagtcttctgattccgattaaacggaggtttaagaacggtatcggaggaatcttcaggtctaggacctgacgaagctaaccgagttttgatccggttcaaaccagaaggaatcgcaacagtagaagaaacacctcgatccttacgattctcttccgccatagcaaaatcaatgagaaattccgaaaagaaaaccctaatacctccaagctctggcgtctccggtatgaagagccgctttcatcgccggaagaagcgacgaggaaggtgaaactaggaacggcgatgagagaatcggaatccagagtgaggtcggcgatgaggaagaagacgatgacgatgatgatgatgagacgaagaagaagaaggattcatggttttggtgagagcttaagtgctcaatggggttggttggtttttaggcttcaacgactcgcggccgtgacatctttcaatttttattaattgttttatttgatctgttaccgtttcaaaacccaaaacaaattatttttttaatgagcacacaacacatgggaaagatattctgattcatgaattacaataataataaatctctgtttgaaaaaaatctttgatattttactttttcgattagttttttctatctaaatattggttgtatatgtatatgtttattgataactatgtaattctaattcctgattcaagttaataaagtaagatgttagaaacccgaaacaaaagtatatttgtaccaatttaatttttatgagaaagcaacacatgggaaaaagatatactgattttgtttgtacatctatatcaaataggcctgttacggatccggatatccggtattttggaggtatccggatccgtatccgtaacaggcggatccgtcatttcagtctccggatccgtatccgccaacccctgatattcgggatcctgaagtccgtgaaaaagtacgagtatccgcggatatccggatctgatccggttttttttatcatcttctctcctcccgaacacaagcaaccgaacttcaccaccaagattcttcccagaaaaaacagctccaaatctgcaacgaaagagtgaatccaacgccaaggagaagaggaagagatagaggcagcggttgtttcggtggaggttgaggatgaggatgatttggtggaggaggatgacgatttggtgccatggtggtagagatggtcgtttggtggaggctggtgtctagaggaatgagtgaggaagatgaaaggattagattttttggaaaatgggccaagatatgagctggaaaatatcataattttaatttttaatatggcccaataaaacccataaacataaaacattgaatattaccggatccggatatccggtcatattttttattattatccggatccggatccgtatccggcggatatgaaatattactatccatatcctgaaccgtttcacacggatatccggttttttggatcggatcccggttccagatacggatacccgcggatcccggatatttgtcccagggctaatatcaaatgtttatgaataataaatcttatttttgaaaaataaaaaagagggtaataaatctgtctattaaatgctcctcaactaaatacataaaataaaaatggcctgtcctcagtaaagggtgtgaacaaaagtgtctaactattattaaatttatttaaggtcaccaataatgcgtctccatattgctttgatcatattgtatcctatttagatctggtatcatcagttgctcaggtttagttgtctctttcgtttggacttaagcttctcttcctcgattatattattttgttagtttggagttgagctctttggttatgtctagtatctatctcatttagtattaactattaagcgatgtttggcttaattacttattcgttgtggcgttgaaaggtttaagtgggtctcgattatcttacggtttattcaggagacccttgacaaagacacactcatagagaagatgcatcttgtgcggataagaccaaaatccactctcatgtttccgtcattttgtgttgaagcctgttttcatatattattatgcgggaagttcttatagtgtgtttcgagagtcttgagacaagttgggtttgatttttacaatgtatcaaaatcttctttcctacttgtaggttatgaaagatcattgtgtttttctgtaatttaactttcgtcttgttttttgtgatttgtaatctttccaaaattctgattatcagtatttttttggagaaaaaaaaaaatctttcaccaataaaaatggtaaaataaatatctttttgctactaaaaataatcaattatctgcaactttaaacattcatagggttgtagacattgaacatttatagggttgaggatccgtaaccgtaacataacccgcgtactattgtttattggttaacattgagattcaatcaacgatattgtgcacgatctgttctacacgccccactaaaaatttcctttgaaaagatatttggatatgcatctaaaagatatgtaatatgaaaattacaattttttatatcttcaagatcttgatcgatgtacacaattttttaaaaggaataccaacaatattcttctattattattattagatcattataatataataatgaatagaaagattttgcatctctggatagtggatacttctttaaagttttctgtgatcaaagatctggtcgaagaagcactcattgtaactcgatcgagttgtctttttgttctaaaaaaaaaaccttcatcatctacatagagaaaagattaaagtaaacatagtattataagatatgatttaaaatgttgaaagaaaaaagtctatttaccagtatacttgtcaattcctataagattttgtgattagtgtagctaggtcttggcctacgatgatttcgataataataaaatatataaatagaagaagtatcaaatgcatgagttctttttatttcaatataggaaatgattaagaaagaattgcaatggcgaagaattaaacaatgattactgtgttttatcgaaaaagaaaaagaaaaacaagcaaaccaaatgtttgtgatgaactaatcctaccgaccacaattcatataaatgtatataaactaatcctaccgaccaaaatttctatcatataatattagaccaaatagatgtttgtgaatcgtgatatggtaggcattatattgcacgaacaacgtgagtaaactcttagattctcccgtttgtcctaaacatagaaaacgccaaaaacacacttaattaaactacttaaacatagtacatttgtatatacacacttgttatgtatcttaaaattctatcctcaagcaaacaattatatcatcatctcaaacaataaacgtaatattgtataagcgattaagcgaaactactcgtagcatggataatcacttaggctaacaatggattatcaaagtatatacaacgagtttttgtgatgattaaccgttgaaaatttgcttgattcatcttttcattgtctttccaaaaagatctgattccttattaatatatgttatcagaagtcagaagaggtcatctactttttttgtttattttttgactccacatagacacgtaaatatatttaatcgtgaaaccgtccaatggctcccctgaaacccaagaaaggtgttttaaaagatctaatatataatttagtattaagaaatgacaattgtatgatgacaagatattacaaaattaaaactagagaattttcagtctatgacaaaaatcacaaaactttgtataacaaattacaaaaatagttgtgtcataatatataattgtctaaatactttttggaaaagtttaggtgattttacctctaatttaactgttatgagatatgtaattttttcgtgtagcatatatattttattttatatagaaatctaatcttacaaaatagagggtagaattgaaataaaatatctaaattgtatttttttcaatatatttacattgtcccaattttcattttaaggggttattacggattttgtaatttttggtagtggcatttatggatttttcatatttgttaaaatcttaaggatttgtcattttttaacatttaaaaatgttcatatttatgttgtttttttgcttgcttaatacttgggttcaccccctagtataatccatccatacactcccttttaatgaccaattagaatttgacatgtcatctatttaaagaataaataaattaaaatcaataaaacaaaacaaattcggtagaatttcaattaaggaaattatttgtttgagtttataaaatagtggttagagtttatattttgtgattaaacgaaattatattttggtttgacttgataaaatagtggttagggtttagattttgtgattaaacgaaattatatttcggtttgggttaataaaatagcggttagggtttagattttatgattaaaacgaaattatattttggtttgggttgataaaatagcggttagggtttagattttgtgattaaaacgaaattatatttcggttggggttgataaaatagcggttagggtttagattttgtgattaaaacgaaattatattttggtttgggttgataaaatagcggttagggtttagattttttgattaaaacgaaattatatttcagtttgggttaataaaatagcggttagggtttagattttgtgattaaaacaaaattatatttcggtttgggttgataaaatagcggttagggtttagattttgtgattaaaatgaaataatatttcggtttgggttgataaaatagcggttagagtttagattttgtgattaaaacgaaataatatttcggtttgggttgataaaatagcggttagggtttaggttttgtgattaaaacgaaattatatttcggtttgggttgataaaatagcggttagggtttagattttgtgattaaaacgaaataatatttcggtttgggttgataaaatagcggttagggtttagattttgtgattaaacgaaattatattttggtttgagttgataaaatagtggttaagatttaatttatttattctttaaatagatgacatgtcaaattctaattagttaattaaaagggggtgaatgaatggatcgaccccctaagggatgaacccatgaattgttcaaaatacatactttatacagaatatttaaccctagaaatattcaatatatgactaagaattcaattggtagaaaagcttggaaagaaacttataggctatctatgatatggctaagaattcaatattttttgtgcaataatcaatttatacttagtttctagaagtaaaccaaatatgcatacacgtttggttctgcagtgatgcagattggtagatgaatgtgatatggttgcacatgttgtgagcccgtcggtgtcgccgctcttttcgcttaccctatatgtagcagtagtagattggtgcttgaagtaccaacctgatgtgccccgcctaattgccataatgtctctcccaagtttttttttatttacctaagagttgtatatacttagatgtcaagttcatagttgttttgaagctagaaagctgagagtgtttgttggagttaaccaacaaacaaatacctcatggaattaattcataatgtagagactagagagtatgttgaatgttgggtaatactcgtgaagctaattttgctgcttgtgtactcactttgcttttgattctactattattctctcactaaaccaagttcataaatggattggggaaaataattccatcctaaatgcaaattcttcatgtatttgtgagtattagctcgaaatgttgaataaaaacaccttcgttgacaaactctacatttttgggtattcttttactactaattggactcactaatactagaatagcaatttttgtggtcattatagtcttcacaatgataaacaaggaaacgactagaaatgttctagattcctctgtcaagacttttgaatccacatcaaacaaccgaaagaattgagactttttgggagctaaagttccaggttccatgtagtttctgcggtcagttttggcggcttcaattcctcagctagattcattgatgcacatacctgttgaaacagtaagagaaactcattaaccacgactgcaaaaagaaccaattttagctaagtgcttatgaaacaatgtttaaaagatcgattgcagcattcaagagaagttctagttccccattcacacattaacatgttcaacccaaactaacctataagaaaacctggtcgatggtacaacaaattattcaacccaaccaccagaaccaagtaagaggaacttaatccctaaccagaggattgtaattcaagtctcttgttaacactctctcaagatcaccatgcatcttttatgcattaataaagatcacacccatgccattaggagatttgcatcattcataccaagtttatatcaccgcttaagcttcagtctttcttaaattcttagtaagcaacaatagataaacaacatggctgggttaagaatttttaacctacttgatagaactaaatgtcattacaagaagagcaatatagtctcatacctacatgcacatatatgcttgttttaaagaacaaattttgagaagagacaggaccgtaagaagaaatgctaagataacagtatataagagtatctagtgtcaactgttgggatagtgatatatgtaaaattcaatctactcctgccaaaagaagtagtgctatgaacaaaaacagagaagtgaaaatagtatttaccttgaaagatccagttgatttagagttgttcgaccattccaaaccaagcatcttactagaagtctgataagttgccttgagattatcaccaccataaagtttatgagaaatcgcaaagtcccacatattcttagccacgtcataacaaggctcaaatgtagctatccctccatgaacataagtatacttcagcttacaattctttgtacccaccatgtaattagcagacaacttgtttgctggatcaatcacaaaactcccgtcaacaatcgtccggttatctcctctcatatgaatgtaagtcagattcaaaggcttctctgcaattctgatagtgttcataaactgaaacctaacatcctgcagcataaaaaccgaaactttttacttcaatttcattcatttgcaaagaatccattcaaatagaaccttgtgtaacatcctgcagcagaaaaaccgaaaatttctacttaaatttcactcatttttcatagaatccatacaaaaatagaaccttgtgtaaactaacattctgtagcataaaaatcgaaactttatacttcaatttacactcctaacctagtttaatctccaaaaactcttaactttctcagagactccatacaatttcatccatttctcattccttataggtttgaagctaaaagggttaacttcaaaaacttgaaactaagaaaaaaggagtaacctttttagggacgttgtagtcgatgatgaagaagccaggcttctcaacggcgagagagagaccattaaagctaggaccggcgacgaaggaagcatcagtcatggtggctcgtagcttagcattgccggcgttgaaggtaagcgaagcaacgctaccgctcttgtcgacatcgaactttcccttgaaagaagccttcatcatggaatcaatcggagaatccaatcggaattttcaggataaaacccattgaagttttcaaatttgggcttttcgtgggcttcttaaaaatgtataaaacgccgttccgtgggcttcttaagaatgtatataaggcgggtttgaattgtctaacgtcctttcacaattaacttctttggattcggtttcatcaactttaaaatttaagaaaagaaagccgcgtgcgtttggttgggacgtgagacaatagacaaagacaacttctcacttctcagtttttaattttgccaacttgctttttgtcttatttcttcccattttaccaattcacattttattacaaaaaaaatagaactatatatatacacatctattactatattttccaatattgtgattctttacctctttattagctaaatatgtattcaaatttgtcttttggtaactgcactttttttatttgactttttcttagaaaagtttccatcttttctaatatttttgaaaaatatactgtcttgataaatgtgaatttgaacctaacctatatatatgtaataataataataatcttctctccggattctattctcatttggtttgtgtgctttgctttcgctttcctcaattctcttcttcttcattatttttgccttttacctcttttctctgcaatcggtttcttctctcattgtctttgacgaaagaatctacccataagagcgtttctttgctttctcaaccataactttctcagatcgattggtttcttcaagcgattggtgggttattattagctttctgtgttttgttcatcgtaatattcaatacaatctctcgtgactaaaaattgagtttttgaaatagattttagcatgggttgtgatatttgaatggatatctctgtttttaggaacgaacttgtttggtgtttctttggcaaaaggttattgctttatggtttcactatggtgtttgtattggtggtttgttgatacgaatatgttattgttcctcatgttgcagtgttagtttttgacttgagagtttgctaaaggtttgatctttatcttatttactgatgctattcttgttgtagctatgtggattgttataggttgcttgattttgatgttcatgtgtcaaattgataatgtagcttttgtagctgattaattaagtataaagattgtaatgcagttgagtttttggtcttaagattaggcattgtatattatacttttgcttgcatatcttgaattgctgtattgtatttttctttggctgaaagataactccttatgtatttcaatgtgaaggtaactcttttctttttttttattttagtttccaggatttgctagattgtgaaaagtggtgagagtctcttgatttgtcaagtgtcaactgtggttaacgataggatgcagggagagagggctagtcttggttctttatcaaaggctttgaactttgagcgcggttctacgtctagtaacgctgtggtagatcagcaaattcgttgggagaatcttcacaattatggtgataatgatttgcaggattacatgagttcagctgctgatacaaatcctacttttgcaaactcagtttatcatgagaaacggggcttgcagaggtttaacattggtgaggctagctctagtgggacgaagaacgaaggggcaagtctcactgaacaatggaagggaattggaaggtttgaggaacagaggaatgataagcttgagttgagccctttgtttgtgcaaccatctaatggaagccgcgtggttcgtgatgtcaatctaaatgcagaatacaatgagcatcttgaggatatgaatccggttacagttcatcctggtcattttgaggttaatggacttaggtctgagtttttactagataacagtgttagagctggttcctctgttgatggacgtcgtgcatcctgtaaaagaaaagctcttgatgcaagcggtggtcagtcctcttcaactggaggtttccgtgagttccagcgtggagtatccagttcttggatctcaggtcctacgtattacagcccagcaatgacagcaaatgatttaaacatatctcttgatcatggtcgaaggggtttggtatctagcgctgttccaaatctatctcctcctaccatcacagagagctctagtagaaattaccctgtctgggttaatcccacatatcaacaagaaaccgtaagcaattttgctccatccttgaactcaccagggcttatacctgcagatcaccagcagatcagcatgagatatggacatgcgttaggcaattttgcatctcagaacccaaatgctcctgctactcatatgccccctgtttcaagaaatacatttcaatggaacacaagccccgtggcagcggttatatcatctagttctgctactcctgttgacagaaatgttattcatcgaaatgcaaccagacaaagaagtaatactctagagattcccttgtttgtcccagctcctgaactgagaaatgtggcccatggtcatattagcagaaatgcaagtggtgctagacatgttgcatcgtcttcatccaggacaagtgttcagccatcaccgtctagtccagcattgactccttaccagaataactcactacataatcaaagaagattatctgaaaactttcgtaggtcattgctttcttcccttgttacacagcagagggctgctcgttcattggcccatcctgcctctccaaatgagcacgtgcttcaatctggtggtgataacacctctcaggtgcataatcgagcttcctcgagagcaggtccaagacaagggcaagatgcaactggcatttctcattctttgcgaggcttggcatccacaagtcgaggaagaaccagaatgggggcatccgaggttagtttcttatcaagattagtgttaccttgtgtttcttatagatagtggtgttagatttatgttcatatcgactgtaaaccctatagttttcttgagcaactgcgtaatatagagctgagactgtgcttctcttctgaaacagatccgtaacatcttggagcacatgcgtagagcagggaacttgcgtttggaggtactgttttcgatttacgtataatacaaaaagattttacctgaatgatcgtttaatctttttttgtgatgcttttttcaggatgttatgcttctcaatcagtccataatgctaggtgcggctgatattcatgaccgatatagagacatgcgacttgatgttgacaacatgacatatgaggtaaagccagagcaaacccataatcatttatttgctcatcatactaactatgagtataaaatctgcaggagctgttgtctctagaagaacggattggagatgtttgtaccggtttgaacgaggaaaccatatcaaaccgattgaagcagcagaagtacaaaagtagtactagatcttcacaagaagtagaaccatgctgtgtttgtcaggtaaacaatatcagatttgcataaaattttgtatcgcaatcctgttaatgacttgcacttttgattcttcctattaataaccatgactgattgctaaaattgatgcaaaaactgtaggaggaatataaggaagaagaagaaataggaaggctggaatgtggacacgactttcatagtcaatgcatcaaagaatggctgaagcagaagaatctttgcccgatttgcaaaacaacaggattaaacactgcaaataagccacaaagataatgatcgaaagactgttgggttctaaccatttgtcgaatcttcaataccattgaagcctcatcagaacactgcaggcaagttggtgtctgcttttggggttgactgaagataggaatgaagggaaagtaactgagggggatagagagaacaggagaacctaagaaaaaactttggttcttctgaatttatttctataagttaattttaccaattagttttattattattattattattattattattattattattattattattattattattattattattatttattactagttaaaattttctcatacaccgctaaactaatcgtataaattgtttaatgctcactctatttcaacatataggaatttgttgaactacaatcagataaataaaaactgcagatttttaatggttataaaataagacatcaatctattatttatatagaaatttgaaaatatcatgtaatatgaaataaaaaaatatatattcaaaacatcttatcttattatataaaatatggttttcaaagttactaattcataggatcgtgtcacgtgtcaagtcaaacgatcaaatgtttcttattatataaagtatggttttcaaagttactattcataggaccgtgccacgtgtcaagtcaaacgatcaaatgtttacatatgtcactaaaaatttaaattttttattctcttaaaaaaatagaaaatctaaaaaagtaaacaaatttacatatactaatttatatgtctcgatatatatataaattttacttttattcaacaaaaggaaaattaacaaatttgtttttacatgtgttattggtcatttaaatgtagcacatattaatttttttaaaaataatttagtatggataataatactaattaaaaagaccattgaaatttaaaatagtaatataatttatttaacattagtttagttggataaaattatatttgtcaatgtaatataatgttttcattcgttaaatcaaaactcaaaatattaatgaacttataagaataaatttttgaatacttatgttttaacctaagaattttaacgcatcatacgatggagcgtcttgcatcctttgatgtgttattatacctatgttttattctaaaaattttaactcatgtaatcataagtgaaaataggatattttgagaaaaattggttataggatttaacttttcaattacttttaatgagaatattttcatttattaattttaactcatgttttagatatagacataatttttttatttttcgccagataagataagatataaatttattcaaatatttagtaatgatatttaaattttgaatagcaaatatgtcaaataataattcatatatttttaaaatatttaattttgtatcatacacatttaattttaccatacattttaaatatttatttatttatagtaaagtactttgttagtctatacattatctctttttttgtaatgtgtagggtcaaaagcttcctacgatgttttcataacataaaaattacactcgaacatagatcccgtggaaacaacgtctcatatgtatcctctaacaacgtcagacttacaacactcagacaaacatcaaataaattcagaccaagcgataacgaaaacgcatagtttgttaattcatctgctaggcgattaggtttcatacacacatgagtaaactgcactatctagttcatatacactccatcttattgatgatatttcaattttaaatagtaactcatatacttttcagtatttaatttattatttccttaaaccaaatttcaatcttacaatttcgaatttgcaatacaatttaaatatctattttatgataataaaaataaaatttaatttgattgtataaaattcaaatacaattcgattttgcaatagaaaacaatttaattctatacactccatctactattaattttccattatagttataaattagtatatgtaaatttgtttattttttttaggttttttctcttctaagagaaaaaaaaaaagttaaaatcttttccgatacatgtcaaaatataagatcgatagatttgccatgtgttacgatcgtatgagttattaactttgaaaatcatactttatataatacaaaacatgtaaatacatgtttatacatatatttacaactaaaaacatgtgtaaaatctaatggatttttaaatacatgcttttagctcgaaaaaaatttgatacggagaaaaaaatttgacgggaaataacatacgtaaatatctgatcaaattatctatagtacgattttgacgggaaaaaaaattattttaaaggaagagcttaactttgaatctcactaaaccagatcatacataatcaatcctttcttttatctttttttttcttttcattacgtgtaatcgtgttgtgtctaatatatcagtttgatttgtaataatttgaataaaaaagggagtgttgttatctttaagtttgcccaaaatctatagtcatgttcgatgtaaacgtatcttaaacaaaattattaaatgttaaagatagtaacatacaattattaatgaataaatgtttaactaattaaatatcatttagtgattgtcctataaaatctcttgttttcttgtttcatatcatcaatcttacattcaaaacttaaagtattcttacatccaaaaacaaaaacaaatatggcaaaatctcttctcatggtaatgctcgtgtctatagtaatgttttacatggctcgtccaatttgctcccaaaaaattaatccacattcacaggagatgccagaagatgtggccatatctccatcttcagattttgattacgtcgaagctcccgatgaagctccattcgaagaagctgattcacccgcaatggaatatgatagggagcttgctcaccattactcggacaaacagctcaagtttcttgaggcttgctctgaaaagccgagttcaaaatgcggaaatgaggttttcaagaacatgttaaatgagacaatgccaattacggaggaatgttgtcgtgatatattgaagatgggcaaagattgccatctaggattggttaaactcatatttgccacatatgagtataaaaatattgcatctaagggcattccaaagagcaaacaagcatggaatgaatgtattcgtagagtaggtagcaagattggtgctccagtctcttttgaacaataaactaatatttttatgtgttgatgtgtctatgggtttttgtaaattgactattatcattataaaacaactgctaccattttatttttgataatcaagaagccaaagcctttcaagattttacgtttctattcatcatttgaattaatctatccagcaaaaactaaaaacgcatatgtaaactaaaaacttttcaaatataacatgatttcgccaggatggtaaaattttctaaattcaacatttattttcgatctactcggatatgaaatttaaattatatatatagactttcaaagttgaatttcaaaatataatttaattctcaatcaaaggtaaatagtgaaaatataaattactatgtcttaattatattttaacgcatgtaatcataagtaaaacacacaaagtgtttggaaaatcaagtttataggattgacttttcaattacttaataagaagttagtatacttgtatttattaatttaaactcatttaaaattagtttgcataaggtaaactaactaacgagattaagcatctataaaaaaagtattttatttttaatacagtatagtttgatttttttttttaaaggataacttgcagatttgctaaaagggaatacctaagagctcacaattggatctcttttcaagaaattttatcttgcatagatttctgttggatcgaacattcattttattttgtttggacatctaacttgacttgatttttctcattgaaggttttagatcatgaaacgaatcaaacatgcatgacttcttatttaatttacaactctctattgataaatgaccgctcatctttagtggtatccagcttaaacacctttttcttctttctaacctcatgcactcttttttctactaacttatatgtagttacgtgcaaaaacgttgaagaaaaaagagcgagacggtttttcgaccatattagatgagagttttggaaaaacaattggtggagtaggaagatccaattttagaactaaaaattctatgggattcacaaaataatgcacattgcgtgctcatgaggaaaaaagtaccgtttcatgtttcttagaaaaaaccgtgaaatctgaaactgaaaggaaagaaaatggttactattcataagagtctcatatataggaaactcccgacaagaaccatggatcacttaacagagaggatgagtcatttacagaagacacccacacaaaaaaaaataagtccaaggagttatgaaaaagaagaaaatgcgttaaaagatgtactggtgttggattcatccgaaaattgccaagtagaccaaaagtcaacagaacaacggtcaactcagtgtgctcccagactgaaactcatggctgaagccaagagaacccgaagagttcatacaagcggagcaaagaggagatgatttcaggatgggcaatgggacgagcgttcggaggcccatgaatggtctataagaattcaaatataaacgttaagaccgacatatttaagagcaattattacatcagttagctaattaatgcaaatcattgtatataaacatgagaccctaattagttagctaattaatgcaaatcattgtatataaacatgagacccccccccacccccccaccccccacacccacccccccaagaaataagggggtacatcaattttttgctacaaagctactatactattttctctcagcattttaaacacattttcatatttagtatacaaatccattcttgtacccacactttttgatcttgagagcttaaacccataaataaacaaaatacttgagtgtgtgaatctggtatccatattttggtaccgtctatagggacgctaagttctcacgcttttcagaaatctcaaactccaaacagattaccatggccgagggaaattgtaccaatcaaaccgttactgaccctatcaggcgtaactcaaaagtttacgaacgtggaaaaatccgtaactgaccttcaaacttctcaagtaacacttaattgaaattttgataaaattaattcttgtgtggagccaatcatcgagggatccgtcgtacaattttatatccgatcctcatcatccatttcactcgtttgatccgacatcgcaaccgtctagccatctgtcaccatgacattgatcttaatcgttgataattcgacatcaaacaagatcaaatctgtcttaggtatgtatttttgtttgtttgataaaactatttatggttttaagtttttatctcaaggaagatgtaaatagagatctatgtcatcaaattcgacttaactaaaccaatttaagctgatgtcaagcgataaagagagatcacacggttagtcaccatttaccacccactatccacagtccaccattccacccgatacaaggtgacattgttcttaacctaacgctactctttattttgtttacttgagacatttttgtccaatttttacatcaatacgttttgtcaatccaaaagtttttattgagtcaaaactagatttaatttttaaaagtttacagatgttatgctaattaaaagttatattataattataaagttataaaaccgtatcaaattattatataaagtatggttttcaaagttactaattcataggatcgtgccaggtgtcaagtcaaacgatcaaatgtttacatgtgccattaaaaatttaacttttttattctcttaaaaaaatagtaaatctgaaaaagtaaacaaatttacatatactaatttatacgtctctatatatataaattttacttttattcaacaaaaggaaaattaacaaatttgtttttacatgtgttattgatcatttaaatgtagcacttattaattttttttaaaataatttagtatggataataatactaattaaaaagaccattgaagtttaaaatagtaatataatttatttaacattagtttagttggataaaattatatttgtcaatgtaatataatgttttcattcgttaaatcaaaactcaaaatattaatgaacttataagaataaatttttgaatacttatgttttaacctaagaattttaacgcatcatacgatggagcgtcttgcatcctttgttgtgttactatacctatgttttattctaaattttttaactcatgtaatcataaatgaaaataggatattttgagaaaaattgcttacaggatttgacttttcaattacttttaatgagaatattttcatttaaaattaatttccatgatgtaaaattaacttacgagattacggcatataaaaaaaaatattttcaacaatgtttggtttctaaatatttttgtagatttctgttttttttagttcattataaatttatatcttagatggtaaaattatataaagtatttgtaaagtattagagttgtatagtattattataatttacaaatatttttttttgccccatttttattatataaagtatggttttcaaagttactaactcacgtgatcgtgacacgtgtcaagtctatcgttcatatgttgacatgtgtcaaaaactatttacttttttcttaaataaataggaaaactaaaaataaaagaaacatagatatctaaaatatttaactttattaactaaaaaggaaaactaaaaataagatggaatttataaaataaaactatatttgtattacaaaattgacttgtatttcaattttaatataatcgaattaaagtgtattgtattatgataaagtagatatttaagattgaaatttggtttaagaaaatattaaattaaatatttaaaaagtatctgagttaatatataaaatccaaatatcaactataagatggagcgtataaaattaaaatgtattttcttatcctgaaatctatactattaattgggaatcattaaaaataaacaaccttatttagggtaaaatattacacagaatgccattgattgttagtgtttttaaatatattcattaacgatacaatagtaatcacaaaattaatagatttaaatataaaaaatggtaatattcttttaagcaattattagtttcccaaaattaaactcactttctctttcctattaattatggacgaaaaattaaaatttatttcttaaaagttgttaaccaataaaaattgaaaaactaagattttatatcaaattatactatattattaaactaacattttggaagttaatttttattttaaaattttctaaaatcataacacttgcttaataccatgaataaaaaatcataatttgtgatagataaataaattcaattctagaatcttgggtttagtattttgaaatagaaaacgaaaatttatttcaaaatttctaaaaactagattagatgttacaatgatttctatgaattaaacaaaaataattaatttaaagtaattatcattatgtgttacatttagaaatatctaaacaataaattgtacatactaatttcgaaatatttggggttttattttttctttttttcaaccggatctttttttaaataaatccataatatattattgaacaaacttttaaaataatgtaaactaattatacatttttcattcaaaacaaattatccaaataaattgcttttataggtgtatttcaaaattttaattatattccaaaaatccaattaattatgattaaataagagaaagaagaatatttaaaatgtagcaaatgaaataaacattattacatttgttaaaatatatttttttacaaaattatttgttataatgctattcatatttttgaatttgaagaaggaaaaaaaatcaagaaaagatatttgtgtgttttaatttatgatatatttgtaaactttaacatcctatatgttaatccgcaaaactcagtcatatatacattggtatttaaaggtaagcaaataagaaatgaaaataggaattatgagacacaaacggcatgaaaagaaagagaagtactatataaaataatttgaaaccaaactggacatcaaattaaatatctaactagtatgagtttgggttatgaacactatataaaataattttgtttacacacataaccaatgtatatatgacacacaaataattttgtttacacacataactggtatgagtttgggttatgagcatgtacgtattttgtgacacaaattctatttgtgatggttacgggttggtagtatttttatttcacatatagagacaggttatgggacaaagaatttatgatagatacatcacatgttttccattccaagaaatataagtcaaatatacgtttttattttctaaactaatcaaaacattttaacagtttgattactggtgtaaaataggatataaatttggttttagtttgggttatttctccgtgtgagtccgaattttaaaatataactatacacgaacataattgaacttcgattattactcttaactttataatatatatatatatatactattacaaagtttacttataacaatatattatatatttttaaaatctattaaaaattgatattttgtacgtatatgggagttcagatatctaatatattgtattataatttatatcacaaaataaaaaaaatctacattgaattaaaaatatgaaattccgcacgtacgtgcgggtcaggatctagtatatatatattttttgcagcgtataaaattaaaatgtattttcttatcctgaaatatatagttaaaatgtatagtaaaattgaatgtgtatgattaatattttgtttaatacaaaaattaccaaaatgaatgtgtgtgaatcactatttactattcaaattttaaatattatcgatcaaaatttgaatttatatcttacacccgcctatttagacgggcatgatctagtatctatataaataataactaatctttttaacaccctcatgttttaactcatgtaatcataagtgaaaataggttattttgagaaaaattgcttataggatttaacttttcagttacttttaatgagaatattttcatttattaattttaactcatttaaaattaatttccatgatgtaaaattaacttacgagattacggcatataaaaaaaaaatcaacaatgtttggtttctaaatatttttgtagatttctgttttttttagttaattatgttttgttaattgttaattatttttattactaactaggatatagatttgatatgtcagaaatattattttgatatgaaaatgttatcatttaaaatgaagtgtgtagaatttagatcaagtttattatgatgacatagatagttaaactgtattacaaaattgaatgtgtaagataataatttgtttttttttccttttttagatactaaattaaatatagaataagggtcggttactatttagaattc

SEQ ID NO: 1003 - DNA, 77424 bp, Arabidopsis thaliana
aagctttttcctactcacttgttggggaagctgcttcttggttgaagcaattgaaggctggttcactcactacttggagaagcatcaagatagccttcctgaacaacttctatgatgatgctaagtctgaggagctgcgaaagaagctgtctaccttcactcaaggtctgacagaagcttccaaagcagtctgggttcgtttcaagaaatatcaacgggactacctgcatcatggcttcggtgaggtacaacttctcggtaccttgttcagaggatttgattggagatatcagatggcttgatttagcgagcattggtaacttcaataccaggtatccagcagatgctactgatcatctatttcctgagaataccctaaatctgacgttttattatcttgtcttataacctccaatctgcttattttactttcttttatttactcattatctatctagcttaattttgatattttagcctattgtgtgaacaaaagagctttgtggaagtcgaccctaaagtactatcgacgatctcttatttgagagagtggtcttaaggcatttgaaacatatcatcaagcgaaaggaaaacgaaccaacaatgccttagaaaggggaatttcaagctctaattttcgcaatgcagaactgttggagcaaaggaattattagagtgtgttttgaaggggacaacaaggaagtaacaaaattactcactggacaaaaacttaactttggaatcttcaattggataagggaagcaagaagatggaggtttcgattcacagattgcaaattttcttgttgcaaaagggataataacaagccaacagatcatctagcaaaacactacttaccaattaacacttcttttgttttttcataatttgatacctcatgtaatatcttctatgctacacagcgattttgctatataaagtatagttttcaaaggtactaattcataggatcgtgtcacgtgtcaattcaaacgatcagatgtttacatgtgtcattaaagatttaacttttttattctcttaaaaaaatagaaaatttaaaaaagtaaacaaatttacatatactaatttatatgtctaaatatatagaaacaatttacttttattcaacaaaaagaaaattaacaaattagtttttacatgtgaattggtcatttaagtgtaccacatattaaattttttaaaaagaataaattttcgaatacgtatgttttattctaagaattttaaggcatcatacatcgtatgatggagcgtcttgcatcctttgatgtgttactatacctatgttttattctaagaattttaactcatgtaatcataagtgaaaatagaatattttgagatattatataaagtatagttttcaaaggtactaattcataggatcgtgccacgtgtcaattcaaacgatcagatgtttacatgtgtcattaaagatttaacttttttattctcttaaaaaaatagaaaatttttaaaagtaaacaaatttacatatactaatttatatgtctaaatatatagaaacaatttacttttattcaacaaaaggaaaattaacaaattagtttttacatgtgaattggtcatttaagtgtaccacatattaaatttttaaaaaagaataaatttttgaatacgtatgttttattctaagaattttaaggcatcgtacatcgtatgatggagcgtcttgcatcctttgatgtgttactatacctatgttttattctaagaattttaactcatgtaatcataagtgaaaatagaatattttgagaaaaatagcttataggatttaactttttagttactttattgagactatttttatttattataacttttcaattactttcatatatctaggatatagatttttatttgttataacttttcaattactttcatatatctaggatatagatttgatatgtcataaatattattttgatatgaaacttaaaatgaagtgtgtagaatttaaatcgagtttattatgatgacatagatagttaaattgtgttacaaaattgaatgtttaagatataaatttgtttttcttttctttttagatattaaattaaatatagaataagggtcagttactatttaaaattcaaatatcattgataagattgagtgggtataattaaaataaaatgcataaaatagaaattttgtttaaaacaataattattaaattaaatatcaagaaaaatatattgattactatacaaattcaaatactatcgataaaaatttatttttgtatcttatacccgcctaaataggtgggccttatctagtagtataatacaatgatctattcagtagaaaaaaaagagacaaacccctctatttatacaagattatgacggtttatcatgaaaagttaaacttcctattctttagggcttggatcttcttatttcctgcatctccgagattctcctttgtctaaaaggaaaactttttttttctctgatttaggaagtcggccaggcgacctctttacaccaggttgatcggacgatctcttctttttggcctattaacaagctaaaccagagtaccccggtttgactgaattctcagtttaattcttaattcttctggtttaagccgatattgtcggatgtgctaattcttgcatcaacaattagtcttcccccattttcggaaatttccgaattaaggaagtgaatattggcttatacattaggaagatgcgaattaattataatataattgcgtgtcgttccacattctcggacgcatcaggctgcttttgaaacctgatatcgctggagatttcactgtcctcgtcagattctttgaccgaactagagtaccataatgatcaagaaggacaaggtcagcgtaagagatctttaatgttccaatggatttggaaagaggattgtctctattggcaacccatacataagttctctcagagattgacttgtagcaaatcccatgataccaacgatcaccatttagagagcttgctgtagttttgaagaaacctagctcgaagacgttaccgtgagacacaatggttcggttgcttgagattgttagagtttttgtagatgacaaagtattgatcgagaacacataaaaaatagagctaataagacaacgaagaagaaaaagaatgtgtacgaatggtaatagtttggtgttacgcctctcatcttcataatttggagaagttgtagacagattatagatgatggactctgtgtgtgtcgttctgtttttcaaacacctagactttattttttcaaaaaagaaacacagttcattaaaaacaaccattctctcggcccttgattttgtttctcataaaaaaaaccaattcgtttttaattgtattaaaatttaaaaggtagcctttttattttttattttttattttttataattaattattttaaaactaaccgagccgattcaaccaaatttatcctaatttaactaaattttaaccagaaaactaaaaagttcggttaatttcgataacaaaataaaagaagcaaaaaagtgtaataatttcgataattgtgttgtgtctactatattactttgatttgtaatcatttgaagaaaaaatggagtgttgttatctttaagtttgcccaaaatctatagtaatgtttgatccaagacaaagtttaaagttacaacttgtaaaaatagcatagtgtctaatgtaaacgtatcttaaacataattattaaatgttgaagttagtaacatacaaatattaatgaataaatgtttaatcaattaaataccctttagtgattgtcctataaaatctcttgtttcttgtttcatgtcatcaatcttacatctaaaactaaaagtattcttacatcaaaaaaaacaaagatgacaaagactcttctcatggttacgctcgtgtctatagtaatgttttacatggctcgtccaattttctcccaagaaattgatccatattcgctagaggtgctagaagatgtggccttatcttcatcttcaaagtttaatatttacgttgaagctcccgatgaagctctattcgaagaagctgattcacccgcaatagaatatgacaaggaccggtacaaaatacccgattttattgcggcttgcgctatgaagcaaagctggatatgcttaaatgtggttttcgaaaacatgaaagatgagatgatgccaattataaatgaatgttgtcgtgaaatattgaaaatgggcaaagattgccatttcagattggttgaaggctggtccgccatgtatgtgtatggtaatagtattgcatctaaagacattccatatagcaaacaatcatggaacgaatgtgtccgtagagtagggagcaagtttggtgctccggtctcttttgaacagtaaactaatatatttgtgtgttgatgtgtctatggatttttttaatttgattattaccattataaaacaacaactactattaaattggtaagcaagaagcctaaccgttacaatattttacgtttttattcatcatttgaattaatccatccagcataaactaaaaacgcatatgcaaactaaaaaatttcaaatataacatgatttcgcaggggtggtaaaatgttccgaattcaacattcattttcgatataatcggatagaaaatttaaattatatatatagactttcaaagttggttttcaaaatatttctaattttgtattattattcttaaatattgtttagtggatatggatatctataaagcacggatcatataaatttccgattttctaaaatatatcaagatatccagttttcatatctaataataaaggccttttttgacatatatatctggacctccgtcgacataatttctcatatccatgagctctcagtccaaatcacacaaccgacccaccatttcggatatccttattcgcaaacccggtagagttacaatccttagaacacctctccttacattcattcaacccaattgtcttatccacaattgttgtgcttgtctccggcagcctcatcatcttcatcagaataaaaaccccatctccgtggtagttgtcatgtcgcaataactgtcacgaccacatatttggtacaaatcgcatttcgcggtcggtaaaacgcaaaacaagttccattccgatgatgttgtatcccatctggatatctctaatatataatccttcgggagtcagtgttaatctcacgtagtgcgtgctatggtcggtaactttgaaattgtaagcaacttcctctctattgtctatgaagttgttaacaacgtcagagtagctcctgttttgcatcgtcggtatgccactaaacccaactccattccatggaccggattggtacaatagaaactctttcttgtaaagataaaactcatgtagccttgagttccgagtttgaacgagaagcctccgcttaagggagtctccaaaaactgaggaaagtctcgtatcctgttttgagatcccgaccaatcttcatctctgggagtaatgtgtccaccggataatcaaagctttgccacaagaatcggttttgatagttgattttggagtctcgaagcacgaagttgccgttatcgagcagctctgccaccactggagattttaccgttctcgtcagattctttgaccaaacaggagtacgagaatgatcttagcgtaagagatctttaatgttccaatggatttggaaagaggattgtctctgttggcaacccatccataagttctctcagagattgacttgtaccaaatcccaagataccaaccatatccatttcgagagcttgctgtggttttgaagaaacctagctagaagacgttaccgggagacacaatagttcggttgcttgagattgtcagagtttctgtacatgacaaagtattgatagggagaaacaattgattgtcgcccccaaaattttgggaattttttctttacaaaaaagcccccaattttttttttcccttttagaaattttttaggccccccaaattttagggctgacagtgagtattgttcgagaacacataaagaaacagagctaataagacatcgacgaagaagaagaaagtgtaagaacggtaatagtttggtgttacgcctctcatcttcacgattttctttctttttttggtaggcgtacgactctctttcttatgcttttctttgtttcttaaaacctatatttatagatttcttcacatgttttttttcttttgaatttaatattaaattatattcaagaaaaaataaacatgtttacatcaaagtgcatactgtttttaatttaaatcatgataggaagaactcatagattaaaactgttgtcatgattgaaaccaaaattgtatgcctcctgcgtactttgagtcccctccactctgaatggtgcttagcctgctgcgaatgtttttgtcgatcatttttacaagtctcataattgttgagtgatcttcactgtgtttcctgttatttcgctctctccaaatagagtgaatggcattctgaaaaatgtaccgaaggatgagacactttgttttgccaagatcatttccttgtatcaacttgaggatgtctctccagctagctgtgaagtcggtggtgagaatcccctttgctagttcccgccacacctgaaaagaaaagggacataagaagaacagatgttcccaagtctccataggatcttggcaaaagatgcaacttgaatcagcttgtctattccacttgagcatccgagctccggttgttactctgttttttgcgactaaccaagtgatgaaggagtattttggagtcaagtaggggaaccagattcctttgtaatcctccatcaatggcctagtgttacgtatctgcatccacgtttctttcgaattaaaaacgtttcggtgatggtcatttctccctttccatagcccgatatcagtctcatcattttgttgtgcaggtttctggcttttgatagcgttttcaaccgtatttaagaggtcctgcctatgtttctttcttcgattcatggacattacctcccccacagttgcagtaactcagattcccaagtcaatacatcctcttatcccaagtttttcatatagacagcctatattactccattcatcaaaccaaaatgaggtcgtttctccatttttgacctctactctatagaactgttgtgctatccctctatattccatatccaagaaccgcaagttgtagtgtcttttactgccgagaaggagccttttcttatgaaatatttctttacccattcaacccacaaagatcctttagccgacagtatacgccatatcaactttaatacacttactttgtttgcttcttcaatcgaccgcagccctagtccaccttcattctttggtgtgcagacctcagtccatgccacttttacctttcaagggttcatcgatggtcttgaccacagagaacttgaacacagtttatctatttcttgaaagcatgctttgggcagccggaaagcagctatccaaaaatttgtaagactgaagatcaacaaaaatttcttcacatgttgattttcaaatttggaaaactctatacaattgtttctagcagacaagataaatgtaaattttccacgttctatgacttttcagtacctcattgattcacttcaacagactactgtcatcattagtcgataacgtcaccatgtgaaattaatttgctcgtgcaacataacatatgttgttcaacaagtatatttattcatccatgatcctcgtcccaagaaagtcatgctatggcacttgtaaatgcatccaacgttacgttcgatgtattttaatctcctcgatcatggccgtgctatctttttttattatttgttttggccatgcaaaaatattgctacttcatttttgtaattttatcacatatataaatgtttgaactatgaaattctattaatttataaaagtattaatttatcgataaattaataattattaatttgtagagattttagactaattttgtaatttaaaaaaaaatattatgtctgaattttttcttcttctttataatcattatatttttaactttacgatggtaacgttaaacctcaaataataataaattattaactttagaaaataaaaaaaagaacgttttcgatgtagtaaaaagatattaaataaactttaccaagaattaatataaataaaaataaaaatattagcaaattcatatttcactatttttcttccgtataacatatatatatttaaaaaaacttttacaattattaatttatgatattaatgagaccatatatttacataaaattttcaaaaatttattatttaattaatatatcgatttgtgttattttttacattgatcttaactcttatacgataatctgaaaacaatttaggctcttattggtaacacacataatgcagaaaatttgccaataaaaaaaatctgcataattgtattagaaaacgcaaaaacgtaagatttgtatttttgttttaagtaaaaattcattatgccaaaaagtgtgtatataattatttatttgcataatataatcttattattctatgcatacaaatattagcaattgtaaaaaaaaaagtatcatagtttacacaaaattatatcattagtaatacaaaaaaacattttcataactttttaataaattttaattatcttacatttttagtatcgaaaattactcaaatatactaatttgttttaaacattattttttattaagtttatatatatatatatatatctacatatatattgttaatataatattttttttttaacaacttcaactttattaaattgtataaggttgatacaaataagaaagtaagaaacgaggagggacaataaagaactgatacagagtagtagtagacagaacgtattgagccatcttatctgcagcactatttcgttcacgattgacatggagtagagatacgttggatagtttggccatccaatgacgaatatcgtaaagaagagcccctatcagagaatgatcatcaccattattgatagttgctataagttcttggttgtctccatcaaaacaaacattttttattccacaagcccaaactacttgaaggacatgtaacaacccggtagcttccgcctgtaaaggtgaattagtcgatggtagttttcaacagcctgtaattaaaacctttccttcatcgtcccttatcaaccatcccgtatttgtaaaggatcgtcccagcataaagccactgtcaaaattacacttcacccatcctcttggtggtggtcgccattgagaacctctgtcatgaaccgtattcttgtttgtttgactacctcttgtgccttcagtataactgtttgcttccagccattcatttgcctcgtgtcgtcctatgtgttcttcggtttgtggcagtctcatgatcttcttgaaatatttatttgtcattttgcaaaatatatccaattaatatattttaaaattagtttcattcgacgattttttagtttgcaaattttcattctgcgaaatttttattctacaatttatgtcattatgctattatgcaattttagcaatcggaaccttaaggaaaaaaaccgacaagcgaaccgttctgtatgtatttcggttattttcagccagccctatttatttggttaagcttagattaaaaagtttcggtttggttcaatttgatatggtttggaggtcaacaacaaaatcaacgaactgaataaagcgatcgcgttggttctcttcttcaaaacaagctctctctgtccctctctgtctctctctttgggtaatcggaaaaatcagaaaaatgggaaccctaggacgagcgattcacactgtgggtaatcggattcgtggaactgcccaagcccaagctcgcgttggttctcttcttcaaggaagccaccacatcgagaaacatcgtaagcttccacttgcttcgctctattgaaccctagatccaattctgtatctctcatttgtatcaataatttccttttgattcgagaaatttgtagtttagattgaaaactttgatttgagaaatttgtggtttgttttcagtgtcgaggcatcggacgttgattactgtggctccgaacgcttctgtgattggtgatgttcagatcaataaaggctcgttcatttcgtatgcaagtgtttctcgtggtgagcctcctgatttctttacgaatgcattttgtagatacattgattaggtgttttgagaggtctatttgtgcgtgcacttcgtatttgactgtaaaaatacgcagatttgcagtatcctcgtgcaatgggaatgggacaggtccggagatttagcgaagatgtttctcacatgcctgaaatggaagactctgatgttctgaatgcattcaaagacttgatggctgcagattgggctgagcttccttctgctgttgttaaagatgctaaaaccgcgatatcgaaaaacacagatgacaaggcagggcaagaggctttgaaaaatgtgttccgagcagctgaagctgtagaggaatttggtgggattctcacttcgattaagatggaaatcgatgatagcattggaatgagtggggaggtttgtttgtttgtttccttcactaaaccattttcttgatttctggttgtttgatgttttagttgtattgtgtgcagggtgtgaagcctttaccaaatgatataaccgatgcgctgcgtactgcttatcagaggtatgctgagtatctagactcctttgaacctgaagaagtctacttgaagaagaaggttgagatggagttggggactaagatgatccacttgaagatgagatgcagcgggcttggttctgaatggggaaaggtaatcaaatctgatctatactctcaaaacacgtactctgttgatttgcatctttgacagcatcatataagctagaataagcctgattaaagtatgagtttgcataattatttacgatttcaacttgtcctccaaagtctcactcgtactatatgtgatctttttttctcaaccttatgcatcttttaggctagctatccgaatgaaatcatatagaatttggcagaaactagtgttttcatttagacgaaaccactgaaccagtagttgtcttgctaacgctttgttttaatatttttgtaggttactgttcttggaacctcaggactctcgggatcttacgtggagcaaagggcctaaaacaaaaagagaagatctagaattacgtgcgaagcttgttatgttgttattgcgttattttgtcttagcacataataaaggtcaatctgaccaaaagacatatcaggtgagtctgttcattgtttcctccaaatgaagctttaaaatttagagcttaacaccaattgaaaaataaactcacatgaatttgtgttcatttgttactgtttccttttatgagagatcttttgtttataatgattcaatattttgagctacctttttgtcaaacaaaaggaactggagtaactcttgtaggcttcctccaagaccatgactctgcaggtgactttggaagcggtggaagcaacgcagcttttcgtcccaatccaaatggccatccttggcaatgacagaactcttgaatcactgatcctttcttaatttcattaacgtaatgcatcttccattgattctccagctctaaacctttcaagcttgaactccttgagaactcagttttcgctgtcatgtatccttctatgctgatatcactcatgcaacattccgaaaaactgcttcttaccgaacagaattcgttttcgatgtcatattcttttacgaatttgtaagttagcccctccattcctgtccttcgcttcttccttagtttttccatcgcccgacttctgatctcgaaaacaacaacctgaaatcaacaatcacaaaacgaaaggttgtgtaattcgtgtaattcgtgttgtcgaagaatagttatagaagaaagcaaaaatgaaaaacaaaggcaaatgaatgagttttctagttacttcatggtcgtagtcaaaatccccgataggcttgttatcatcatcggcttcgtgatcagaaagtgtaacttttctgcctttgcatctgtaacaataagtgatagcatctctcacccctgtggcaacgtcgtcaccgcaaaataccattctcagctgcaaattttatttctaaactcaatgatttgtaatagaatacaaatgagtgaaaggttgaaatctctagataatttctgagtttaggatttatagacaaaactgagctgcacaatgacagtttatctaacatcacttgtgttcttttcaatgcacgcaacaccactttcgttttcatacctttctactgtttattatctgatgaacaattaaagaaatattacgaccattgaccaagattagattctgaaagtacaaaatcatcctaattaggcttccggatattaagacaaatcagggttaagtaaatagaaaacaactttacgaattcatctcaaaaaagttctaagttgattatgttgaaaaaatatcatatcttacttgaagcaaaatacatgaaagtgatagagaaactataagacatggcaccaaactaacgttatcatgacacgcaaagatagtatagatcttcttttctgttttacattttgtaatttttcttactcaccaataaaatacgtgtaaaacaaagaaatcgaccttatcttaaccttcttcaacattttgatattgtggttatattcaataattaaaagaaacataccttcaggatctttgtttgtaatctatattccttcaagaattaggacatttttacatcctcgagaagctaactgtactttagcaaaatatataacagaagcttagtgtatgtttatcaatggtttttcttctgaaatgtctttggattctgtatagatctattgtttttcttttgacatcatatatatcttatttttaggaaagctctaaatctatgaccaccattatttcattcacatgctcccacaaagtcataattacaccaagaacccaactcctttttggccgtgccttacttttatcccaaaatttgatttatttgctttaatttccacattattaaatttacaacgaccatctatatataatcataccattgccttctcgatttgtaattgactgggccatttcttttagtaatttggtgttgttgaatcaaaacataccatattgctgttacaatatttctctatcataggcccaagctaattgagtaaatcttattgtataaaacttgattcatctaattaaactacgtgaatattattagtacgtcttttcatacttttttgacttttgagtttattacaatcctgaatttagatcattatagtaagttatactatatatatacttagtgtacaatataacattccaatctatgttaatgttagatagatattttgaattttgatttatcttcaattattgtgatggttagaagatgaactctaaaatttacatatatagaaaaaaaattgcataactcttatcactgcagtaaaaagatttttttttatttttttttggcaaagtaaaaagaattatttatgttcatcactcgcatataactaatgaaaagatattgtaaagagaagattttaaagaattttggcacaacaaaaaaactgataatcaatacgtgtgaaacctaaacaagtgtgacaagcataatatgttaatttatatatttgtatcaattgtgcatttaaaattaaataatattgtaattcgatttatcaaaatatttttttaattttaatattatattttaaaattttaaagaaggattttgttttttgtttttttttggcaaaacgaagttttggtttctagaagactccttaaatggtatcatgatactttaactaccatgatcatcacaatttacaggctatatgtaatgatactgcactattttcgtttattttttcattaaaataaataaagtgaaatcaagtgagcttgagagaataaaatgctcgacgatttatagtgaaagtgttaagtagacaaaacataaaggaagccctagggccgttaaataattaatatacgaagtacaaaatcatggttggttcactacgctttagcctaatagagataaaattcattcatgctgctggagcgtaatcatagataacgtcatcatcgttgtcaccgttttcgacaaatgcagtttgagcatactcaaatacttgatcattgttagcgatgttgactccaatgcatgtttcgtagacattctcatgtacgtagagaacaagttcggagacagaaaccattttttttttttttggaaacgaaatgcttatcaagcgtcgaagagaaaatgcaaaacaaaaaagattgatttgagtttgatgagaaaacaagagatcattggactctttataggtgaaacaaaagtggatgtatgtttggactcgtttccgtcttctactgacctcaataaggagtgtgacatgctggtataaattgtggaatagcacaataaaaattacgaatcccactacactctttgacacatgggatttattctgacacgtccgcccacacatattggtttacacttgttgtttggctactttaaaagaaggaaagttataaaagttaaagctttttatctcatgagaatattatttgttgtggcaacataatgtcgtttgtcgccgaagtatttgtggtctagtagtaggggaagctttagtgagggatgaaacttccatattcgagttcaatcttgatccaattggtttcttccataaactaatgttattttttatagtgtaattaattgaataagtgctgctagctttacatgtgttggtataaaagaagtattttgtgccaagcacacttgtttctaagcatatcacacactttactgaggttgaccagagacacaatgagtccaaaaaatttctaacctttgtgagttttgttgcatatataaatatcccagcgatatctcatattccttcaccaacctcataaacctctttctgtttcctatttgctttatttagtattttgttttcttcattaaccaaaaaaaatatgttttctatttacaagtttgttctgtgcaaatgggaccaagttggtgaaacattcatccgaggagatgttacttacaataatggagaatttgaataccctcaggttgcatatgtggaaaacggcgacgatgatgacgacattatctaagattatgctccagcggcatgagtggatttgttactttcagtttttgaccaaagagtagaaaactcggttcttatatacgaatttgttgcttagggccttttatgtacttgttgagattattctcactggaaatagttggacacttggttttctcatcaacctctcttttatcattcttataactttcgatacaaatatgcaagagctcaagaaaccattaacgagttcataattgtgatatttgttaactagtcttcgtctaacaatgaatgttttttttttggatttgaatgtaaaaagtaaaaacgtttaagagttacgagaatgtagatcctataacattggtcctggccgtgacaaaaaaaaatataaaaaatatggaagcaaataacaattggtctatagatgttagcaaaattagtgacgcttttgaaatcaatgaagcgataaattgattttgagaaatcacttaaatgataccttaaagaagaatatacatgctgctaaacagcgattaccgattcatttatagccaagtgaatataagccttttcaccggtgggctgagaaaactaagccgtcaatggcgtagaacaataagtgttctttaaaatttagtatggatagaagtagagatttttatttatcttcatgatacacttcgttttcatgttttaatttcattaaaacaatttgatctgccactttgtatatatctatatgtataacgaataaataatcactgctttgattataatttttagtttttcagtttttaaacgaccaacccaaagttaagtagtttagtttttcacctaccatgtttgtttcaatgatcctaaatgtttttacgtaatcttctgatggatcaaaacttctacaaaattcaagttatttttttttgaatttaatgttaaattagattcaaaaagtaaacaaacatttgtacatcaagtgcaacttatacttagagagtagaaagaaaagttataaagagatttgaaagcttaagatcttgattgaaaccataattggagagccttctcatatcgatagtctccacttgcggtgatggttgatatttgatttcttatttgcttgtcaagccatcggattaattgagctgctgtatttggacgttccccatgtcttctaccatttctctcatgccatatggtgtgaatggctgcttggaagatataacgtgctagaaaactcttttactgtcccgccaagaagtactgagagaggttactaaagaggaccaacttgttgagaacttcgcctgatagatattgtttgctagattgctccaaatttctgcagagtagcagcaggagaaaagaagatggttccgtgtttccatagtgttgttacagagaacacaagttgatgacagtcccatgttccatttgagcatcctatcgccggtagtgagtctgttttgcaccgctagccatgtgcagaaagaatacttcggtgtggcatgagcgaaccaaattcccgtgtgccacgtaaccgtagctgaagttgtgcgaagctggttccatgtgtctctcgtggaaaattttggcctgaactcatcgtttcgtcctctccaaaattcaagttattaactgtctatatcctcgagctttattacaaccgataaattgcgagaattggaaggcaaggaatatatagatccaaatcaagaacaactcacatcatcactcgggaaatcacataagttttaaggactcgctcctcacattaaaagatcctcgatcagcacaagtactggacttacgctcatctcacaacatgttcacttacattcagttttcacatgagtaattttattacaccaattgaaatcatattttgtacgttttccttcattgaaaactatatatcaagttctcacttattttggtaaactagtcataaagatcaaactatcttctgtaaagttttaactttggcagtgaaaaaattaaataaccaacattttttttggaagacaaaatgtacatggattatatgctcgacatttgttttcttagcaaaatttatgtatgatttttaggaataacgaacccaacgaatggtaagacatcataaattttatttttcataagaatgttagcacatcactgtttttataaaaaaaaattagtaatgatctcaatgcgcataataaaacgttattgctttgaaatttttcgttcgatcgcttctataacgtgaaacaaagagctgtgtatagaagcaaatattaaaggatttatagtgaaagactgaaggtattaaatcaactaacataaagaaaccctagggcaaaaaatcattaatatataaaggtacaaaatcatgtttcatatgatccattcatgctgctggagcataatcatagatatcgtcatcatcgttgtcaccgtcttctacataaacagattgagcatacacaaatgcttgatcactgataacgaccttacctctcatgcacgtaccactaacattgtcatctatgcagagaacaaattcagaaacagaaatcatagttccttttttgaaaaaaaatgggaaaaggaaattataaattaagtgatgtaagagaaaatacgagacacaaaagtttgttaagagaacgagagatcgattggctatttatatgtgggaacaaaagttgatgaaaagtttagactcactcccgtcctctactgacctcagcaaggagtgtgacctgttgatagtaaatgttgaatggcacaatttaaattacgaaccacaatgaactttttgacacctaggatttgctatatgacacgtccactataaaatatattagttttacatttcttattcggggaaatttgtttatgaaatattatttttaaaaaagaaaagcaagagaaaagtgtagctttttttatctcatgggaatattatttgtagtggcgacataatggtgcataaagttaatttgtctgtattttgtaaatatattagactaccaacaaatcttgctgttttaacacatatatgcgtttttatttgccacgagtatagtgtaaactcttgttattcattaatgttcaggaatcttgattatttcgttgacgttttgtcttatttataggaatcgaatgttctttccgactattacaaaaatatcggaccaatttaacaaaaaacaagatttatgtagtgcatgattttatatacgtggactgtttttttccagcaaacactaaggctatttccttttcttttttgctaatcactaaggccgtttatatatatggtgaaaatagagtggtgccattatattatgaacatgataaaggtcttacgttcacatttatgttttggcatatttccatttcattttactagaaaacaacgcaagaaaattgaaaatagattgagagaatcacttatttaaggatctacaatgatgttatagcagcctgagccacaaattattataagaaaatacaaaatcacgtacggtgtatgtataattgtatattatccaaacaaattatctattcatatgatggatgcactcctgctgctggagcataatcatagatatcgtcctcattttggtcacctatttcggcatatgcagcttgacggtacttaatttctttatcataactagttgtatcgcccccaacgcaagattcactaatatggtcatatatgcggaaaacaaactccgataaagaaaacattctttttctctggtcaatgaacccaaaaaaaatgctaaattatgcaaatagaaaacaaagattttcgtttgttgagacaatgagagatcattggaatctttatatatatatgcaccaaaagaaagttaacaaaaatgtgaactcagtctgccttcagtgtaccctcaggtcaacctcactaaagagtgtgatgtgcttagaaacaagtgtgtttggtacacataacaaattgatttttctcaacacgtaggatttgctaacgacacattggaaatcatgatgtggtccagttcatgtaaagcaacatatagcattcattaataacagaacatcaaaatctttattttttctagacatcttatggaataaagctttacatgtaaagcatcaaaagacaaaataaaacatttagggtatacatatcgctttggctacaacgtgtcaataaaatagccagtccctgtttaatttcatattggaataaccgaatgagtagtgattattggaggtaaagtgagacttctagtatatatgtctgcgaaaaaagatcgttataaagaataataggtaacaatagatgttgccccaaaaagagaaaaaatgatgaaaaaataattttatggaaaacttcatcaatttcgtcatattgtttttcaattaattgatttcttttctttttttcatttagagcacttaactttgatcctttgacgaactgatatcctgtctaaaatttaaacggcacctagtaaaccaattgtggtgtctaggattaacgaaaattttatggtgttgtttatataattaaaacgatatatgcgcttcaaatgtattttaggattgaagacaaaaaaaatccgtaattcaaaaccctaattcaaaaccttagagttcttacaaaagtaattttaatttatgcgctctatcaagagatacggtaactcgaatcttaaagatggactgcgttttatttgttacgtaatagccaatgtcgtctatgatatatatagtcacttttatcggtctacaataggcaaataaaacagatgattactttgttcgtggataatcgtattttttatttattacttaaagatggtctcaatagccataaaaataatttgtccgtgaccaaagtaattgcatgttttatttgcctattgcagaccgataaaattgactatattcatcatagacgacaataatgcatataagatagcatactaactatttatcttccgaaattgatatgcatccatttacagatgacgcagcgttaaagcatttatttatgagactcattacatttatctcaactttttaccaatcaatatgaacggtcagtcaatttggtgtgactcgtaacactgacaccattttgtttgccttccgggatatgcatgtgaataaattttctatatgtattacgacatggcttatcatgttaaccatccgaaaagcgcctatgcgaggaggatgcgagttcaatttaccacaacaaacaaatccaaccaattcaataatgtagtactagtcgtgccagtgtggatagagcgaacgacaaattggtgtaccaagcaaacccatatgctttctggtatctaaatacatgggtcgcctccctttagtcttattcatattctgaattttgttcatacatgtgtgacttcgctttagtctaaaccaatttgttcacactttaaattcgactttttcgattggaaagtttcatgttgcgtaaatgaatagtaaaaaccagaaacacaaaaatctattaaaagaaatataatatcaaaaaagtaaaaattttggaaactagcaatattataaagttaaattaactttcaaaattaagagacaatatcaatccacaagtaaacatctatggaaaccatgtttgttcatctataagaagactcaccaaactatttagtacatacatggcctagctagatatctaaattaccttatcatctctgtctttttgtttcctcctaaattacaatcatatactaataggaaacaatcacgcagcaggagcataatcatagccactgtcatcgtcatcaccaccattctcactatatgccactcgagaactatctaccacatcttcaacatacacggtggaagcatggtcaaatctcttgatggccaagtttgcgacaaaagacatcattgatattttttgttggatatgaatgaaagtagagatatgaaagcaatgaagaggtgtaaagagaaagccacaagaagtatgatgagcttcaaatgttgatgtgagtttggtgaatataataagagagactaatgaggcttttataggtggaagccaaagatagaacaagtggggaacacactctgtggtcaagactgccttgtggagttttcgaattgctcatgttgctgtgtgtttggcacaatagttattgcatttttcctcacacgtaggattttaatatgacacatcagacgttaagtgagctcattggtccatttatattcctttctagtaacacatgtaaagcattttcctttatcactaatattcttccccaagctcaacaaaaataaaattaagaaagacttttggagctttatataagattctagtggcaacattggtcgcttctaaataatgtgattttgggaattgatatctctcgttatttattaacaattagttgtacatgtaccttgtgacctagcctgttcataaattataggttttgtcaagtgctaaattacacaatatcgtatatatgattccatgttatcggaatacactattttaaatattgtacttattaataaattttttagcaatggaacttaaactaaataaatagttcgggaatttaaactagaactagaaaacgaacaaatgaaaatattctagaagccagccaggtcacaacccgtgtccgtgtgtgacccaacgcaaaactaggtcatagatatcttcgtcatcttggtcaacgtttttgacatgtgcagcttgaccatattccgattcttgatcattattagccatgttgcccccaaggcaagaatcactatcaaggtcttatatgacgaaaaactcaacagaaaaaaacattttcttgtggttaatgaaccaaaacaaaatgcttaaactaagcaaaacggaagctagaagatttatttgcgtttgctgagcggaggagagatcgccactgggatcattatatgtgaaaaaaaaagttaacaatagtatgaactgatcaatctattaccatttcagcctcaggtcaacctcagtaaagactgtgatgcgcttagaaacaagtgtgcttggcacacatataatgaagagatttttcgcaacacattggacgaaatcataatgtggtccagtacttgtaaagccgcatcacattcaataattacaaatcgaaagaaatcaagacgtttacttgttctagtacatcctctagtatctttgactgattcgactttttatacctcctcaaacaaactacagaccaattttgtttttaataccaagaggttctgggctgaaaactgtaatcccttcaggccaacaatcacaacatgtaatattaggttcgtctcaagcgtaacaggaaccaacgacctctaaactacataccatttgtagaaagatatttagggttttataaattgtaaaactatatatgatttacgtacatgtaacatattctatgaaaccaatccatataatatgtatcacttgcactacagtactaacaaaaccatgaaaaaaatattggtctgatttctttgtgccataatttagccacgtttttttcatgatttggccataaattaaaaaatgagaaatatataactatgttgtgactagttatccatgaaaataatccatggctagttatcactaactggcaatggatttatagacaaaaaacaatttgccacgaagtagccgcatatgtttcatttgtcccttgagggttagttaaaacaattgtatctattttgaggcccttattacagtccaaaggagatatatatttgcgtaaaacaattatactgacaccatataaattttctccgagaatatgctagcttgataaataaatatttgcgcagtcatccaaaacaccaaaatatttatctacatgtcttgattttgtggagtaacagtgtcgaggtgtttcttatggtatttatctacatgtatacaaacacctaattattacaaactagtttgggtctgccgctctggatggataaatagatacgatgagctaataacgattaatgtacaaattcattaaccaaagaagattaaaacaaaaattagagaaattgatgaactaatgaaatacatgtatggctcccctttggtatactttcaaattgtaaaattttcacatcttgaatgatgaaccagttggttcaaactttagatccggatttcttcgagtgaaatttttaatcttgggtgaatgaagaaagtgaatactaaccacttaaaaattagtaaaagtgaatgttacactgataactttcaaaattaagagacaaaaaaaagtgattgtggttaaggactaagacactaggaaaccatgtttgctcattgacaagaaaactcgagacacaatctagtacataaatggtctaactaatatctaaattatcttatcatctctctctctctctttttttcttctaaattacattatactaataggagacaatcacgcagcaggagcataatcatagccactgtcatcgtcatcaccaccattctcaacacatgtcgctcgagagctatccaccacatcttcaacatacaccacggaagcacggtcaaaactcttgatgaccaagttagcaacgtaagacatcattttttttttctgttatgaagaggcctgaagaaagattcaccgagtgaagaagtgtgatgaggttttagtgttgatatgagtttggtgaatataataagagagactgatgaggcttttataggtggaagttaaaggtaaagcaagtgttgaacgcactctgtggtcagggatgcctctatggagtttgcgaattgctcatgttgatgtgtgtttggcacaatagatattacattttttctcacacgtaggatttggtaatgacacatcagacgttaagttaactcatcggtccatttatattcctttttagtaacacatgtaaagcattttcctttctcacttatattcttccccgagcaaaacaaagaaaatgaaaaagaaagtttttgagctttaatataagattctagtggcaacattggtcacttctaattaaaaattgcggaatgacttcaaactttaatctcaaaaacatcttccctatatctaaatagcttttaggttgcccatcaatcactttttgtaccaaaccttcccatctttctctcttgtgttgattgggaagatgcgtggtgttgatagcctttgttctcatagttgttgttgaattgcttcagttggaattatctacactatcgctgctatagaagaggatgttgtttctatagaagagtattatttttcgttgaaaatcaacataacagtctttttagtactaaatgtatatattgtctgtatgtgggttggatttttggcttcctaatccgagatttggggttaagctagccaagtcaacaatgtagaaaccaaacgacagcgcttcgtttgcccttttttttaacaaaataatgtccggctcaaagtcaagatgaagaacgagatagtggatcaagtttgctataaattaggaaattgtaaaaagaaaagaaaaaacgcaaaaaaaatgagcaacaacttgcaccatcaggtcttacaacgttaatttaggctgtgaacggtaaccaaaaccgcactcaaaactacatcgcaacaatgctgtaacagtatcaaaatctctacatatacatatgtatctatgtattttcgttactatttgaaccataccgcaaaacgcagtcaccattcggagctttagggtccgaatggtaaccgcggtttttgttgtgcggaaaaagcgttattatagtgcggtacggttcaactgcggtatgtgcgggagaaatatatttgcgggacaagtgcggtttgtacaaaataaacggtacaaaataatgtttgattggtgaaaaaaactacttgcggtgcggattatagattatatatatatatattaatatatattaataattataaatccgaatatattagatttttttagtaattcatatacatttaaatatatttgagataaaagtaaccaatgttatagttttctttttaggtaaatttagtattttggttattggtatatatgagtaaaaaatctgaaccgacccaaacccgaaaatattttgagtatttttggttacttttgcatttatactaaaataaccgaaccgatccgaactcgaatcgaaaccgaaccaaatttttagaatacccgaatggttcttaacatcatacctgaatagagccgatacccaaaagaaaaaaaaaaactaaatgggtacagatacccgaatgtccacgccttaaaaatatgatataaaaaagataaaaaatatgtatttagatacaaaaattatacatatacatatatttttaatagctaaagaaaaagaaatgaatatcattcatcgcgtattttacttgtaccacatggtaataagatgtttcagttataaaagggggtccatgtacttttacgctgtatatgaaaaacgcagtatacattttaagaaaaatataaaaaacgcaaatttgtaatgataaatgatgattggtgttctaagtgcggttctcaaaattctttcgtgaattccgcaaattatatgttaccattcacacccttagtgttttgttccctatttatagatgagatactggggaacaacttttcacctgattgtaagttaatatatagcatgtttcttcaatatgaattataataattcatgttgaacccatacattttctcaaattaattggcaaacatataataacatgtagaacagaacatataagaacagaacaaaaaaaacatgtagaacaagaaaacgcttttattgctatatcgcagtagctaacaaatgcttccaaagaaaataatttgggatagaactcagcatcgttagatgtaaactgagtccgtaaacattcaatctagtttgctataaaagttcgaaaataaattattatgccaagaaaaaaaaaaggaaaacaaaaaggaaaactagaaaacagaatatagttgtaaataaataacataccaaaaccacaaaagaagccagactaatgaaatcaaacttgtaatgctgcttttttagtttgacttcgaggtattgagaccaaactggggaaaaagctacaatgcaaaggccagggaccaaccacagaatctatttgaattttactgatcaacttattgtcccccacaacatagatccaagcttggccagtttggtcgcaagaacacacaacgagctttttatcgtcgatgaagtaacttgggtgtactaaaaccggcaagttaagagttgacacttccatgaaattcatccattccgctgaatccacatctccactagagcagtttctaatcttgttcttggtcacccaaatctcaatcttctttgttagatggcattgctttaacaacgaaagccgatcttccctaaaaatcctaagaacaagaacatcgtgatgatggttctccccacatggtagatcagaaaacttgtagaccttttcattggaaaaattgtagtaaaccaggacgaacaaggaattattctttagatgagaggcaacccaatacaaaattccattcagtgatacacttgcaccgaataaagtaacaccactactacaactcatgaccaaatttgtatatttccatgaattggaggcaaagtcatggattttccaaactgatctagtagggtctaattcattaggataagacacaagggtcttgtaaccactactctcaagtttcatgttatcatactcataacctatgccattgaaacacaaactaggttggtttacctttggctttatccatttagcctgtcttaaccacgggttccaaaccacgatgccttctttttccatgccacatagcaagaacccattgcaatcaatcaaaattttaggtttaagttctaaaccgggaatatccaaacttaactcacgcacttctatctttggagtcatgcttaccgagtagaacttagattcggttgctaagatgaatcgaaatgtcatcttgtggttgttaatgaacatcttatcgtcgaagagggcgttccatttcttagaaacggttctgaagcgaacaagagattcaggagggacacgagagagtatctcttcaatcagttcacacggaagcttctcctcaggagccattatctcttctttttttttttttttccgactctttttatatatatacaaaagttttcgtaattagggtttcaactgaatgttagtaaaatatatctcccaaagatttgagatctttcgaaacggaatttttttggattcacttttttttttttccttctaaaaacttttattagacaattagtattacaatagcaagtacaaagccaatacaaaacttcagaaaccaacttattacaaaagcaaaattatgtgccagaagatgacgaaactgaaaaagtgaatttaacgatgcttcctttcgataagtcttactcgataacatgttgttaaacatgttatgttcctctttcattagccatcttactcgaatgtgatatgtatgccatattggcattctttgtttgaaactccacatcacatacacaaagctcgttgctcctggagaaagttttgagaaaccgacaactcgataccaattagtccgtatcggtgtcatagtgcccattagaaaatttggcttgataccgaagtaatcccatccattcatacatctcaaaccaaagacgttgttagagatcttcacggcaaatgtctccgaagtgattccggggttccacatgcgtcgaagggcgcaaatttgcattaaaacgatgttggcaactattgctgccagactgagaagaccgggcatacccggaaaaacaccgtgaatgaaccatattatcatcacacggacaataacgcctttggtaaaaagaacgaagaccctaagaacgagaatcgaaatggcggcatcggatatcgatgtgaatccccaaacttgagacaaattcaaccatggatttgttaacaaaaacatcatcatatccagatcgctcccagacaaaaccatcaacgaaaacccatatcttactttgccacacgaagctattttgactgcaagaagggcaagcaatatcaattgggaatttggttataatcacaaaatcaatcgtgtcttttgattgagattttattttgaatttttttggattcacttttattcacactttctttttctacgcaatcaaaatctactacaaatatatatatttaattgtaaaatattttctcccaccaaaacaaagttataatatccttgttaacagaaaaaacaaagtaatatattggttttggatagtaagggagggttagagtttataacagagagtaagagtttatgttttataattaaacaaggttaaatattagtttaagtttatgaacgagtttagattttataatttaatgaggtaaaatgttggattcagtttataaaaaacggttaggggtttaaatttaataataaaacaaggttaaatatcgatttggttttataaaagaggaatatagtttagattttgtagttaaacgagattatatgtcagtttggagtcattaaaaattgtttaggattgaaatttttgacaattaaatgtgattaaattattgttttgtttggataaaagaatgattagagattagaaattagatttacaattaaattagtttttcttataattaaatttaagtgtttgattctgatgggtaagaataaaaagggtgaagaaaatgtttagtataaatatttatgtatagtcctaattatgaatttatgtatttggggagtaaaaacataagttgtaacctttaaagtgtaacaaatattattaagatatcattagaaaattgtaatagtgtaacgatagaaattcactaaataaatacacaggtcatgggtcataattcaggtttataaagatctacaaagattacatacagtaaaacatctataaattaatagtcgataaataaataacctctataaattaataaattattccgatctcgagttgagaccagtgtaaaaagtgatacaaatcgatacattaataagataataattttcctgaaaatcctatgtaaatatatggtctcatcaatatcataaattaataattatataaatgtatcaactacatatatatatatatatatatatatatatatatataagaaatttctttgaaattatatttctaatatttgtttgcttaaatttgtatttgttcttatttgaatttagttctaatattttacagtatcaaaaaattttggtgttgttttctaaacagaataattattttttactctaagctacctaaagtatttataataagtagggtctatacagtgtataatatttgaaatgtataagaataaaattatatatagtatgggtactatttcaaaatcaaagtattaaattgacctaaattatgtgtattttaaataaaagtatcattaacaaaaacaacaaaatgatgtttaaattcatgagacggatatatagggtgggacaggttttgatctatatttattcttcttcactaaacaaaacaaacaacaaatacttctagattaaaaatttgaaatttaatcaaattatatataatttaaataaatatattagttgaaagaaagaaaaaaatgatgtttagttatgacgagacgagtttatatggcgggacgagtttggataagacggatttatattgcaagatgagtttggatggaacatgtttggatgaatattaatatgagacaatatactacaagtggaatcctataattaacaatcaaattacaactatacaatcttaaacactattttttgtaatcttttaaaaatcaacattatatcaaaataagtgttaatcttctttgacacatctaaatgtgtaattgtaatacaaacttactaaattacaataattctacaagttaaatctataaacactgaaagttttagttatatatttttgatacaaaaatgtgaatataacataacagattaatattattttgtcttttaagatttgacccgtgatacaccaaaagataaacttattaatattgtaaacttatttctcactaaaaataataaacaaaattatcgagaatcattaatcaacacaaataacaacaaacattatacataaaaattcattttataaaaatcaaacataaataaaatatttgaccacgatatattgcggatcctatcctaatctctctctataaactcctaattcttgtgagaattcacaacccaaatgtgaaatcaatttattgtaaaaccataacataaaaatagaatacatttcaagatccaagtataaatagtcttttttttttttgtcgtactactacgtatggggtgtgttgaatttttggtgttgataatccgagatttgggggatgttaaaagccaggtcgaccacgtgagaactgaatacgacagcgtttcaatcagcgccgaataaaaacacacataacggtgcttattgctgcgagaacggcggaacatttttttttatatttttatttttattacttaataaacaaacaataaaaaaaaacaaattaaaaagagacagagagaagaaagagaacctcctcaccttcctcctctctttgcgcgttttctctcttctctctctcctacggctgttgaaaccaatggcatttctccacttcgccggaatttcgatcggaagatgaatcgtctccttcgtctctcttcgcttaatcgtcgatcttcttctgtcgccgtctaattgcaaatccaaatcgtaaacgcttcttctcttattcttccttcccccattgttatcgtttcttcgctcgatgtgatcatattcgattcttagagttttatcgcttctttcgatgagataatctgcgtttcacatttccagatcatttgattgcgtttgttttttgtgttcattcccgattttgaactttttatatgttttcactggatttatccgcgagcgacggagaattctcgaggacgcattctgattttgaatttgtgttgctcaaagaatttgaagatctaattcatgttttcttcgacgagatcgtttttttttcagagtttttttagtttgattctgcaatgtagatcggaatgttattgtaatttcacgagtatagattggatttatacattgaatttgactaacttggatttcaagtttcagattgttcaaatttagaggttctgattcttgaatgtttttttttcttttaattgtgtatcaggttttttgtatggtatagagatttggtgaagaactagacgcagcttagaggaagcttttatatttattgaagcttagggggaaacaatgtcaacaaagggagaacatcatacagttccactttctgtgttgcttaaacgtgaatcagctaatgaaaagatagacaatcctgaacttatacacggccagcacaaccaaagcaagaaaggagaggattttactcttgttaaaacagagtgtcaacgtgttatgggcgatggtgttaccaccttctccgtttttggggtaattatttgccttctttctctattgattgtggtcctatcgatttttgtagttaaaacattgaaatgtgtattgcagctttttgatggacacaatggttctgcagcagctatctacactaaagagaaccttttgaataatgtattagctgcaataccttctgatcttaacagagatgagtgggttgctgcacttcctagggctttggttgcaggatttgtgaaaactgataaagatttccaggaaagaggtatgaacttatcaatgaaaaaccttgtgatgtgattcaagtcccaagagggtgaactcgtctgtgtctttatattcttatatcattctggtgaaggctatgtttgaggttttattgttttcttgcatttcagcaaggacgtctggaacgactgtaacttttgtcatagtagaaggatgggtggtgagtgttgcatctgtaggtgactctcgttgcatacttgagcctgctgagggcggtgtctattatttgtctgctgatcatcggcttgaaataaacgaagaagagtaagtcagattttttcctgctattcacccaactgatgataatcttgattgtatacaatggcatctcaatattttggctttcttttcaggcgagatcgagtcactgcaagtggtggtgaagttggtcggttaaatactggtggcggtactgaggtacttctttagataattcttgaaagtttcttctgtatgcattaagtctcacgttatcatgcgctcttgatactagcaatatataactaaaaggtaactgagtgcaaacttctaggatgatgttccagaattggatgtttttgcgagactgtattatacttagctgatgaactgtcatattgtggtagctttgtagaatgtaacacatagggaaatatctttgtgccgtcaaattgaagagttttgataactaaatcttatttttttagattggtcctctgagatgttggcctggtggtctgtgtctctcaagatccattggagatctggatgttggcgaatacattgttccagttccttatgtaaagcaagtcaaggttcaaaactcataactaaatctaatctaaattgatctttatgcgcttatagcacaagctgacattctaattattgagttttatactgaaaactgtatctatttattttggttatgtagttgtcttcagctggtggtcgactgatcatctcaagtgatggtgtgtgggatgcaatatctgcagaagaggctcttgattgttgccgggggttgccacctgaatcttctgcggagcatatcgttaaagtatagtatctgaattactttattttagatatattctctacatattctttcttgcctttatagtaccttgatattttattactccatacaggaagctgtgggtaaaaaaggtattcgtgatgatacaacctgtattgttgttgatatattgccactagaaaaaccggctgcttccgtgccgcctccaaaaaagcaaggaaaaggaatgttaaagtccatgttcaaaaggaaaacatctgactcctcttctaatatcgagaaagagtacgcagaacctgatgtagttgaagaactctttgaagagggctctgctatgctatcagagaggtgtgattctctgaatatatgtgcttaagcatataccatttttcatacttgatagcttcatttcgatctactaatcttaaccaagttttctttcgtttttttcttctgtttattgcagattagacacaaagtacccgctttgcaatatgtttaagttgttcatgtgtgctgtgtgtcaagtagaagtgaaacctggagaaggtgtctcgatccatgccgggtcggataattgccgtaagcttcgtccctgggatggtccattcctttgtgcaagttgccaagataagaaagacgcaatggaagggaaaagatcatcgggaggtacacactatacttatatatccttctttattacctcccgttattttgcaaatcgactaagaatctgtctatagatttcttatgaaagctaattgtaatatatttttggaatgttcagatagacatagtagtgaaagcgactagccagcaatctgcaaattattggcaaagcaactaacaaaacagtattgtgagtaaattggagcagttcaaggatcttcgggttgtaatttttcacccatagagagatatgaagttccttgataaaccaccaacattcttaccattctccagcagactccaaggaagtttatttatttttctcccacttcacgacgtcttacatcaaacttgtttcaaagtagaggtaattcataagttcttttcatttttccttttcatttttttttgtccatttgtgatcactctgtgctttggtatttcaaaaatgagtagaactaactaccagagacagtagctttattacgtctgttgaaatgttgagtcgtttaggaagagagggtaaggaagatatgcaagtatgtgtgcaattatttcaatgtataaaccgaagacaaattcttgatagaaatcaaatcatttttcatgtaactttaattatatctcgtcttctacgctcataaattttatgtgcctctctctcttccagagttatgtcttcaaagataagaggacttatattgtttaaggaaccctcagaatttacatctcaaaatgtaagatggagattgtagtaacgtagataagaaaagtaaacctgtctagatttgttcttacaatctagaaacatgtcgaaaactgcaaatgtattgtgtaaggttatcctcaaacgaatgagatattggaaaacaaatggcatattcccccacaaattttattgttttggagtatttatacacataattttttggcgtgtgcttacaactacataaactcacaataaattttaatttcgtacaagaattaaacaattccggccgaaaccatcaaatcaccaaaggttgttattgttccgctaatgactaggataccacgtaatgcagtttgcgtttttaaccataaatggcagtcgttttattacaacaaaatcttaaaacaacataaaactaaaacacaagatcataccaaaagaaatggatctgaaacaaaacatcaaacttgaacaacatacaataacattaaaataatatgataattgatccaaaaatacatcataatccgagtatacaagctacataatcagatatcacatatagaaaattagagatgaatagtttgcatctcgttcatgatctcatgtaaagtggatgcaaaattttcttatttttctcttctttagtcatctcataaagattgaaaaatatgaataataagttttacactttcaacccaaatggtaaaatttgagatgaatctatatttcattcaattcttttctactgaaaatgcaatcatttttccacgtacttttctcttatcagacttgtgcctatgtgtgtaacacattgcatcttgttgtccttaagaaagtaaaacctggaatagttggtaaagaaatttgaatatagatgaattgaatgaaagagtactataggaaatttaatcaatattaattgctacttaacactctctacttgatgcaagaaagtaaatactttataaaaattggaaacttatgcaattagtttttccttctctagatcaacacctctattccgattgctttgatccagaaagtaaaaaaaaaaatacggtagccattaagcatatattatatagttttagttcaaatcaagagcatacataagcaatttccaaaccttcagacctcaaatcaaatctcaccaagactggttcctaactcattgcctatagctggttctcggatagtgaggagtgctgcattgtgaggaagtaatgttcataaaaccgtctaacatgggtcaagcaaaatcctttatatagatcatctattggattttttcctataaaacttctgacgatcattacactggttttgacagttggtaaggttatagacgtactctcatcaacccatggacatagctagagttttggtagcagatcagtttcttcaagtgacataccgtatatatatacttgatgtaaattcaggtggttcatccacaactagagctttatgtttaggttcatctactactagtgccggcttaagtacagggacgggtagtgcgaccgtcctacatccgaacaatttttcttcttttgtatatttaaaaggggtacaacttttttgtatatataaaagggatacaaaaaatattatatatgcaaaaggagtataaaatatatattttaaaaaaatttgccctaaaacacataatatgtatgagccggcactgtctactacacaagctttcgcgggactagttatggctgaaggaaaaacattttcagcttctttggtaaaaaaaattcacccgttcttttacgtacaaagtaattattattaaccactaagaagtaggaagtcttataatctgaaacatagaaattaggactttaatttctcggtttggacttaggttagcaccgccctattttaattttatttttaccacggctttcgtctctttggtgagttttaatttttaaatagtcttaaaaactctgtctttttatttggtgaagaaaacaaaaaaaatttcatattttgattccttttattttcagttagggtctctttattttcatggtagctaggtttgtctagttcttaatatctctgtctttgtgttcgaccagcaaataaaacgatcatgatttcagattccatccctaatgaactcatcctcgagatattgttgagaatacaaagtcaattgctaggtgcgatcgatatatatattacaaaaaaaacagtgttgttgcaacgatatttttgcaatgattatattcgttaaaaatttgtaacaaattttgctatacttttgcaatgatgagtgaacgttacaaacttacaatcgtattacaagtctattgcaaaataatgacaaaacaatattgcaacacgaaatatttaaacaaataacattattcattttctacgtaaattaatgttggttttgtgtagttatgtaaatggtttagataaatatgataaaatgataaaaaaaaaaattataatgggaaacagtggtggaataagacacatattaggttaataatagatagctacttaaaaaatttattttattttgaaagtaagtgatggagttgtagatagtaatagatagatagataaatttgggaaatgaaaaataaagatttaaaatatttagacatgtagtccctgttcatttgcctgtcgctggcgactgaaaccagcgacagcgaccaaaagttgttcgtttgcctgtcgctggttcaacgaccaaaagtagcgaccagcgaccgcaatttttgatcgctgaaatttttagcgatcagtcgctggtttcagcgattagtcgctgcttttggtcgctgaatccagcgacatgcaaacgaacaacttagcgatcaaaataaataaattaaagaataattaaaaataattaaattaaacaggattaaattaaattaaacttaaataaatgttttttgcactctgaacagttgtgtcttttaatcgcaactttccgtaaaaaatattgacggttgttttttctcgcttgtatcttttattgcaatttgcctatattgtaattttctgtcaaaatataaacaaatttataatattttctttgcaatatcacgagggatttgagttctagtttaattaaaataattcttattaaatttgataaaactaaaataaataaatatattaatttattttttctcatggtgtatgatatatgatttacattttgattttaaaatataaattagcacaaaaaataattatttttttttaaaaatatagcaactgtttataacgacagtcaaacgaacaacactttgacagttattagcgattgtcgctgtaattggtcgctgaatccaacgacaaacaaacgaacaatatatgttgtcgctggttgctgtcgctgatcgctggtcgctgtcgctgaatccagcgacagagaaacgaacaaggctgtatatgatttttttggctacggtaccttcttgtatttatccacgagttatgatatccatttttgaagcgttttttgtggactttcaaagctctctaatgaacgtactttgactatttatagatttaatagccaatttataaagtcgtcatgtgtttgtgacgactttgtactttagtgattctctttttttataaataagccaaagtacgttctactttttatccacaattcattagcctctctactctcttaatcaagaatcactaaagtacaaagtcgtcctcaatctcttatatatgacgagcgtgtctcctcggtacagaaatgttcctgtccctaaagtgttccttagtttccgaggagaagagattcgtcatgggtttatcagccacctcgctgatgctttagagagatatgggatcatgttcatcatagataaagacgagcaacgtggaaatgacttgacaagtctccttttaaggatcaaagagtcaaaagttgccctggtcatcttctctagcaggtataattatgaggaacctatcaatctctgattccttcacttaattaaaaccggaagtagttcatagatgcatctttttcttggttgcttaatgtttcaacattagctagggtttagagttatcacaaaattttaaaaatggttattgacttattgtcctagtcatcaatatctaatagtatttgtatggactatgtggcaattaatcctttaggtttgcggagtcgaggttttgtatggatgagattgtcaagatgaaggaatgcgtagatgaaagaaagcttctagtcattcctatcttctataaggttagggcaagagatgtgagcggccgcacaggtgactttggtaaaaagttttgggcgcttgctcaaaagtctcgaggatgtcaaatcaaggagtggatggaagccctagagtgtatttctaataagatgggtttgtccctgggagacggaaggtattttctaatgcttcttttgttttcctataatttgtttttcaaaaacatgtaatatcttatatatttaattagtgtatagaaataacccagtttccaatatgcgatattctaacattttaataggtttcattgagatgtgaatgagaaacgatccaacataaacagtccaaactcattaaaaacctcccgatttctttttaactaaggtttaacaacaataatataataattaattcccacagagacggccagatataattactaaggtaattttagttaaatttgtttagttaattgatttttatcgtttaatttgggctgcttgttctgaaagctagaaagattatagtagtttaaaactttaggttaaatcgttttgaaaatttgttttcgatggaatttgtattttgaaagcttgcatgagtagacgaatacccattattttttggtaaataagaatgcatggagtcatattttggttcccgaaggcttaaaagaataataataggtgaatttccaataggttttatctcatctatctcttccataagtttgtcacattatttttgtcgacttgtggatcacattttaatactactattatatatatatatttttaaaaatcgaaataatgtttgggagaaaagtatgccaatggatttgagtctctagatctgatttgtgtttgtgtgacaaacaaagataatgtaaaagatgtgtggagcttagggaattatagaaaaaacattttctgtagttttatgtttaggatcgaatgttcaccctttttgtacttatatctacttcattaatttctttcgttgatcctttcatcttgtggttgagaattcctcgattatatcacgtgaaaatatttagtttctctgcactttagaaaatatccattaattgagttacaatatatatatatggcaggtctgaagccgattttattaaggaaatcgttaaagaggttgagagagttctagccacatttacaagcgaggacacagaagatcatcactgtgtcaatttttgaaattgtatccttgattgaacctgcaaaaagagaaaagaggtcaagatgagcgaaatcaagaatctcctgattctcgtcgtggatgcagcaaaccgttaagcttttgaagggcctcgtcgtgggttgccttgcccatcaagaactgccgttggtgttggtttttactcaagtttactactatgttaagttttctattttcttcattgaggagatattctcatcatgttttaggaaagggtgtgttggcaaactagtcacctattgtattccatcttgttttgaaatctatcaaaaaaaaaccaaaaagaggtagtcttaactacccaaaagagctttgtcttaaagccctgcaaggaggacttgcaaatcaattcgatatcgattcctggaatcgatctcggttatatcatctcaccatcgtttcatcaccactaatcgtcatcttcatactctgttttctccctattaaaacggagccgccgtgtcctccgctcgtagcttctgcctttctatcagttggtatcagattcttgtcgttctgggcgttgaatttgttaatcatgcctcctaaagctaacgtgatgctttaattgcatctcaagaaaatttcaagaatatgatgcaacaagcgatgtacgaactgaatcaaatgttgctgcaaagtcttggcaacatagaccctcatcgtgatgttgcttttgaaaaccagccacaagaccaaccagatagtccgattgctcgtaacagacaacactaacgcgatctcgctaatgtttgtcaacatgaactacatgttgggaagctagttttcgtctcgatatcctgtagtttcatggtggaattcgtggtgattcgttactggattggatcgtatctgttgaagagatacttgaatttaaatgagtcccggaagaacgtagagttgctttggaagcaaccaaattctgtggtcacgctgcatattggtggaatcagacaaagacaactcgtgcccgcattggaaaagttctaattcatttttgggagaagctcaagaaaaagtttaaggacacgtatgacaggactgtaaggatttgaactataaactcagctcactaacactcgattcgaacttgattcttgtttgtaatcgatttgtgtaacaaagaaagtaaaagaatgttgacacagaggtttaacgagttcacgtttccttcaccgaaaacgctacgtctcgccggagtttaccttcggaatccactagaactttaatgggaacaaagtatcatacaatcactcaatctcagagctttctcactctaatctctctctctttactctcgaaataaactcaacaacaactctaacggaatcgaagaagagaagaagaagataaagaattgcagaggaacaccgaaattaccaaactgccctcattgaccgttgcagcttcagcgagtcaacacacgtgcttctcacgtggctcttcctctaactcatgaaatgaaaccctctgaatgcttcagagtctctcccatacttaagacattccttaagaacaatatgagccacttccttcaaatctccaccttggctcttattatcttctgagtctttacctgttctagttaccctggattccaactccggtacctgagctccaccgctcagtgactactgactcggagcatgttgagtgctccttcaagtttgttaactagtaacacttttgtgaagatatctgctgtattgcattcacttgcaattttcaccagcctaatcttcccttcagttatgacatctctcacgaagtgtaacatgatgtctatatgcttggtgttctcatgatgcactgagttctttgctaaggcgataacactctgagaatcacagtgaacctccacatctttctgtggaaaaccaagctcattcgcaagtcctttaagccacaaggcttctttgactgcttctgtaagtgccatatactcggattcggttgtggaaagagctaccactttctgcagcttagacttccagataatggtgtttccacctattgtaaacacataacctgatatcgatctccgagtatcaaagttacttccataatctgagtcacaataacctctcaacaggaaatcatcttgtttcatgtagcacaatttctttgtttctgtacccttcatgtatctcaagacccacttggccgcttgccagtgatctttcagtggtttactcatgaacctactgatcacatctaatggataagcaagatccggtcgagtgcctatcatagaatacattatgcttccaactgtgttagcatatggtacaaacctcattctttcaaattggttcttgtactcttcttctgttgctgctctcagcttaaaatgaactccaattggagttgacacaggcttagattgatccatgtgtgttgaacgcaggaccttcttcacataagcttcctgtgacaaagacaaaattccagcttctcgatctctagttatttccatacctagaatcttcttagcatctcccaagtctttcatttcaaattatttactcagtagtagcttcaattcctgaacaatagacttgtctactgaagcaattaacatgtcatctacatacaagagtaagtaggtgtatgtcttgcctagcttcttatagtaaacacaactgtcaaaagcactcctgacaaaacctattcctttcatgaattcatcaaatctgaggttccactgcctaggtgactgcttaagaccatacaaagagggtttcaggtaacataccttctcaggatttttcttatcctcaaaaccttcaggctgagccatgtagatgtcttcatctaagaatccgtgtaggaatgcagtttttacatccatctgctgcaattccatatcaaaatgtgctaccattgacacaatgtaccttatggagacatgtttcacaactggtgagaagatttctgtgtaatcaattccctctttctgtgtgaatccctttgctaccaaccgtgctttatatcttggagcttccactccttgtattcctgtctttctggtaaagatccatctgcagcctatgatcttgacaccttctggtttttctacaagatccaatgtctgattctttcccattgacatcatctcttctttcatggcttcattccatttatcccattcaggatctcttagtgctgcctgatatgaatttggttctgcctgttctccatcttctgtgaaaaacgagaaaccaaccaagtttgattcattatacctcgggtttatcttcacagctctatctctgactagctgatagtcactcaagtcttcttcttctgatttagactgattttcatttgagacttgagtttgtgttataacaggtgagttagcgtcttgtgcagaatcatcttgatatgtatctgtcacagtagctccaccttgatctgtaatttcatgatcacaagtaacaacaggagggttaagtctgatgttttctaagtcattttcaatcatacttgtgtgtgaatcatgcttcaggtctttgtacatgatctcttctctgaaaatcacattcctgctaataacacatttcttttcttctaaaacccaaactttgtatcctttaactccttcaagatagcttgtaaacacatctttcttcgctcttggattcagcttaccctgatcagcatgaatgtaaaccaaacacccaaactttcttaaaccttttaggtctggtaaagcaccagtccatttttcttctggcaagtcaaaatccagtgctgtagaaggtgatctgttgatgagatatactgcagtggatgctgcttctgcccagaatttcttatccattccactttcactcagcatactcctgactttatccatgatggttctattaagtctctctgcaatcccattctgttgcggtgtgtaagcacaagtcttgtgccttacaattccttcatctttgcagaacttctcaaaatagtgattgcagtactcaagaccattatctgttcttagtttcttgactttcttgtcagactaattctctaccatctttttccattccacgaacttttcaaaagcttcatctttcttctttaaaaagtatatccagacctttcgtgaataatcatctacaaatgagatgaaatattgacagttacctagagaagctggattgtgtggtgaaccccacaaatctgaatggatgtaagctagcttctctttggtgacatgttgagctggtgcaaagctcactctatggttcttcccatacacacaatcttcacagaacttcaactcctttatagtttccctctgtagacaatcctttttaaccaagatttccattcctttttgactcatgtgaccgagcctactatgccacagagaagtctcatctttcaactcagctgaggaatgtgattccccattttctgctaatccctctaggatataaagagtctctcttttttgtccttttaagattgtggaacagcctttaacaatctttaaaactccatcttgagatttaaaccaacaccctttgtcttctaatgttccaagtgatatgagatttcttgccatgttaggcacgtatctcacatcagttagaattacttgagttccatcattgtttctgatcttgatacttccaattcctttcaccggagaatatgtatcattgcccatcttgacaaaacctgaactcagttctttgaaatctttgaataagtctctccttggggtcatgtgaaacgaacatcctgtatccagaaaccattcatctgcatctctgcctgtaaccaacagtgtttctccagtagccattataaccattgcaggatcaaatatttcactagacttagccaaactcgactctccaacatctgaaccttgttgctttgatttgtttctttctaaccacttgtaacactgcttcttgaagtggccttccttgccacaaatccaacaaactcttttaccatctgcagacttagaccgagacctattctttcccttatttccttgattgttgttctttccttctggcctacctctagcataatgaccttctgctacaggcctattgttctgagacaattccctttctttatctctcgctccaaccatcacatcatctaacctcagcttttctctgctgttactatacttcatagtctctacaagaccatcatacctagcaggcaaagaactcagcaataggatcgcttgaacttcatcagttacctcaatctgtagatgattcagatctgcaacgatcttgagaaaatcatctatgttctcatcaatctttttattttcttgcatcttgaaagtgtagaaactcaattgagtatacactctatgcggtaaggatcgaatcatgaacaatcgatctaatgtttcccaggcttcttgagctgtttgacatagctcgatcttcctcaaaactttgtttgctacatttaggaagatcacattcttagccttatcacatcgttcgagtcttgatgcttcatcaacatctctcttctttcacttctcaggatcttcctcttcttctgctgtaagaggtgttatcgtcttcccaatcacaacgtctttcaatccgatgacgctgagatgagccatgatccttgtcttccacaatgagaagtctcctgattcgtcaaagactgcgatcggagttccagccatctcgaaatcgaatccgcttaacgaccttaagctctaataacaatttgtaaggatttgaactataaactcagctcactaacactcgattcgaacttgactcttgtttgtaatcgatttgtgtaacaaagaaagtaaaagaatgttgacacagaggtttaacgagttcacgtttccttcaccggaaaacgctacatctcgtcggagtttatctccggaatccactagaactttaatgggaacaaagtatcatataatcactcaatctcagagctttctcactctaatctctctctctctttactctcgaaacaaactcaacaacaactctaacagaatcgaagaagagaagaagaagataaagaattgcagaggaacaccgaaattaccgaactgccctcattgaccgttgcagcttcaacgagtcaacacacgtgcttctcacctggctcttcctctaactcatgaaatgaaaccctctgaatgcttcagagtctctcccatacttaagacattccttaagaacaatatgagccacttccttcaaataatgtataacaagttgcaaaatctgagacatgaaacacggtctgtggaagaatatgctgaagaattctacctactactcacgtttaatgacatcaatgatagtcagacacaacttgtttcaagattgatcggtgaattacgctctcagttacaaaattctttgtcacaattcgaccctacaaccgtctcggaggctcacaggcgagcagcttcttttgagaaacaaatgaggtcagcctcatggaactttactaacactcgtcctcgttcactagagcagcaaacacctccaacgaatattgcttctcgtgaaggggatgagcaaatcaaaatagtgacccgtaatacgaatgacgaacaaggtttgcgtcgatcagcaaggacagaaaacggtacaataaaaaaattcacccgttcttttacgtacaaagtaactattattaaccactaagaagtaggaagtcttaggttaggactttaatttttcggtttggacttaggttagcaccgccctattttaattttattttcaccaaggcttttcagaattcttttcttttgtttttttacttttctacttgtcacgacatataaattaggaacagtaaaaccctggttggtataatctaggtgaaattttaagcttggctagaaagctatctcctccaaaccctcgaagacactgcgttcgtctcttaggtgagttttaaatagtcttaaaaattctctgttttttttatttggtgaagaaacaaaaaaaaatcatattttgattccttttattttcaggtatggtctctctattttcatggtagctaggtttgtcttgttcttaatataatacgttttaacatatctctctctttgtgttcgaccagcaaataaaacgatcatgatttcagattccatccccaatgaactcatcctcgagatattgttgagattacaaagtcaattgctaggtttcattgcgtgtcgaagcaatgggcatcaatgcttagtcgtccatatttcacagaattgttcctaaccaggtcctcaactcagccgcgtctcttattcgccatcgaaaataatggcttgtgaagcttcttctcgttgcctcagcatcttactccatatgagaagtcttcatcgtcgtctcttgtagaaaccgctgaatttcatatgaagttccctccagatggtatgcagatctatcctcgtaacgaccgacggttttcatgtggctatgcgtctggtatgatgtatttctatggtatgcggatcaaagaggatgattacgatggagtgcctgtgctatgtaaccctataacgggacattatgcgaccttgcctgctattgcaaggtttagacaagcgtttagctttttcgggtatgatccgattgacaagcaattcaaggtattgttcatgatcatggcttacccatgtagtcctgatcatcataaagttctgaaacttggaagtggagaaatgagttggagaagattaaaacgtaccttaagacatgaaattatgagtgaaggtatatgcatcaatggggttgtgtattacttgggtgatacgtctgaggttttgacttcttttgtggtagtttgctttgatgtgaggtatgagacattcagctttctttaccctggaagctattgtgaactgataaattacaaaggaaagttgggtttggttttttatgatgattacgatggtgataccattaagttgcgtctttgggttctagaggacgaggagaaaaatgaatggtcgaaatatgcctacgtgttgtgggatgatatatttttggctcattatgtttcggtagttggagtgactgctacgggtgaaattgttttgtcgatggctgattatacatctaagcaacccttctatattttctactataaccctgaaatgaatactcttcaatgtgttgaaattcgaggttttggagaataccatgaagcgtcgggcaataggagtagagtctgcgtctttgtagacaacgtctttgagaaagattgtagtagattctacgctttagcagaccatgtagaagatattaacgtcatcgattcaaagctactcaagtcaaagatctatgaagatacttacccgaacttagaagattatgaacaatcagaccacgacgaaacatcagacgacgaagaatctttacgttcttataactattcttataagccatatatgtacgcaggagaagaagaacgcagaaaaagaagtagaagaacgagaaggagtacgataaggagaagatagagacgattattggagttagctagatgtcaatttgttctcttatctatgagttttatgctcttttgttttcataactattttcacaaatcaaattttcttttaaaattcatatcacttcaattctggatctataagactgtagttttgtattagtttttttcgttttaattttctcttttggtaaaagatctatccgatccgtttccttacgttaaaagtaatcatgacgaagtcttaatctcaaacaccaaaaccttaaccaaagtaacgaatcttttatcttttaaaaatttataaacgaactcatagtatatcataaagtttgagtggtctcatagtaaaattgtaatttaatcattattatttcttttgtccaaaaaaaaaaaatcattaatatttaggtggaaaaaaaaaaaaaaaaaaattctgctgaccttatcattgtactcaaagacaaggttcaatagtttattgagcttaaaattctgctgaccttattgttgagcgtgtttctcgtggctggtcaagttccctcgtcgagtctgttgctcttttgtgtagctactgtggtgtttgataagttgaggtttcagttatcggttgtagctatctctcctctccttttaagaactctgcaagtatatcaattctttggtttagttcaaggcatgttctctgttgtggcttcctgttgtaagtgctcttgtttgaagattgctttgccttgtgttctcgcctctttcttgcggcttgattgtgctttagaggactagtagggctaacaacttgaggtgcggctttattttgctctacactactgacttcgggaatgaacttggtagagggagcttgtacttttaacataatttagcatgtgaggttttgtttctgggaaagctcatggactgaaacaaaaaatcgatcccacatgacgcaaggatagtacatggtcgatgatttggagtttcaccgttgacggcttggtctcgggtctcatgcgaaaggtttctaaggctaagtgtatgtcgtataaaggtgttttactatctgcaatggcccttcttctttcgtaaatcatccgggaaagacaatagaaacgtcatcgcttcatcttgttccaatagcttcattgcctggttgagtagatggaccgaaaattggtttaattacttcatgtgtattgattgtaatctaacctgttttcattatctatgaaatatttacaatttagcaaaaaaaagaaaaagttgtttgaacttgcccattttacatgtaacaaaacctttttttttttagtttgttttttccttttgtgcttatctgcatttattatactcaaattaaaatacaaaatatgtttacttcaaatataaaagtactcttattcattacattagaatgataatagagtgaaattgtagaagattttattttaaaatggtatttggagtgaaaagtggagtaagaaaaatatttatgggcttttaatttattttaaagcttctaatttcctcttttaaatttgttataagaattttaggttaacccgccttttatctttttaaatggtcgatgagttctatgtaagaatatataattaccaaaacgaatgttatttcacacaatgttttttcaattatacaattcagtttccgaaattcgttctcctgattttgtgttttcaatttctctcgtgttgaaatttgtctttctctttcatttccatttgaaataattcactgatccttcagtttatggacttagttaacacttattgggctccaaattctgctgacctttactttgggcttgaaagttgtttgaagtggcccatttttcatgtaactttcttttcttacatatattttaattgatgacaagagaaaaaaaaaaaaaaaacttgtcagttgtcacaataatgctaaaaaaaactctgataaaaaaaataaataatgctaaagaaaactgctccaaactctccaaaacgtcgccgttgttcatccttcgccgccgttgatctcgtcggtgagttttaaaaattctctacatttctctcatttggtgaagaaaaacaaaaaaaaaactcttcttttggattctctcttttaccttttgcggttttttctaaggtttatgtttccgaattgaattttcagttcaaatttatgtctctgttacattcttcacaaaaaaatctcttcttttggattcttctctctatttacttttgctattttcttctaggatttatgtttgagagttcaggttttgtctctgttacattcacgttataggttcacttgtatcgttttcagcttcacaaacaaaactttagtaaggtgtttgatttacggagaaatccaaaatgttctcaaacacggtcattgtctctagctttggttgtggattttggttattatagctacctaaagttttgatttttggttattgtagctctctaaagtttttatttttggctattgtagcttcctgaagttatgattttttgttaaagttttgatttttaattactttagctagctaaagttttgatttttggctaaagttttgatttttggttattgtagcttcctgaagttatgatttttggttaaagttttgatttttagctaaagttttgatttttagctaaagttttgatttttggttattgtagcttcctgaagatatgatttttggttaaagttttgatttttggttatgatagctagctaaagttttgattgtagatattaaagttacgatatttggttattgtagctacctagagtaaatggtcttctgcttcttaaagttttgatttttgtttattgtagctatctaaagttttgattattgtttaaagtcatgatttttggttattgtagctagctaaagttttgatttttcgtttgaaatgctctcgttttgctatagctctcttaagggttgtttttcagttacaatttctctagttcttaatataagttttaacatctctctctctctctgtgtaggatcagcaaacagaacgttcatggtttcagtttccctcccgaaagaactcatcctcgagattttgaagagattgcctgcaaagtcagttaagaggtttcattgtgtgtcgaagcaatgggcatcaatgcttagttgtccacatttcagagagttgttcctgaccaggtcctcatctgctcagccgcgtctcttattcgccatcgaaaaacataatcagtggagcttgttctcgttgcctcagcgtctgactccatatgagaagtcttcttcgtcgtctgttgtagtaacccctgaatttcacatgaagttccctccagatggtatgctgatctatcctcgtcatgaccgacggttttcatttggctatgcctctggtttgatgtatttctatggtatgtggatcaacgagcacgattacgatggagtgcctgtgatatgcaaccctttaacaggacggtatgcgagcttgccttttctggaaaggtatagaaaggcgtttagctttttcgggtttgatccgattgagaagcagtacaaggtgttgttcatggcttacccttctggtcctgatcatcatacagttctaacatttggaactggagaaatgagttggagaaagatagaatgttctgtaaaacatgacattgtgagtgatgggatatgtatcaatggggtcatgtattacttaggcgatacgtctgagtttatgactgcttttgtggttgtttgctttgatgtgaggtctgagacattcagctttatttaccctggaagctattgtgaagtgataaactacaagggaaagttgggtttggttttttgtgatgattacactgatgatgctattgagttgcgtctgtgggttctagaggacaaggagaaaatagagtggtcaaagtatgcctacaagttgaaggatgagaaattctcggctcattacgtttccattgttggagtgagtgctgcgggtgagattgttctgtcaatggctgatttcacgtctaaacaaccgttttatgtgttctactacaatcccgaaaggaacacactccaatgtactgaaattcaaggctttgaagaacaccatggaacattcgacaggcgtagcagagtccgcgtctttgtagatgattgcagtagtttctaccgttttgctgaccatgttgagtatctgaatgttgacgaaccaaagctgctgaagtccaaaatctatgatggtccaaatgcgaagatagaatgggaagaggaagaagaagaagatgaagatgaagatcaagaaaaagaagaagaagatcaatggagttagggtaaaagcaatggtcatgtcttttggtgcttatctatgaggttacgttctttagttgtgaagtgaagtttagctggtaaattctgtctctcataagtactaaatcagtaattatctatgagtgtcttgtagcagagattgcagtaactctgtctggccaaaaggctctgtcgtttctttgttttgttaaagtagaatgttaccaccaagaagaacttttgtagtttagtattagctttttttctttcttttggtaaaagatccatccttttcattacaaagaaactattaaccagtcttaatctcaaacacacaaacgattctgttaaagaagtcatcttttaaggatacatagctaatctatcttcactcatatatgatcatcataaagtttgggtggactcttcatgttttggagccatggagtgtgaagaatctgaaggctctctcgtaggactcgatactgaaggttttcttgtaggacttgaatttgatggttttgttgtaggacttgaatctggtgtggccatatgagatgtttggttgggactagtggaacccgatgatgattgcgtgattgaggttatcacgcttggtagattctctggagaagcatgcatgttgactcttatcctgttgtggatgttcacatactcatcggtttcgtcaaggatctcttcctgaaaaatcagagcaaaaaaagaatgcctatgattctttacttctctaatgctaataactaaagcagatgctcatgcttcggtttgagttacctgaagaagctcttcgataacatcctccatggtgataactcctacaacctcctcattggtaggaaaatcaggtatgggagtattctcaatgtccaaaatgcagaacgaacagcctctatgtcgcttcttagctggagcagccaatagacttgttttccctgacccttgctgctcctcaccgttctcactcttgccggattttgcatctccggtttcaattttgaatactacaattccaaagaaaattaggctaacatgtgttctcatgtttatttatggaacgtcgctaagttatgccgagacacaccttccttctccgatacctcaaactgagcttttggtttcctacaactgtccttaaaaagttcgtctttcgttttcttgttttttctgcgctcaataccattttcacttgtttcgggagattgctcctgctcgtcaagatccttgtaaacaactgctatgtgactgtgacccttctggaactcgtttaagatatcatatagtggcatggtctcagagacactggaggaaataaatagtataaacatgaactctgtgtatgcattaaatcctggtcgtaaagaaagaaagttagctttagagagtcatttaccgtggaatttttctcatggacatttttctcagaggaacttcctttctggcatcaactgccaatagatttttaacctgcatcagcaaaaggggacattacatgctgtgaagctagacaatacaaaaacaaagtccatatgaaagataggtaccagaatgagcccaattatatgtgtgggatttctgaaataaactggaactctgctatgaccaactgacataattgtatttaaagtttccctgtattgtggatgaaagcagattataaggtcaaaatatttaagtaaactgaataagagtaaatagaagatgatggaagcaaaacaaaaaaaaaagaacccacaaattaagaggtgtatcaagctcaagggaaaatgcattcgatatgggagtcattgcatcttttgccgtcttttcagttaattcaagtgcacctgtgatgattgaagtctcatcggttgttagatctccacctttcccagcctagtaaacaagaattatatacaaaagtctgtcagaaaagttggctctaagagacacaacggttcagcgacacatctggaactatttaatatggaggacaacacagcttcagttttcaattccaaggtcatagcaaacatcactagctgcatacctcatttccatggaaattcacaaatgtctttagctctgctctccgtaaaagaactccatgtcccttacccaacatccaatcaagaacctgaagcaacaatgtttaccaaaacagagaaacatcaagatttagccgagcatttcaatcaagccagaaaagggattacacaagctgatttttcaaaacagaaaatctgactctctaccttactgattggatatgaaattgggaagaacagtacaagaagaacacgaacaaaaggagccattatcgctccaaccttaagcccgtatcgagtacaaactgcttgtggcattatctgcagatactcaacagcagagaaactataatcacaaactgtaaaaatggaaaacaaaagtatatcaaaactataggtaacagatataaaacctctccaaacaccagtataagagtcactgaaagaagaatagctaaccaaggaggcacaattttatccaaaaatattggtaaagcctacaataaaaagagatcatcaacaccattatatatacaagtctctgcttcaaatacatagaaaccaaaaaatcaagtatcacctccatagccatagagtttccgatcaaaagtgtacatagcaacagatgctgattcttcactactggaaatatcttacctaacaatcaaatacacatgttcttcaattgctatgtacaattaaaaatcataaaatcagctaaagaacagaatcttcaaaattcaacagaatcgtcatcaagttgaagcactcaccggcgttgattcgatcttgaggacggccagatttgatgagaacttcgaggtcgactaaaccgagagacatgagaccaagagttaaaccagccatcaagccagcgaacgctacaagagctatgattatcacgacgtagagcgagaacgtggttccgcagcacggaatatccgatgacatagttttagagttaccggaatctgagaatttgtttccggcggaaattgttggggagaattcggcgagagagatgagtttagagtgactctttgatgttttagtgcgtatctaattcagacgatcatcttttatcaaacgcattaatttcgactttccttattgggtatttatttaatattgtttttgagatctaaccggaataaatgtccggtcgaattttaccaatctggttgtggtggaccaaattttttattttggtacccctacttccattctcatcgagtgagctagtaagattcaaatactacatagttattttggtatcctaacttccattcatatattcaattacgtcattccaagtgcatatatataaatttgttccgtgctagtaaaaattaggtcgaataaaagtttcttattaatttttgttaaacaaattagagatcgatatgatgggaataaaaatttgccacaccaaaacacgttcatgttaagagtatcaaagttggtgtaaaaaaagtatgacaaaaattgtatagattgaaataggtcttaaccgaaactgaaactgagtgctacataaaggacaaaaaaattacacataactcaaaccaaataaacatgcacaaatgttcaacaagggagagaaaaaaatgaagccatttactgatttaaaaggcttcattcgtttacacttttcttcaactttttcatatacataattataaagatttatatttttggacttcatatacatagttataaagatttatatttttttgaatgaatatttatgtttaacttctatttatgatttaacattatattgattttcacatggatgtttctgtttaacgttctgattttataatatattttttgatttttatatttataattattttttttgaatatttttttttggtaagcgatcgggccgcggagcctcccgttctattcaaagtaacttaagaaaacaaacctaatggactgggatttgccttggacatgttaccccaaggttatcctctttccaaaataaatcaacaacattcggaacaaaatgaaacccaagtggtaaagaaaaaacatagttcgctaatccatcagcaaaacgattagcttccctatacacgtgaaaaattcggactctccaatctttcgatatgaagccatggcacaaacgtaccaggaaagacagtggatgatgatcacttatccctgtcttcaaaaaaccaactactatctccgagtctacttccaactctatatgtgatgatttcctctcccaagctaagtagagaccgtaatatgctccccacagttccgccattggtgccgagcttctcccaatattcaaagagaaaccgccacaccatcgcccctcattatcctgtagcactcctccagcggttgccagccccggattcccacgtgacgcaccatccgtgttaatcttcaagcatccagctggcggtttaacccaccctattattttctttgaatattgtatatagggtgagctttagttctatttaaaggtttagtatattgaatagagggcattgatgagaatctgaacaatcatggtttaaggtttctcttttatttgttagagtggtttaaggtttctcaaacagagatacaagtacattctccattattaaggcaagcataataataatctttagggcattgatgagaatcaggacaatcacgatcagtcttgcatcttatcaccttggtcagctcagtctcaacttgttggcgcgaacaatggcatattccaagaatacagttcgcacctggatcttgacatcgcaacacacaatcttcatctgtcttgcataaatttctggcttgaactccaaagatattcacgaacaacgtacctattaattgcaaacacataccatattttattaggtcttatagatcgattaatcaaaatgtaagagatatgtagtatatagagtgactgagtgagaagctaacatgagagatagaaaacgaaaatgatggagattgttcttctcaatgccgtcatgtttttgatgtgaggatgatcagtttatcgtttagagtttataaacacgttttttggtatctttacatggtgatttaggtgcgtaaatattgtatcttggagcatgaaaatggcaatttatttaacgcatagtacacgactttgacaaacaagatttttgttgctataattagtgatgttactaaggaaacaaattaggaggaatttgtacaatattcctaaattgttttactatttaacgtaatttttgatataattccgtcatattcctaattttgtaccaaaaatagaactaatattgatctatataaggtctacgtgattaatctttttcatttggaatcatataacaaacatattctcaccaatcttgtgtccaaaaaaaaaaaaatatattctcatgaccaaactagataaggataaagaaggaataaatttttacttttactgcacataattttaaaaaacccaaaatttgagcatgaaaattagtattttgagaatctattcactaaatcatcagggtgcttggaaagaaacactcaagagagagagaacactcaattaggattgataaaaaaaaaccttgttgttggaaaaaacttttaaccttggggagaaagctatcctcctccaaatcctagaagacgtcgccgctggtcttccctctacactgttgttctcgtttcttgtatcagctgccaaatttcatataaagttctctccaaaacaaaatacagactatcctagtagggaccgacaaatttcatgtggctatgcatctggtgatctattcctatggtatgtggatcaaagagaagggtaaatactatggagtgcctgtcacaatatctacgtaaccctataatgggacggtatgcaaactaaccttatctgcaaagttacagataggcgttcagcttttttgggtttgatccggtttgacaagcaattcatggtattgttcatagcttatccatttggtcatcaaattcttacatttgaaacaggagaaatgaggtggagaaagataacatgttctacatatgggattgcgagagtgaagggatatgcatcaatggggttttgtattatttaggtgacacgtctgatgtttacttagatgacaagtatgagaagatctgaagagtgaagatgcctgattttgtgatagtttgctttcaaatcaggtatgagaaattcaagtttatttacccaaaaagcttttgccagttgataaattatattttagtaaataaagttttcttctaaagtttcatttctcttcatttcttaatcaattatatgctacatacatatttttaaattttcaaaattttaacatagttttaaagtttgtttgaagaaaagtttgtgttcaactcctttttgttatttaacattattgatatccggaggatgtttttgtctaatattattattttctaatatatttttgattttatttataaatattttctttgaatattttgtatagtttgagctttctgttttaaggtttagaatattagaatagattgaggtcattgatgagaatcagaacaatcacggtttaaggtttcttaaacagagatacaagtacattctccattattaaggcatgcataataatcatatttagggcattgatgaggatcaggacaatcaagatcagtcttgcaccgtatcgccttggtcggctcaatgtcgacttttaggtgcggacaatggcactcgccatgaatacactgtgcatcttcgtctgaacaacgcaccacacactcttttgttgtcaagcatgatgcatcggcttgaactctaaagatatttacaaacattgtacctattaattgcaaacacataccatattttatttggacttttaggtcgaataatcaaaatgtaagaggtatatatatagtagtagtagtagtatatatagagaaagcttacatgagatatagagaatgaagatgataaagattgttgttttcaatgtcgccatgtttttgatatgaggatgagtttatggtttagaattcataaacacgtttttgatatccttacatggtggtttagatgcttaaataatgtgtattcgaccatgaaaacgacaatttagttataacgcataggacgactttgacaaataagatttcgctttagttgatgatatctactaaagaagaattattagtttgggatttaaatagtgttttaatgactttaaatattatttagaatttgtgttattcaatcaaaatatgattaaactttattaaagtttcttgttattagtttttgatttgtaaaaagacttttcaattttttttattaatttggagttattggattcatactttaataaaatcactgatttttttatgttattcaactaaaacaaaagaatctttgaatgttaatcaattaaattattgtattattggtttatgctttctacacttttattcacaaaataaagtcataaaaagtagtatcataaaaatagagagattggttaggaaattttacaagattataaaaaacctaatcaacaagattataaaaaactctcaatcaatagtttataatccttcatttatctagtttcatgattttattaaagttatcaaaattctttttaaaatagaatccaataacactactttctatgattttattaaagtcatcaagaaataaattagaatccaataacacccctgaaagaaatatgagaaagatttggttaagtaaacatataaatataacatatgtatgatcttccaacgtatgcatgatcttaatatgtatgcatgattttattttattttttgtcatcatgtatgcatgatataatacataaaaataatttttttgtattttatttaattagatatataatttccttataattgtcttctttaccttttaaaattgtatatatatataaatttaatttccttataaatactttttctaaataaataaaggaaaatttattttacacgtgtcaaaaatctaagatcgtgaaaaaattgacacgtgtcatgatctcgtgagttactaactttcaaaattgtacttcatataatagaattttacatcaagacaaaaaaaaatcaattaaaaaaaaaaattattaaacagtatttaggaaaacaaatcttaaacaaattaattttatttggttaaaaaaagatgtttggtgtctttattgtcttaggaagaccaaaaaaaaaagattgggtgtcttaaatctaaatttattactccttttgttcctaaataatagtagatgttttaaaaaaactaattgcatcaaaaagatagagtttttacttcttaggtattatatgcagtatttcttatttagttttatgaattgtaaacttcaagaaacaataattatatatcatcggttttaaaattagcaacaagcacaaaagttgagccatggggatcctcgaagcacaccacgacgtcatcaaccgggatccacgacctcgagactccaccttcgttaatcttgagcaacgaccacatcgatgacaaaaattacaccaccgcagacggagaagtgctcccccaccaactcctgaatcatagacaagatgaagtctcaaaacctgtgaatgaaaagcagcagcgaagaagaaagaaagtagaaaaccctagatctacttgttgtcgcaaggaatatccaagcaacggttgtctttagttttaatatattagctcaaatattctaacattaatatactagattaaaaccaaactgaaaaataaacgtttgggttataaatactaaataaaatacatttgtttacatcattctagcctatattatatttcaatctaagattttttttaatttactcttcagtttcaaagttcaaaatttgacttatgcacaacattagctattgtgtcataaaaattataaataccattctacacttttcggtgtacattatcatttatactatatactacaatagtacaatgtatagcaccaaaacaacaaaataaatcaatattaaataaaattttattacaacatatttcttaaaatataaaacactggcacgggtcaggcctagtgtttacatattggttcatcttaagataatgaatttgtcaagtggaccaataaggagagtgaacctttatgtttacatatttggttaattatttcaagctagatcagtttagtttttcggttaaaatttttattatgactttgaaatggaaataggggtgaagaaaaaatatgtaaaattaacacatgctcaaaatccaaaacttgttcatgcaaaatatgcaatgattcgtaacaactcctttcaccagttttcgtgataaataatcctttacagaaccagaagtatatacatacatacaaggacgagtaaatacaatccatcgttacactgtggtttctgccttatggaagattatcaaacgtataaaagtgttgcgcctaccatttgacatcgagtgttaaagcttcttgaggaacaagtaatgatggaaactttgtgaatgacatgttagacatcaaactgctccatgcttctgtatccacttcaatgaaaggcactacttttctcagcctcactgctttcaacttatctccttcgattttcgccgttacttcaaaccaaacccgttcgatcttcggttttgttctccatgctacttttttacttatcacactctcattcttcccaatacttctctcgatctctaactgaaaccgtaccattcctgatgcctttagtttagctgttacagaactcactgtttgtcgtgttccattccctaaagagttcagaactttctccaacttgtggatctttaagccaagaagatcatttgggaaccgatgctgcctgtacgtgtgagctttataataacatttttctgcatataaatggattgcctcatctgataagtacgaagtcttgatttgcgtagttgcatttgaagtcctaaacgcaaccaatgaagctgaccctatgatttgtatgggaggcaatggcacacacacagaaccccaaaacgaccataaagaacttccttctttaatatttacaggatcgacagtagcagcgtatcttcgatgggatgagtggaatagagagactgcttgagcttcccttatttctactgagatgccctcactcacaagaactcgttttaaaccgctatgtgaaatgttcatctgaaaacaaatcataagctcgaaatcatcagtgacaaaacaagctactcccacacataaaccaagtcttccttaaaacgtattcaggcctttcattactttttgcacttaacgtttcttcgttcgtggtcatctactcgagaccacgaacgaagaaacgtaaaaaaaatcactaaaacaagacctaagtttcgaattcctccgataatcctaacactgagtagatcattaccatcaatcatagcactaagagagtcgtttaaagaagaacatttttaccggtaacgaaagcgagagacgatcattgccatcgacaagtagctcaaatggacctttcaatacaagcggcggatcaagaaccttactcgaattaacttcccgaactagttcctgcaactcaacatcactacccccgccgcttcttctccaatctgttatttcatccgggaagatgaatacgaatctgctcttccctaatcggatccggatctcaaatctccgactcgtaccaatacgaatcttcttaacttccaatttcgaaaatctaacttcctctagattccacttctgcttcaccgatatctccttcagcacatcctaaagtagcgaatgccaattggtcagacgatcaaacaccagagaagaagattgatttgatttgatttacctgtagaatcggtgttgcggtgatgttggattcgtctggctgcgaaggatcgagagcgacggctagagtaaggacttggatgaatagagagagtacgacggaggaaggagagcgacagatcttcattcgtccgataaggtttacgccgccgtaaccgtcgattgtctcgttgttctttttagggaaatgacgataacacccattgaagttttccgatattaattatgttagtgatgtggcaagattcacatgacatgagcctgcctgggctctctataccatttttttttttactcaaactattagtttattgatcttgaaatgataccaaagtgaaatacaaaacccaaataagggaaattaaagccagcggacgacataaaagtctccagagtcaaagccgacagaaaacaaaatttcctcggaaattggctctaaaaaagtgaaactaaacatagtaataaaacaaaacataatacttcaaaccacaaacgcaagaggtcgaaaccaaaaactaagaaaaaagcaccaagcctataactttaaaaaaaaacaaaagacccaaaaagacaagtaacccaatcttcaaaagctcaagcgatagagatttaccaaggatgctcgcggccaacccgaagataacatctacctcctcctatcaaaatgagagctaatctctccaaaccaagaacaaaagcttcataacccggcaagcgagacaaaagagttaaaggaacctcgagcacacttccgaatacgatgtccgacgactgctgcgtccactagcgtctaaatagaaatcttcaaaaggcaatcccaacaggaaagcaaggacaaggagaaaggcccaatctctcgaaaaacatcaaactcaagagcaagaaagatgaaaccgagacagctaacaaccataacgaacaacattagggagaagaatgaactgaaaacttagaggtctatcgatcgaagcaaccaaaacataacatcatcttagcaaggaaacaaacccaatgtgaaacaatggctgaaacgaggagaccaggaacggaaataagagcaagggcaggactgaacctgactaactcccaaacaccactcaaccaaaacggcttggagaaaataagcacaaagcgactaatgaaagggcacggatccaacaaaacaatggcataattctcagagcagcaccgtagatcctacagatccggaaccaattcgctaaaaccaaaaaatccacaaacaaagtcgctacaaccgtatccgcaaaacccaagaacaaactcgcaataaactagaagagacaccaaacgcaggccaaaaattatgcaaatacacctgaacaaactaacctcagacatcaatggcgagccatcagcaagaccagaaccgccgaaaacggaggcaccaacctcagatctaagaatcccatcacgcgagaagaaatccaaaaaaaaaaccaccataacgaaaaacaccggtgggattactacactcctatgaccaaaagagaaattaaatatatctaatgaattttatccgtggtataccgtctcgtattactatcgacccaaacccgtccgaccatctaaccccgttcaatgaaattaaatattattttgttatttttgttctaataatattttaatttaaaagatatataattcaaatcaatttaaaagatatataattcaacatatatcgtagagaagaaatctcggaaaatgtatgttgggagtaattagttgatgaaaaaaatctcggattataaatatgtgaataaacccgtgtagaactttttggagaggtttttgaaaacgtttgttgagcgcaatataaaatatttagatttttaaatctgaataattaataccaattagatatcttgagagatttttggcaactatgattgaatataatatcttgtatttaattatcaacagaaaatatttaatgttaatggcatgccattgtaaataagtgtcaagtacatgatttatttgctaaaatgacggcaaaaaaatgtatatgtagatttttcaaagcttaggaaattttacctaatctgtgtgttggttacaaaagcaaagaaatctatataaagagatttagagtttaatcctttttgatattttttaacacaaagaccttttttatgtaaataatagcgaacaatgaaaactctattatgcaattatatgtatttacacacttttgtatttttattatcacgcaatcatgatttcagattccatccctaaagaactcatcctcgagataatgttgagattgcctgcaaagtcaatcgcgaggtttcattgcgtgtcgaagcaatgggcatcaatgcttagtcgtccatatttcacagaattatttctcaccagttcctcaactcagccgcgtctcttattcgccatcaaaagaaatggtttatggtgtttcttctctttgcctaagcatcagagtccgtatgataattcatcgtcgtctcttgtagtagcggccgactttcatatgaagttccttccaaacaaaatacagatgtattcttctagtgagaaccgaaaactatcttgctgttatgcctctggtttgacttatttctatgatatgtactctgaagtgcgtgtgatatgtaaccctataacgggccggtatgcatccttaccttatctgaaaaggtacagaaaggaattaagctttttcgggtttgatccaattgacaagcaattcaaggtattgtgcatggcttatccatttggtcctgataatcagtaaattcttacatatgaaaccggagaaatgaggtggagagagataacatgttccttaacacatgatattgtgagtgaaaggatatcaatatgcatcaatggggttttgtattacttaggtgacacgtgtgatgtttacaacgatgacacgtctgagaagatgcatgattttgtgatagtttgctttgatgttaggtctaagaaatttcaagtttatttacctagagagcttttgtcatttgattaactataagggttaggtttgatttattatgatgatgtcactgatgatgccatgaagttgcgtgtgtggattctagtggatgtagaggaacaggaatggttaaaatatgcttacagtttgagggatgataaattctttactcatgacgttttcgttgttagagtgactgctacaggtaaaattgttttgtccatgcaaagttttacatctggaaaaccgttttatgtttctacttcaatccagagatgaacactatccaacgtgttgaaatccaaggttttggagaatgtcagcatgaatatgactactatcgtagtagagtagtttacgtcttcgcagaccatgttgaggatcttgatgttaacgatccaaagctactcgagtcaagtatctatgctccatatgtgaagacagaagattaagtatcagaatcagaagaagaagaagaagaagaagaagaagaagaagaagaagaagaagaagaagaagaagaagaagaagaagaagaagaagaagaagaatcaaaagaacgagaaaaggagaagaagatagagacggtcatcggaggttggataaagcaatattgggcatgctttttgcgcaagtcttgggaattaaacccgcatcgttagcttggaagagggttttagtggaagtagaatgatatttttatattttaatgtctctaattcaaatttctgaactttggtttaattcgactccttcatgatggatggagaaattcccaaataaaacaagatggttaaaaattctgatttttcactactagacatatttttacctaagaacaagaatggaagtgagaaaaagatgttaaagaaacgaaagatcacagcaacagcaacaacaaaccatcacacttgtttcagcagaagaaagaatgttaaaaatcttcatcggtgtaatcgtttgattaaattaagctgacaaacacaagtattgatcatcaattcatagattttggtatcagagtaaccgaaatcgacagttacagagttcaaattacaaatcgtaaaataaacgacgcaaaactcagaccaaacaacatccatctacacaggcaggagtcatgtttatcaatgtatagaggaaaaaataagtcgttgtttaccttacacaaagctcaaatttggagtattctttagtcgatcttcttgctcccgaacactttcattttctctggtaaaatgccattgatgaacataaaaattgatgataccaacaaaaccttggaaacagcagttattatgacggaagatgatccggtggttgcaacaaagttatgatagagagtaatcagaatgactatggcaatgagagtctgctttttccattgaattgtttcagtaactgcaaatgtcatcaataagactttctcagtatctgagccaagattactagtgtaatttctattatcataagtagggtagtttaaccttagtaacaagatttcttttgggttttcatgaatcttagtacctaatctaatctaatatgaatgtttcggtacggtgtctccgcatcgaaaaacccctgatcctaattcctaagaatacaatcacaatggtatgacttttgacaccttcactgaacttgtcatatgattttatctcaaagcagaaaatatctagagacatcgctataagtaccttctgttttgggttgattttgagctttcaagtgtgagaatgaatctattgtcctctttataccttcctagcattccaaaaaaaaccaatgaaagtgcaaggataagctatacagaggcagaaaatatatcgatctttgttttgaacgaaagaaaagattgtataaacctgaagtgggacaacaggagaatagcctaaacgatcctttgcttttgaagaatcaaatgttctgttgcaagagagtagcctaaccctagaaggtgttagcactggtactttcatcccatacggtccgagtaatttatatgctagttccacaagatatgctattggcatcatgagacttgcaggtatctttatacttggcctgaaaaacatataccaatttacaaacttctattagttcatcatgaataaacataaatcaaatgtactctagttaggaaccttcttttgttaaagaaaatatacctctcatagccaagtccttcaagaagctgtgacataaactcccaaaatttaattggctccatgttggtaatgaagtaagcctgcacagccatttcgtgtcagattaagctgtacatcatatacattccctaactaaagtacgaggagaataatttctatcagaaaatgccataattctagaaattgtgggcgtttttgtttcgaaaaatagcacaaaatcacaacttccatgtagtatgtcaccttataacccaaattaagtccaagaaaagcaatgaggacaatttaaatatccacatacaaccagactggagctatactcgtatatatatcttcaggaaatgtcatataactttctgacctcaattccctaaggagcacacataaggttgcgtctatcttattcattcagctgccccaatgcttttattcattacagttaagaccgttttaacagacaggactaaaacttagaaaggtacttatagaataaaataagaacagcagcaaaaaactgtaccactatgatattaaacaagtacaacatggtatcaaatgaaaacaaatacctggccagcagcttttgcacatacttctcctcctgatgctagagctcgctcagcacagacatgggcgtgcacaacattttcaacataagtgaaatcatagaagttactcccatcacctataatgaactggacaataaagaatccaaaacgaatcataagagtacactaaatgattgaatgtgctagacaaagcaaaaaagacttgagacaatgcatctttagcttatttattcattttattgagatctattttcttaggaagcacggcattttgttagataaatatacacatatctgcaaaatatcatatctttcaatatgtatatacactgtaatggaagtagcaagactgattaacatcactaaaaaaggagagaccagagcataataggtcacaaggaaaatagatagcatttagaaggccaaagagataaaacaaagaaaatagaggcaaccttggatttcccagccctggcagcagtaacaagcgatggaaccattaatttatcaccaggaccaaatatgctgctaggacgtatgcaacaagtgagtagtccacttcttccattcgctttcaaaatcaaagcttccccttcagctttagtagctgaatatgaatcattatgctgaaaagatagacattctcagtgacagaagctcaaaaacctctccaaattttcacatagtcctgtgaaaatatcaagttcttaacaacataacaaagaccttaggtggatacggcagtgattcatcagcattcaaagtaccatggaccccgtcaaacacaacactcggagaacttgtatagattagcctctttactccaacctcaatacaagcatcaattacatttgttgtccctaccacaaacaagttggaaacaaaacaatcaaaactaaattctcatttctaaaacagagagaaaatttacaaaattgaagtttcttcaaaccttgaacattaactgagtactgaagctggtgattgttaatcgatgaatctggagctgccatatgaaacaccacttctgctccttgaaaacctgtttcactatatcttcagatacaaaaacgaattcgacgaatcactgaactaaattgaattcgaagcaaaaatacctttgacaacttgagttttgttccgaagatcagcggagacgtattgaactctaccggatctaattgcttcaccgagaattccagtttcctcgtgaggattgagcactatcgcaggagctaaatcggcgatacgaacgtggaacatttggtaacgtacgagcatttctacaagatgtcttgcagcgaatcctctaccaccagttacaacgcaccatcgctcagtctctgtaacttccatcaccattgtcttctccgatgaactattcaaaatccaaaagtagaagcaatgttcataatgtatcttaacactgaattcgagccaaaaccgaaactataatactattaaagagataacgtgagaagagacgagcttaaattgaagcagttacattatccgacgaggcggaaattgaaggcgttggggtcactggtagaagtcaacggcgagagcgacggcgttcgatgatagacagagaggagagaacgttcggagaacaaaaaaaaaggaactggtagatttcagatgaaatcgaggtggtgtttattttattttttgaaatctgaattaattgcataatttattcgtttaattttctgccaacaaaaagcaaactttattaaaatttataaatgcaattttagctgaaagaatacttatatttataaatatgtatgttacttacaaagtttttatgtcggtctgattggtaaccaaaaattgtacaagttttttagctgttagttggagttgttcgctttatcggaatagtgcaaagctgaagaagttgtataagaaagttgttagaaagagctgtataagaaagctgtaaaaaaaactgagaataaaactttttgtaacactttaataaagtttttgtgattaataactgtcaaagttatacaaaattgtatttctattatagtggttaccattcaaactcgtcgaatgtgcaataatttattggttattgctttgatactttgttttgatctatagtaatttctcatgaaagtatctagagtttttagcattaaaatagagaaatttgtagatgaaattaagtagtttctaaaacattggctaattaagttttgaaaactattgtctactttgctaaatttcgttttacttacttctatttcacgtaagttcggataagatagtcggactaatcctcatttagatatatacaagaaactatggatcgtttactttaagtatcgcactaatatcttctctaagtgtgggtgcttgctagcttgctgcttgggcgtgcgagtgtgaagtctagtattttgcaactttatgacttaactaacatttgaacttgccaacttggtttagtttaagtggctatctaattttatttcaattaacacatgcagtggaaatgtttgatgtcacagaagaaaataaaataactaatgactagcatccaaaatttatagtgatccatgtgataagatcaaccaaatgtttgtagcccatgatttttttattggtcgacaccaatattttttttttagttggattgacaggtttaatcagaattgacctaacccaacaaccaaatcaaagaagtagtggtaacatatattcttgtggcaagcattatctacgagattgaaaatgtgagtaatagtggatcatgacatgtttagtatgtctccagtaaacatgtattgcagaattggatcaacggcaagggacacgagtggtgatattaggatcaagacatgaaaacctatcaatattgataaaaaaaacaagaaaatgaaagatataaaatcactgaaaacatacatacatttcaaatgaaatcaaaaatatcatcaacaataaaactgtgttattattattaaaaaaaaaaaaaaaaaaattgtgttccgatcgttttgccgtttaagtcgctcttattactctataaatagtacacttcttttgtcatatagaagacaaatcaatcaagcaaaattttgtcttaaaacaaaaatctttaatcaatagtaataattttctaaattcttaataggtgcaaattctgcaagcaaaaatggagaaagtcaaattctttgcaattatctttacggtgtcaatggttatgacaatggtttcggcggaagagttaccggtgaaagtgacgggcaatgagatgactcttgcggcggaggctgccgcttcgagtttcaaaagcagcgccggagaggctgctcaaggagccaagtcatgggctgattgggctactagcaaaatcaggtaatttttattcttgtttgtttattctctaacatcaaaattttttgtggaaaaacaataattaaataacttctacttgcacccaagaacaaaaacaatctttatttttcaaatttgttgttagatttcaatccacctgacttagttttagtcttttagattctatttatgttttgactctcgtatgtgaatttatattttatttcagcaacataatttggaatttttagaattctgtatgattattgacttgtaaaggaatttattagtttttaaactagggttccaaaatgttaactatagttcgtttattgaaaaacaatgtcggctatctggtgattattacaatttctttcaatcagggttaataggttttaagtgaatttttggtttttgacattttgtttctttcaaatctattttctcaccacttaagagttttaaaaatagtttttcaccataatcactttttcaacccaaaaaaaaaaaaaaaaattgttatcaatattcggaagaatcaattatggatttgctattttttttatggtatttatagattttgccttttttgaatagtttgtggattttgctctttttcaagatatagaaatgtgatttaacatgtattttattcgttatgttcggatttaatcgattgcattgtacatatttttacaaaaacaaatcttaaatacatacgtttttaagtgttaaaatggcatatcaagaagattttagtaagaatagcaatttcaaaagatttggatgaaaaatggcaaaatcaacaatgatcctttcattcattattaacggattatgaatataaattttcatgttttataaaatgatgttcaagcttggttgatctgatggactattctcaattcatcatggttccataatctatatatacatttttgctgccatttttgtgaaataaatcctggagttgaaacttatttacaatggctgtcactagcttattcaatgcgaaaattaactaccaaatcaaagcaaatcttattcaaaagaatatatatgctcttattccatggcctaattatttttgccaaaatggttaaaatatttaaaaattaaataattatttgaaagaaaactttaaattgatttaaattataaatcttttaataaaaatattattaaaaaaaatcatttcaccgaacatgattagagagtaggactagatggtaggacgtgtttataatattataatatagaaactttataacaattaaataactatttgaaagaaaacttttaaattgatttgaattaaatattttttaaattaaagtattattaaaacaaaaataacaaaataatgtctaattttactgaacggggttagtggtaggacgggtttggtcgatagtattacgagacggtataccacaagtgaaatccattagatatgtttaatttcattgtgcaggattagatggtacgacggattttgatcgataataatacgaaacgatatattacggatgaaatcctagatataacaattaaaatctatatatacattatcttaaacactaaacaaaacaaacaatattaataaaacaaatatctacatatacattttatataacaaattttattaaaaacctagccccgcggtataccgcgggtcaaaatctagtacaatacatggcatggactaatttattcatcatcaactaattttgaactcaaaaactcataattcttaaacttttcgaaatctcgaaaaatatacccatagttaccatttatcgtattcatttgacaatcactaaccacttttaatgctttgttttaaaggcatcttggcagcttggagaaaacacccggatcagattgaaaatcatcgaaagtttttttagtaaacatttatctcaagaatatgcataaatgtttatgaagaaaaaaatatgtaaacagttctgttgcattcacttgtaccttattgaaactcttatttgtattaagacttttttccagtaatgctaacatgtaatttaaagacactactaaccctaatttaagttgagaaaaaaaaaaaaaattacaacttaaatcttattgtagcttcaagttttctaataatcaatgttttaattgcaatttggtacatatcatttctaatttaaactagactaagcacatcatcattaatactaatggatcttctgcctgacccttgactcagaagacatgtttattgcaaaacaaagagaccaataatcctttctctcgatgaacaatgtgtccaaagttcttcttctacatacctcaaagaacacagagacaaatgacaagatcgaacaacggattcatctatcggtctatggataacaagatcccattgctttcgattactttcttccacgggttagcctctgcaaatggtagttaatgttaccccaagacttgttcttatgatccgactgcaaagcaagcaagaaaacaaaacaaagttcatcgttttcgcaaaaggcagtgacgaataaaagtataaaacgcagtagcaaaatgcaaagatattaacctggccttgcatacaaacactcaggagttgcttctgtttctcacatttatcatctttgatattgttaagagccatacagttcaagaacgataccatttccttcatacacggtttcgccaaattcccgagctttttcgggtttatgtacaaatttccagcctttctccccattatagctctctcaactaactaaagaaccagaaaccataaaaaaaaaaaacagtagtaaatcaaatctgcagcatcatatcaagtttcccacaaagctacccttaccctgaatacactcatatatcacattttcgtcgacagattcaatcctaggcctttaaacaacaagagaaagtaagaacattgagattaacccacgaaacactaacaattatacatttctatgacgttgagaagtttgtagaaaccatatgagaagataaaacaaatgatgaacacacttaaagacccaagatcggaatcaacatcaaagccaaaatcaaagaagaattaaacatacaaatggtctcagatccgaacatagaacgaaatcgaatctaattgggcaaatcaaaaatcgcagaatcgaagcaaaacgaacaaacacaaaatctaatcagagagaaatggggaacgaagcacttacaaagatttctgagagacgacgagacgagagaaatggtgaatcgcagattgagaaacgagagagagaagcttcgaaattacaaaacccttagacccaacaaaaaaaataataatattaaaccctattattattaaagcccattgggctttgagcccagtaaagaatccgatcattgaaaatacttttctagtattctttggttttggttagaatcattcatcaatcatcacacttaaaaggtgacaggatgaattatctacaagatcattagaactttttttagtccctaaaaggtgattagtaagataattatggtttttagtagactatcgaatcgacaatactatttgatattctaaattaaagtttcataaatatgttctgactctaaaaatgtttttaagcgctaaatgtttttatgctaagtgctaacttcttatagtcgtaatcggcttatgctcataatcacttagactagggaatctgttaaaataattagtcctttattaactgtatttacatagttattgatagtatgtattattgaagctttgcttcttctagggttctaaactagtaatagtctcctttgatgaattcattcaaacgtttgagctctccattttgatggtccacaatggctttaaccacatcaaccatagagatcagtcccactatctttccgtcaatcaccggtacatgccttatgtgattctctacatcatttaaaaaaaacacaattttcttttgtcaatttcaaaacataatttacaatttggattagatatatatatatatatatatgtaagtatatatagtaaattacctgacataagctgcattgctttgattatgtttgtcccagatgaaacagtaaccaacttgctctggccaaaatcatttccaattcttttacttaaaattacgaaaatttacaaaatgaaaaattaacttgagagttttatcttttgtttattctgacctcgtctgtcataacttctccaacttttgtaagctttgatgatcttcctgccccaatgatctttttcatatagtctgtttcattttgtgatgataattagtcacaaaatgaagaacccttcttaataaattgtgtgttttaactgttaactacaacattcaaggtattgggtgatcatattcataactccttttttttggtatttttccgtagaaagaacattattaaagaaagctt

SEQ ID NO: 1004 - DNA, 97154 bp, Arabidopsis thaliana
aagcttagctaacgactattataatcaaggacgctattaacccattaactatagagtgattttgatgatcgacctgtagtctccatggatgaggattgcaaaatgccaccgttcacaataattttgaagatctgaataatcagatttcatggcaatgtagtctggatctaggtacggttgatctaatattgttgcttgggttccaaggaacaaccaagacaatatggccgtgactcgtctcattgaacctgatataatctcctcgataagtccatgtttgcacattgcacatctactcctcttgttacttacatgtttatcaaacgacacatgcatgttaatgctgatgttttcttattaaattaatcaagaatgtaatattgcattcactaaacaataactttaaaaaaaaaaaaaaaaacttttctattattcagcaacaatgtggaaaatggaaaaccgaaaacatattaaaacctatgaactaactttttattgtaagtctttggtttcctgatagttcaaaacatgatattttattatacataaaacttgatttcatcaaatacaacaaattatttattatttgaaatacaacaaattatttatgaacataacaacaatgcgttaaggaaggacgatgatcgatgagtgacttaacgagttctggtgctctgttgcttgttgcggccaaaattattcatgaaccactcatgcttgtatgaagccatatccagtccaaatacaactccaggtgcaaagcctaaacctgctgctacccaactcagtgattcttcttcttcattagtctccagcggttcaggttgcggtggtgttgacgctttccaaggaccactcttcatcacgtccaggtctctcaaatatttttttgggattcaataataacttcaccggagagatacctcagtcaatatgtggactcaactctctatacgccctagatctattagacaacaatctccacggctcaattcctcagtgtttagagactctgatgatgagttctcttttgtatcgtcccatgactttagcctctcacaaatttagttggcatctggatcatatgatactgcggatatcaacactttagaagcgggttggcaggtttggggtagacattaatattgtaaactccagatctcaacatttgttttttggactcttatttataatgatttttgtattcttatattttaagagaaattccattgtttcttaatatcaactgttgttgtggctagcttagatctttccagtaatataatgtcttctcaatttcgtcgacttgctattattttgtgctatgaaagttaaatcaattatttttcgtattaaatcataggaaaatgaagagtttgaactcactaatgatgtccttatcatgagtcagttcttcattcaacttggagtttcaattatcccagtttctactatttacgtaagtaataaactcttggttttatttatttctcattttttttgttacatatacaaatgcaattatgcaaaattagtttaattgttttgactttctttttgtttgaaaagagcctcaacggagatgtgattgattgtattatccgagcggatcaaccgaccttcgatcactaactcctgcaaaactatataattcaagcatttgttaactagaataagttatgtaggaatatctccttggaatagtacgaatggggaaagacgtacagaaaaattggcaagtgtgccacgagaccggagaagagtgtccggcgaggacgattctgtatgagaatggatctgtttctcacaaaagcatcgtccaaaggttccaaacaaacactaggtctccaacaaagccattgtcggacacaagattatcgttgttatgttatatgtacttttgtttttgtttactcagccaatattatgaaaaacactttaagacaatattgcaaataaaaatacataattacacttcaacatctttataatagacaaaaaaataacatttgggccgacaagtttaatagcccatggtctatggttttctactatgactttacaatattatatttagatccaaaaatgaaataacatacaactttgaaatcttacataaatatgggcttgacaaaaatttaacttttggctgaagacaatacttttatttttttcaccctatccatttgattgttagaagtatttgtttaaaatcttaactttgactatgtgaattttgtttgtcagtttttaaagaaattttacttatgttatgctcatttcttgcttttttttgcttaatttttgcttacttttgatcaatttgtttctcttgattatttaaattatttcaataaacatgatatattaatagatgcgtagtcactatattaatagcctatcaggtttggattttcgtacaatctaatggactctcagctgggtatcagatgaacactgcttggaaattctccaaataggttacagtcttcaagatttagccatcttagagactacatgtttgaaaattcatgggagatttatgaataaatgtttacgaaactcatatccaattctctaaggtttctcaagtttcgagcaagtagatgaagaaaagaattataaattgatagaggcatgtaaaaatagcccaaagaagaaagatggagagacaacaacttggttagctgaagaagcttggttggaattttgttctgaaagtgaagaccaaaagaggtcaagtctttcttgttagaaacttaagtctccaaaacagaaacagagtaaaacagagagaaaatcaacttcgtattgatcgtgatcaatacgtaacttgaatgaaaaagaacttctgttttattcaatagaaaagacaaaatgaacaacttgtgttccagtaatacaacttatatttaaatagacttcaatcgggtttgaaagttaagagatgcaactcttctttcttgtgacccttaagacataactgtctaaacttaatagacacgactctttaaccaaacacacactttgacttaacatacataattacttatataattattagacatactaaactcaattatcgatcaacatttctaaccccacaagtttatcaaactgagctgggattggcgaaccggaaaaattgttgtaaccaaggttcagatcacgcaggtgacgaagtctaaaaagactactattggatttgagcttgccatggaggaagtcgtcactaaggtctagcccaatcactttgcctgacttagcatcacacgccatcccaagaataacaatcactttaaatcaacccaagtagttttctggatcaaacactctttcttgaactcaagaagagcatccctttggtcagaatcacacaagtgttgtgtagatgaaacaaaagtgtttagaaaaacttgaaacgaggagtaggaaacaaatggaacgaaggatgaacctcattttctgattagataagaaagcttcaatatttttgaagaaaaaaaggaagttatcgagtagtgatggtaaattagtgttgtagatatatataaaaaaaacaaacgcctgaagctccattgacttgatgatttgaagtcttttagattgcgactactaaactcgtccttgacgccaaatgggcaatcatgtttaaaattttagaaacgaagaacaaaactcgttctcagtgagcaaagtaaatttgagtttagtgagggcaagtagaaaaatctatgtcccgtgtatattaagaccattttcatcggttagaaactcaattatataaaataatattagttttattaattttttattatttatttttgaaccaatcagaatgaaacaattttaaaaatgagtatccataagtttctctcctatcttttcctttttctaatttttcattttattttttagaatttctttctcctatataaattctcaatggagatgctctaaactagtcattcaacttcacatgagactcacctatggcattttcccataaaatgcttacctatgggatacgggctttgccctgatgaatcccctaatgatttttatcaaaatcattaagttaaggtagatacacatcttgtcatatgatcaaatggtttcgccaaaaatcaataatcagacaacaaaatgtgcgaactcgatattttacacgactctctttaccaattctgccccgaattacacttaaaacgactcaacagcttaacgttggcttgccacgccttacttgactgtaaaactctcactcttaccgaacttggccgtaacctgccaaccaaagcgagaacaaaacataacatcaaacgaatcgaccgattgttaggtaatcgtcacctccacaaagagcgactcgctgtataccgttggcatgctagctttatctgttcgggcaatacgatgcccattgtacttgttgactggtctgatatccgtgagcaaaaacggcttatggtattgcgagcttcagtcgcactacacggtcgttctgttactctttatgagaaagcgttcccgctttcagagcaatgttcaaagaaagctcatgaccaatttctagccgaccttgcgagcattctaccgagtaacaccacaccgctcattgtcagtgatgctggctttaaagtgccatggtataaatccgttgagaagctgggttggtactggttaagtcgagtaagaggaaaagtacaatatgcagacctaggagcggaaaactggaaacctatcagcaacttacatgatatgtcatctagtcactcaaagactttaggctataagaggctgactaaaagcaatccaatctcatgccaaattctattgtataaatctcgctctaaaggccgaaaaaatcagcgctcgacacggactcattgtcaccacccgtcacctaaaatctactcagcgtcggcaaaggagccatggattctagcaactaacttacctgttgaaattcgaacacccaaacaacttgttaatatctattcgaagcgaatgcagattgaagaaaccttccgagacttgaaaagtcctgcctacggactaggcctacgccatagccgaacgagcagctcagagcgttttgatatcatgctgctaatcgccctgatgcttcaactaacatgttggcttgcgggcgttcatgctcagaaacaaggttgggacaagcacttccaggctaacacagtcagaaatcgaaacgtactctcaacagttcgcttaggcatggaagttttgcggcattctggctacacaataacaagggaagacttactcgtggctgcaaccctactagctcaaaatttattcacacatggttacgctttggggaaattatgaggggatctctcagggctttgccttccatgcctaatttggcccaaacaaagattaattaagtcaaacaagttgctaacatggaaaaacagcccatcagaacaatgacccatcatggcaacggctcggcccaacaaaaattctgcttggcccagtgatatatcagctcggcccatcttggttcggcttaactcgacatattcgaagggataaaaaggagaaatcgcaagagagacaaaggaaattttaggtcacctataatagtagaagacactattgagaaaagggattcagacttaaagttattattcgtagaatttaagagagaattgttgtctagctctttatcttttactttctggttttccgttctgtacgttcggttctctgttctgtattttcaggtttctcattctgtacgttcggttctccgttttgtccttttggttctccattatatatttcctgattttccgttatgtactttcggttctccgttctgcatttttggtttttcgttctgtaattttattgttctccttcatcgttaataaaaaatctactccgttctcctcaaactccttagttacttattgttaaaacctcggtacaaacattaccaagttgtcctctgtccaattccaacctagaagaaacgtcaacattgcatttttaaagtttgaatatgagccaaaaacaaaaacaaaaaaggagcaaaactgacttggcgaggtagaaaatttttgttcactacctcttcttctatgatgtatcaacgaatctgctctataccttctcttatttgacaggctatatttgagttttgcttctattccaataatgcttagccatgattttcaacaataaaattaccataaaagtttgtatataaaaaaaaatcaagaatctcggtcaaaacgatattgttgtagtgaactgagccatttgtttgggaatcgtttgagatggtagtcagcggcaaaacgacgttgttcgatgttcttgatttttgagtcgctttcaatcttctcgtgtgtgggtgagtttatatagcagaattatatccaacaatgtatattaggaaaattatcctctgaaaggcattcctttttttttagggtacgttttactgttttaggcagttacttctaggcaagagttatgccatttaacgaaaagtattgcttgggatccaaacaagcaccatatttagggatccaccaagatatcaatgtccaatgtggtcatgattaactcatgaatgacatcaaacatgatatgatctaactcatgaatgacatcaagctttgtaaagttgatacttcttttccacaagatatttttctctactagcgttcaagacttcgagctttgaaactaaatgtaacaagatgagagattaactagttttcaatttggaaccattcgttttttgacatgattctgacagaagtaacgtttgatattgtccaaatcaggtggttcgtaaatgatgctttgtttctgtttgaacatgcaaattgtaacctatggacccaaagtgtcaaaaagattaatttcaaagttcattataaacacatgttacaaaaacagatgtatgcattgacatgcaaaaggccattaagtataattatatatctaattagagtacaagttttttcacataattgccacatcccttgaatgaccttaaaatattgcatcttttatttttataaggaaaaaaatctattaggatttcaggctcaaaaggggtagtaaaatgtaacagaaaattcatcctcatcctagtaattgggaatttgaggtttcaaacaactttgtttctcagctgttgaagttgctccataaatctgtgaggctcacctctgcatctgactcgaaccagtaatctgcttttaactggcaatacacaaccaaaaattcaacttaatcgcaacatacgaaatgcgagactgatcccaaaacccatatcagtggatctaaatacttacatcagtatctgaagttactattttcaaggaaggagtgtctactccaactggagctttttgatcagactcattacccaacttgtcgcttgtttccgcactgtctcctttgtatttgctgcgatcatgtttgttcccagttattaacactgactgacaaatatatagataagaccagacacagagagtggaatgtgtaactaagtaccttaaaagatagacatcaatcggccccattctactcctaatcaccatccggtactgttgcggaaaactcatctatcgtgaacaaaaacagatgctttactttgtgacacattatattacaactgtacagcaaatatgaaagcattaaaaacgctcacctcatcaggatctggaacttcgatgtaactagctgtaggagctttaattgctagtaatgtctggttctgtataaggactaccagtttagtatgttaaataactgaggaaaacataagatgattttcaagaactagttggggaggacctgaaaccgtgggagactcgttatatcttcctccgtcataaacatgtacctgtttatttccatcattgatcttagcaacactctcgtgtatatacaaaaagatgaaactcaaataaactgacgaataccttctacagtagtcatcttcctccaaggatctgagagcttcttgtcgttccctggagatacataacatgatgatcttcaaaccatgtgggaaaggaacaatggataagtctccaaacataatataagaacacaagcaaccaaccttataagatcatccaacctgctttcctcagattgcatactctctacttctgactgaaaatacgtagatatgtaaccggtcagtaatggggaatttgaaaataactgtgtgaaataaactataagacagaaaaataatgaaatcatgaatttgacagattatttgcatagcagtaagttctacgacaaagaaaacacgtgaaaatgcttgtcacaatgaaccttaagcctagaaatttgatctcccaggtccttttgtccaagattgtcagcacccctgcatcaatagcgcatacacaaagtcagacgaactcaagctatatacgctgcaatgtatccaagaaagaaaaaatttgtgtacttacttccagcggatatgattctttgtagttttctctatcaatccaattccttcaaggacatttgtaatatcatatatccttcttttttgtacctgttaagagggatcgcaggaacacgtaagcacataagaggagatcctaacaagctgatgaagataactagggagatatcaaacagttaaggcaagggttataaaggtgagtgatctttttagtccacgttcttaattagatcttctacgagttgagacatacatttttaacttaaatattaagatacatttagcatacctccaaaacaactgcacaatagttaaggtcaagtgttccatcctcagcttcctggatcaacttcacgaatttttttgtcaacaaccctatcaaacaaaagagacaccgatacaattacagttgttatctccatacaaacatgaaccttagtaaacagaactattagttacctaaagaactgtcataacggcagttaatactagctccatttaagccaccattttgcacttctgcacaaaaaaactcattcacaacaatgctgaatacaaacagattcttattttcaatacatatcacattctaagagctagccaaagagattgatcagaaaaagcagataccgccattcgccattcgtttcccagcctttaacagtttagtaccaccctttgacttgttgtatacacgtttaacattttgaggagacgactcttgtttcactattactttagctatatctatgctttctcctccagacatgttggcaatagatccaagctgaattcgatgattctttctactcttctgctgcaaattaagaaaagatcaactcaatagcattacaatcaccaaaacgaatctaaattcgcaaattgagattagagaattgaaagctagagatccaattttggattaagtttcccttaatgaaaccaaacttcattcaatttttgttttcgcgaaatttgggaatcagaattaaacctagctatcgcaaaatcaagttcggaaatggaatcaaaatcaaagaaggaatctacgaggacttgagtaaacgaagagactcacaactttctgagtgatttgagagtaagaatcgtcccagtgaggtgaaattagaggagacagttgtgaattcggaagcgattgagagactgagaaaggtcgattcgttgaagaaggagttagagaagagtaacgaggatcagaggaagagatagattgaagtaattcgaagcgaaaaggagatcggtgatggtaagagagagtcggatcttcgcctgagtttgatgtcgcggccatgtaacggcggtgtatctccggtggtagagaagatgggatttagagtgattttttgaagcgattttggagaatcgtgatttaggtttttgtgggggaagatgaagaaggagaagagggaagatggagaaaaagatggagagagaagagaggaaacagcgggaagaagaggaagggtaaaagtgtctttttgttgtattaaaaagattaatataagaaagaaatattggaattatgttaaaagagcggtgggcgaaagaagttggagagagtttcgaattctgcctaagccccgcctaacttcttccgcttattattttactcttttgactatttgttgggcttggtcttgggcttggtcttgggcttgaattgggcttaataatgttacgacgtttacatatcttctagagcttcatactttgtagctttatgttaatgatcgacattcatggttcacgaatctataaatacggagtctcggcattgctagattgagtttacaggggagtcctaatctccgaggtccatctgcaccaataaactctatgaacggcccaaatttggtccagttatcataccaaaaagtagtttagagttcatggtctttgccaaaaggtagaaattagaatgaatttctaaacccatgattcattttgtttctctggtatcatttttctagctttttttctttaatattttcataaaaacaattgaagaatgaagagtgcttctgcatagttgagtacttgagtaagtgatatctaattaatatcaaattatgtgaaaattataccatcttttatgaagtcgtactatatatgtatatatgtttttttgtctatcttaatatatgtttatgggtctgattggtaaccaaaagttgttaactctactacaggtattaagctgtacaataaactaagagtaaaactttgtaacgcttagtaccgttttgtaaagtggttaccaatcaaaacctatattaggttataaggaagcgatgggtgcattgacgacaaacacacaaacttggtgtatagcgctacacaagggactgttttttttttcattgtattattaccaattgcatcatgtaacaaaaataggaattcaaaatactgaattaattaatcatgattttgaataaacaaaacatattaaaggaatgtaaatataattgagttatttcaaagagttttcgtatcgcataagtttgataccttaacttgttttcgtaaaactggacaaatatgacgagaaaaaatcccttcatgatatcatgatggcttaaatcaacgtaatttccattagtttagatctgagagactgaaacattggtgtaccaaacaatgtaaaacacacattttcgtccctatggcatgtgacaactttttagccaaaaaaaagaaagagtattttatttagaaaaatatttgtgaagacatattatccacatttttaaaatttattgtagccatggatcagaaaaattatattatattttagtttaactgtgacaaacaaacaaaacaagattatccatataaatgtaagttcgtctagatattcatacagaaaaagtttgtctagttgcatttttgttgtcctaaatttcaagtgcactaacgcgaaatctacttcacttgtcatggtgcagtaagaaaaaaacagtaaataaaaaatgaaaaaaatatggaaacactaaaaaagaatttacaatagtcgatagcatttttatttgtttactttggttccttttttctacttttatacaaaagaaaaggtgaggaggaatttatagcctctaaaagtgatcttacaagttatctaacgttgtttttttggtaagaagttatttttattataactcctaccatttaggtaattaacttccttaggcttaagagttttctacaactattagattttaacccgtagtacaccatgaagatttttttttttaaaattagtatatataaaagtttgaaaattatatctatctataaaatatttttattttatattttataattcttattaagtaacgttcttccaaacccgtctcgccaaacctgtcctataaaaaaaaaagacgtacaccgctaatttaaataaataattaaaataaatattttacaggattgcaattgtattttagtttgttaaacaaatttttgttttaaatagttgtcaaaatctagttcaaattttggagaaataagatttagtgaattgataagaaatgtatttaggtgtgttttgctcattttaagagattgcaattgtattttggtttgtcaaatattttttgttttaaatagttgccgaaatctagtttaaattttggagaaatctgcgtgatatatggattggaatacatttggaatatttttcgtttgttaatcaatttattgccagaaaaaacaataattaaaagccagtggcaacaattgtaaataagttctaactacaggatttattttacaaaatagctgcaaaaaaatgtagatataataatatttactactatatatttttccgtatcctacattaatattagtgaagctttgaaatcattatagaagttcatcaattagacctcttttgaattgaattcagttttgattattgggatcattgatttataactactcttgactcaatatagtgcgttggaaaaattatgtatttgtaattgttcgcatagtcgttgttagacaaatatcctacataacttttctttttccgctccgtggaacgaagtggacacatgtataaatgcatgtacattagtggccggcatgtgtgcgtatttgttgtataatacattacaaaaataaacataagtatatacggaaaagggatctacgttgagagagtagaggacaaagcgaataaaggtaagacatgtgagagaagaggccatgttttgcggcaatatcacgagggccactatgtgtaactttatgatctcgatgtttatgtgctgatgtcttggcttctcctacttgaactttagcttctaccgcaccttctactccgagtatcttatacttttttctttatcaccaaagactttttaggcattaccaaaaaaaaaaaacattaggtatattttggaccatttaaaaaaacatttcaagttttatatatcgaactattaacaacacaggagaacctatattttcaaccattacatttttattatgataaagattttgaacttttaatttccatgtcacatttcccttttgaatattatggatcagtcatacatatataagtatgcaattactactagtctaatttggtctaattagataataagtattgagcatatcatatttatatagtgaaatactggataatattaagatttactcatttcttacaagctagatttatataatttcaattagatggggagtgagaacttatgtacactaatataacatttcagtcatatacagtacatgttcaccatgtctttatatggcataatatactcttgaatatcaagctagctggtaaagtacgtttacccttttgattttaatagaaagtaactttaaagtcgttcgcaaatgatgaataagataaggataatatgtgatgaaaataccgagttgcatgcatgtatttgcaataaactaaagtactgttccgtatatgtttagccagtttcactttagtataattccatgattttttgggtcaattttgatttttagcatacaaatatatttataatgctataaaacttgaaatgtttagtggagagcttgagtaatcgtctatatagtttgtagatactggtgcagtttttctgtatttattgaagtcaattagttgatatattcttatagataaattctgtgaaaatttgataaaacattgctggtacattgaagacattatccacaaagactaattattaggtaatcaaggagagtgatctcccacaattgtttttcattgtccaaaaaaaaaaaaaaaaattctattattacttttctaaatctaaagttgtgagataattttggatttatttttttctaaggtaagtttggaaaacaaatcttactgatatgctaattcaatttagacttctttagggtatttggagtactttaggggatactgtctttgcattagtcctaagaacatggagaaacaagaagacaaacataaaggtggccaactccactacataactaatatgcatacgtttttaaaataatcaaagaatcatataaatgtttgcagttgatatcacctactccaataataatcaattaatttttatatattacgacgagtgtatacgccattatacaccaaaatctaaatctggatctgtgtcaacattttgtatggttggatgcaagtaaaaaaccatcaaatactatatgcttatgactattaaataaatattgcatcaaagtgtacgttaaaaataaaccaaactctatatatatgtatggattagttataagaagagtttgatcccactcgatcactttttcttctcggatcctttcccaccaaaaacacaagcaaaacaacaaagactctctatctatcttctctttcttctttatcgtttattctatatattaacgacattgtaatctaatttgcactgtcttcaacattctctttttctatggctcctctccctttcataccggaacaaacccgttcgcaaacgcgtttatcttcagacacaaagaagaagaacagaaacaagaaaacgtcccaaccaccgcctcaaacgcaaaagataaagcagaagacggtaccatcaacatcatcatcgtcgtcatggagccagataaagaaccttttgagttgcaaacaaatcgaagggccacgagtgcacgaaccatcaaagattacgtcatcatcttgtggctcctctctttgtaagtttagtgatgttatttacggtaatgcccgtgtgattcaccgctccgatcactcccctgagagtagcaatcttggacaagatacccggttgttgacccgaaaacccattagtacccgtggatcttcttcatcggttagatccaacggttgtggcgcttacacgtcatattcaacttccaaagctatgcacttcagaaacctctcaggttgctatgagtgtcacatgattgttgatccaagcaggttcttgatatttttatcttactttaaatatgaataattattatgtgaaatacttgcatctcatattacaaagaaaaataagagagattaatagttaataatgcttcgtttatataattaggtatccaatagcaccaagaatatgtgcatgtccacagtgtggggaggtcttccctaagcttgaatcattggagcatcatcaagcagttcgtcacgctggtatgcatcacttaattgtatatatctttttgtatgaaagtagtaaaacttgtatatatattacatttgataacatagatcaaaatccataaaaatatgtgggcactagtaggtattatgccgttatacatcagacataaaaaaaaattcttctttctaaggcaatttttaaaatctatttccccttttggatcagacataaaaaaaaaagttgataaagcagacatataaagttcaatttaactcaaacctgttttggtttaattaacacaaatcttttatcaaaaataaaattttgatttgtatcctcttttggatttttctttttgattacttttgaaataattaaataatgtaagcaattgtccgtcttttagttttctttatctcgtaattggggccataaatctggcatgtcctgtcgttgtttttggatttatgtttttttttccttcagccatttttggatatgtatttagttatgtacagcagcagcatacgtatattattattacagattcattgtacaaaaattataatatcttagctcgaaatcacatattaggtgacaaacaacatcattaatctatcactctataatggttctgatttttcttttctctaggggttttaaaatattaatttcaaccaaaaaaagaaataacggtttagtggcttttccaaatatattttggaatttgcagatatagtagtgaactagcttggaaagaaaaacagcctaatcatacttaaccaaaatgatattcagtttttatttatatggatatagagcaaatgaaatataattgaagaaaaacaaaaccaaaaccaaaccaaatgaaaatatatatgataagcttttagtctttttttccctttgttaaaaggcttttatactcttattagatggattaatcatacggaaatttatatcgaccatgtaatattatttcaaataaaaacgttttgtaatgattttgtagaataatttatgattcttggattccttctagttgtggtgaatttaaggatatccatctctgatctctatatcgacaaaaaaaaaaaacctatgtgaagatgtttttgtaatgtagttaattttgattacagtgtcggagttggggccagaggattcagggagaaacatagtggacatcatcttcaaatctagctggttacgtaaagacagtcccatctacaagatcgaacggatattaaaagtccacaacactcaacgaacgatccaacggtttgaagattgtcgcgacgcagtcaagtcccatgcacatgcctctaccagaaaagaggctcggtccgccgccgacggcaacgagcttctccgcttccactgcaccacagtttcttgctccctcggctcacgcggctcgacctccatttgctccgccatccctggctgccgcgtttgcaccattatccgccatggcttccacgccaaaacggtacgtgtaggcaatggtgaaggaaaagaggagattaagggcgtgaggaccactgcaagcagtggaagagcacacgatgcgttgaggtgttttgaccagcggagggcgatgcttgtttgccgtgtgatcgcgggaagagtgaggcgcgtgcagagtgatgtgccggaagatgaaagtggttctggctcgtatgattcggttgcgggggccgctggggtctacacaaaccttgacgacttggttgtgtataatccaaaagctatacttccttgctttgtagttatctacaaagtctccgagccttaaaaagttgcactttacacgatttggatttgtaagtttgttagtggaatgtgtgaagtagtggattgtaatatttaggaaaaaaagtttagcatattaattgtgtagattcatggcctagtcaagagtgaaagattcgttgtggtgtggcctagtcaagagtgaaagattcgtgtttttttttttttttcatctatgatttcgatttgacctatattacaaaatacgacactttctaacgttgactttttaatatcatgctttcgattgattaaacacatatgatccactaggatggctctaaatttgccatagaaagagcaaattaagttgcataaagaagggaaatgtgtatgatcttgctggcaaccttgattttcagggaatgacagttgaagagttgcaaaacttgatgtcctttagatgctctgcaacagatcaggatatgttgactagagaggtaacatccgaagaaaatcaaaaagtgttgtttgcgatgccaagtaacaagtttccgggtcctgacggttacacaagtgagttctttaaagcgacttggtcaatcactggtcaagacttcatcgctgcaatcaaatcttttttcatcaaaggtttccttcctaaagggctcaatgcaacaatcctagcgctcataccgaaaaaagatgaagctaccttgatgcgagattaccgtcccatttcatgttgtaacgtgatttacaaggtaatctctaaaattatagctaatcgtcttaaagtcatgctgccaacctttatcctccaaaatcaatctgcatttgttagagaaaggctcttgatagaaaatgttcttttggctacggagttagtcaaggactaccacaaagattcaatctctcctcgttgtgcgatgaaaatcgatatatcgaaagcatttgattctgtacaatggcaattcctgttgaacacgttagaagctcttaatttcccggaaaatttttgtcattggataaaactctgtatctcgacagccactttctctgtccaagttaacggcgagctggcgggtttctttggtagtaagagaggcctgagacaaggttgtgctctctctccatacctgtttgttatatgcatgaatgttctgtctcatatgattgatgtagctgcagttcaccgaaacattggctatcaccctaaatgcaagaaactcagcctaactcacttatgttttgcggatgacttaatggtgttcattgatgggcagcagagatcagttgaaggagttatcaatattttcaaggagtttgcgggtaaatcagggctgcacataagtttggagaaatcgaccctttatcttgctggagtttcggagctaaatagaaataacattctctccgctttcccgttcgctagtggtcagttaccggttcgttatttgggacttcctcttctaacgaaacagatgactactgcggactattcgcctcttcttgacaaagtgagatcaaagataagctcttggacagctcgttccctctcctatgcgggacgtctagctcttatcaattccgtgattgtaagtttgtcaaatttttggatgtctgcatataggctgccagcaggatgtataaaagagattgagaagctatgttctgctttcttgtggtctggaccggagcttaaccccaagaaagcaaaaataacatggacttcgctatgtaaactgaaacaagaaggaggattgggtatcaaatctctcttggaagcaaataaagttagttgtttgaagctgatttggagactcgtttctcggcagtcttctttgtgggttaattgggtttggacttatattattcggaagggctcattctggtccgcaaatgatcgttctagtctggggtcttggatgtggaagaagttgcttaagtacagagatgtggctaaatctatgtgtaaggttgagataaaaagtggcagctctacttcgttctggtatgataattggtcacagctagggcaactggttgatgttacaaatgctcgtagaacaatagacatggggataccgttagcagctactgtcgcgactgttttggcttctcacaggaccaaacaccatcgtactgcaatctacaacaagatagaggcagagattcagagtattcttcaacgagagagatcaggggcaccagacatttttctgtggcgatcctcaggtgataatttcagacaaagtttcataacaaaagtcacttggcacaacatccgggttattcacacgcataggcaatggtataagggtgtttggttctcatacaacacacccaaatactctttcctgttgtggcttgcgatccatgatagattatccacgggtgatcggatcaaaaagtggaattccggacaacaagtcaattgcgttctctgcggcaacgtcgaagaatcaagaaatcacttattcttctcttgccattacaccactgcaatttgggataatctaacaaggcgtctcctatctcatgagtactcaactgactgggaccgcctattagctctactctgcagctccacaatgtcaaaggactctctctttctgtttcgctacgtcttccaagcatctctctatcacgtctggcgagaaagaaatgcacgacgtcacggagaagcacattccaccaccactagactcatcaaactcatcgacaaaaccgtgcgaaatagaatcagctctataaacgacgttggtgaccatagctacgacaactgccttaggttatggctctccacgcgtctcccctcatgatctacttccctcagcttcatttttgttttttttttttttttcagaccttttctacacctctatctattttcactctaaaatttctgagaaacagatgcatcttttgtaataacgtttttttgtttgaatataaattttacattctttcaaaaagaaaaaaaccttgatagatccaaagtttgggtatccatcaccaatctcatgtttcaacttggcattcttggcttggctatccaccatcactttctattttacaaaagatgatttctaaattttatttaactatttttgattctttgtcaaagccaatctctttcattgattgcttaacaaataaaagtcataaattatccttcactgaatcttcaataaacaccatttgtcctcttgaatacttgattttatgatgacgctttatagtcatcgccatattccaaaaaaattcccatgacattattccgattacttgtttgtcggaatccgacaactttttttaccatatattccatcggcaaattttttggaacgtcgtatataatttttcgacaaattttctaacaaaaataacattgacaaaagaaatttgaaaatcgaaactctgtcaaaaattttcgtcgatatatcgacaaattttgtaaagagtttccgataacattccttttgtaattttttacaatttccatataaatatgattttccgacgacgcttgatttctaataatggatttgtttttgtcgaaaagccgtttgaaaatgccgttttcatttgaatacttgtaccactatgagtctatgactaaaaccgattgcatcaaacgaaggcattacattccacttatggtgctatacgcccttaaaattttccacacaaattttgttttttcttcaaatagcaacaacattgttcaacaaacaaatgcttaatttttgttgtattttttattggtcatcataattttcgtattatctgacaaaataaatcgtattatctgacaaaaaaaaaaagtcgtatctaaagagaaactaaacaaaaattaagttcagatacttaaaaaattagaaattgctccttcttgtttgtaaaaaaaaaacaaaacaaaaatactacttcttcccctgaacccaacaagagagaaataatcaaacaagtaaagtaagcaagtagcagagagttgactttgagattttctttcttacaaatcagaaccaaacttagacaatgtcattcatgtttgcttcccctattatcaccccaaccattggctcttttaccttctcttctcgacgctccaattacatcgtgatgtcggccgtccgaactaactcggcttcgacgtgtcctatactaaccaagtttcagaaagactgcgaaatcttcttctggaatcacggtggtatagatttttatttttactcgaatatctcaaaattaaaatgtaaatatttttaacatgatttagttatttaattatttttttaatttgttaaaccaatcatttgatgaaaacgtagatatagtttctacagagtttttaaaggagaaacgtatctacactctcttctcattttttttatttttctagtctagtggggagtctcttatgtgagagaccccaatggagctgctcttaggtttgtcaatgttctaatgcttaaaactgttttcattcggaatcagatcataaacactgagtggggaggattctctaaggttcttccgcagaccatttttgaccaagagatggatgcggaaagcccgaatcgtggtgaacatgtaatagaatttatcctttctttagatgcatttatgtttgtctttttttttttttttttttttttttgttaccgtctattgccacaagtctcactatactttactgttttgtgtgtgtatgaagttatatgagaagatggtctcagggatgtaccttggtgaaattgtgaggagggttttgctccaaatgtgtgaaactagtgacttgttcggtcaattcgttcctggcggcaatctctccaaaccctttgcactcaagtacttctctctcacattctttatccgattccatttgcactcaagtacttctctctcacattctttatccgattccatttgcactcaagtacttgttcggtcaatgtgcagtttggtttatggttttgtttcggctcaatatttttggttttggttatatttgtagaaaatagaaagtgaaaccaaatgataaccacttgtacacgtgtacttcagtttcttcaatttgttgcaatttcgtttattaaacgaaaacaattggatttttttcaactttagtgtattttgatttctttggctcagtttgatttatcggttttggttacgtttcgatgttggttcagtacgattttaaaccaggaaaatcaatttggtcacaaacacattttgatacaaacattttggttcagctttggtttatatgcttatatccctaagattaaatatcctaaaatcaatactatctcaaagtggccgtgtgttttgctttttaggacctttgaaacttgaaattaaaaaaattcctaactgataattttaattatatttgtgtaaattttgtataggaccgagcatctaaacaaaatgcaagaggacactacagatgatcttcagactgttggattagtcctatacaacattttggaggtaagttgttatatacaaataatgacatttagagagtggataaactgtataaaactaatcaagatattggaaacaggtagaggcaaatctgcaggaaaggaggagagtggtggaagtgtgtgacacagtagtgaaacgcggagggcgtctagcaggagctggtgttaatgcacgaattaaacaagtacgaaaatgggatctctagggaaggaagaagaatctttctattaatgacgagcccgcgacttaggcgaattggacggattacaaaggatgatttcttcaacaagcataaatagagtaagaacgagccgattgtagatgaaagacgagtttgaggccggaagacgatcttgatagctgaaccttgtaaaaggctgcctacgtacccttagaaagggatcaagccacacgtagttcatatcgcgataaacgagctaggccgttactggaggaaggtcgtatgtcgagttaggcagttttagggatgatccggcggataagtgacgagttgaatggcttctcgagacgtgcgagtaggttagttactttgggcgggcaagttggcgagacacttcggacggacgagtaaacgagctactcaagatggatgggcaaacgaggtacttcggacgggtgagctgacgagctgcttgagacgggcgaacggatgagctacttgagacggaccggctgacgagacgggtgaactatgagctacttgagacggaccggctggcgagatatttcggacgggtgagctgacgagctgcttgagacgggcgaacggatgagctacttgacggaccggctggcgagatacttcggacgggtgagccgacgagctgcttgagaccggcaaactgataagctacttgagacggaccggctggcgagatacttcggacgggtgagctgacaagctgcttgcgacgggcgaactgatgagctacttgaggcggaccggctggcgagatacttcggacgggtgagctgacgagctgcttgagacgggcgaactgatgagctactctttgtctctaagtgtcctcctggcgagatacttcggacgggtgagctgacgagctgcttgagacgggcgaactgatgagctactctttgtctctaagtgtcctcctcgcgagatacttcggacgggtgagctgacgagctgcttgagacgggcgaactgatgagctactctttgtctctaagtgtcctcctggaatctcctttgacaagacatgctattccgtatttatagccttctgcgtgtagggcattcctccagggttttgacgagcctaccctcttgacttaacattctgcttaggcctttgacttggatttgggccttgggaaaagcaagcccaaatctaacccctaacagctggtatagttgcaattgtggagaagattgaagaagagaccaaaagaatggattcaggtaaaagaaccgttgtggctatggacggttcactctacgagaactacccacagtatcaacagtatatggaagaagcactagtcgagcttcttggcgataatcgaagttacattgtgatcatacatgccaaagacgtatctgggcttggtgctgctcttttggctgctactaactctatttatagtacttgaacgttgaacctctacttcatgagtatgacttttgtccatttgtttgtgtacattatatatatataattaagattgttcagaggagcaagtcgagcaacaaactagaagagatgagtaagtcttggcagaacaatttccaaaatgaacaatcttgatgacaagataaataattttggataaaagtctttccctatttgctaaatgaaacactctaaatgactttagaagttttgatttaagactaatcaatgttataatcatacatatcggtcttggaaaaatatctatagagctagatcataacccgttattgtgcagcacggtagaactttaaattttaaatatttattgaaagttgaattattgtttgtttatagtacattttaatcattctatacataatacattgacatataagataatatcattaaaaatgtattttatttttctaatttaattaaactaatgaaattaattaaattagtattgacttgtttattcttgttgagatgaattaatttactctttcaagtttgatttccaataactttctaatataattacttacaaggggcaatgttacattatattttgtacttcccaaatactagtataaaatatatttattcgacccattatctactttgatatgattcgaaaattgctgatatttgtaagttcataaagcaaagcaattatttaaatttaaagataattttcataaatagcacttaaatgagtttttgttccaaatataccatcactagttttctttctaaaaaatactattaactttttccccaaaaatactacaaaactaaacctactttaaactttcacaatatactaaatccatacccaaaatttcaaattataaacacttgaatattattattagtgtttgtgtgtatccgaaaatcttttatcggatatacacataaacaaactcattttttcgcttccaatcactaaatcctgtgttggtaggatatttctagatttaattctaaccataatcatgaaattgaaataaaatcaagccttttagatagatagatagatatatatatatatatatatatatatatgtgacttttatgaagtttgcaaaaaccaaaaggacaacatttttcaaattagaatacaatttttttaaaacaattgtagaatcaaatcgcatcctaagttcctaactattgttaacaaaaccacttactaaatctttgtgagaaattacagaaattatacctatttaaactttctataattaatgtaatttttacttttaaaggttaagtgattaacccaaacattttaaaagttaagtatttatttattatatgtgtatctataaagtatctataagattttcaggtttttgcaaggaattaatagatctaaagtggaaagagaaactattgtttttttctcaccttttatgcttcttcttctaacaactaaacccaaattgatcattagtccacaacccatagtgttagtttctttatttttcactttatggtgttatacgtttaattaagttatcaaaatctgttattcttgcatatcatctttcttatttaaagagaaaatagaaaattagaaattgctccctcttgttaaaaaaaaaaagaaagaaaaagaaactgtatcttctagtggacaaaaaaaaacttgttcttctcgtaaaacccaacaagagaataatcaaataagtaaagtaagcaagtagcagagcaactagaaagttttataaattttagttgaaagttgactttgagatcttcgttcttacaaaacagaaccaaacttcgacaatgtcactcatgttttcttcccctgtcgtcaccccagcactcggatctttcaccttctcatctcgaccacgctccaattacatcgtgatgtccgccgtccgatctaactctgcttcgacgtgtcctatactgaccaagtttcagaaagactgcgccactcctacaccgtacctacgcaacgtagccaacgccattgctgatgacatgcgagatggtctagctgttgaaggaggaggagatctcgagatgatcttgacttttgttgacgctttgccttctgggtaattttttactttctcttctctaattacacattatgttttatgatctataaatgattaagtttaagtgtttaacattataaccaacaaaaaaaaagatgattaagttttactatatatggaatgaggaagaaaaataaatgtgatagtcttaagattctaattccattttaatggatataggaatgaggaagggttgttctatgcattggatttaggaggtacaaattttcgggtgcgtagcgtgcaattaggaggaaagaaagagcgagtcttagctaccgaatctgaacaaatatctatttctcaaaagcttatgattggtacaagtgaggtaaatgaatcaaatctttaatatatcaatgagtgttgattggtttaattggttgactcggttgaatgttttaggagcttttcgggttcattgcttcaaagcttgcaaattttgttgcaaaggagaagccaggtcggtttcttttagaagaagggaggaaaagggagttagggtttaccttttcattccctgtgaagcaaacctctattgattcaggcacattaagcaagtggactaaaggctttaaagtgtctggaatggtgagtttatgcgttatcatttctttgttcccaagttattatgtggtttcatattctagtaagtagtaacctttaaaattttgtttgtaggaaggaaaaaatgtggttgcttgtttaaatgaagctatggaagcacatggactcgatatgcgagtttctgctcttgtatgtttctttttttgttctcgaaaagtagtagatggaatctcatgtcttgtgcatattgtaagtttgttgatgtttgtgtgtttaaggtaaatgatggagtgggaacattagctggagcaaggtattgggatgaggatgtgatggtcggtgtgattcttggcactgggaccaatgcttgttatgtagaacagaaacatgcaattcctaaactccgaagcaaatcttcttctggaacaacggtattattgatatttatatatgtagataggtatgtcaatttttcatgcttaaaactgtttacatttggaatcagatcataaacactgagtggggagggttctctaagattcttccgcaaaccatttttgacctagagatggatgagacaagcctgaatcctggtgaacatgtagtaaaattttatcctttctttagtaacattatgttttttgcctggtgtcacatgttttacaattgtttactgtttgtgtgtggatgaagttatatgagaagatgatctcagggatgtaccttggtgaaattgtaaggagggttttgctccatatgtgtgaaactagtgacttgtttggacacttcgctcctgccaaactctccactcctttggcactcaggtatctttatccaagtccatattttggttgttgttttatgagtagtagatttagttaggatgtgtagtttggtttatggtttggtttcggctcagtattaaaactcgatttcgttcagtttgatggaattacggtttgaaaatttctcttggtaatgaaaatatcaaacattgatcattggtgtatttcagtttgtttggttcaggttaaaaaattacacaagatcattttgttagttaagtttcaattttggttcagttacaatttcggtttgttcgattttaaaccaggaaataccaatatgctcaaacatttcggttcagctttggttcggtgcggtctatatatgctcacccctagattcaataccttaataacttgattagctaggaaagtgttgtaaattctgattgacagttttattcattatttttttttttgtaaattttgtaaaggaccgagcatctatgcaaaatgcaagaggacaatacagatgatcttcgggatgttggatcaatcctatacgactttttagatgtaagttgttaatgtataaggctaatcacatccatagatttgataactgtaccaacctgatcgagctattgaaaataggtagaggcgaatatgaatgcaaggaggagagtggtggaagtgtgtgacacagtagtgaaacgcggagggcgtctagcaggagctggtatagtggcaattctggagaagattgaaaaagataccaaaagaatgggttcaggtaaaagaaccgttgtggctatggacggtgcactgtatgagaagtacccacaatatcgacagtatatgcaagacgcactagtcgagcttcttggccataagcttgcaagtcacgttgcgatcaaacataccaaagacgtgtctgggctcggtgctgctcttttggcggccactaactccatttactagtacttggacctctacttcatgagtataggaggacttttggtccatttgtttgtgtacatttatataagatatcatatcaatatcaataagattgtaaagaggagcaacgaactagcagaagattatgtcttggaccacttcgtacaacactagaaaatccttttacttccaaagtgaaaattttgatacgatttataattttggatataaatctatccctatttggtttgtgaaacactctaaatgaagtagaagttatgaattatgtctaatcaatgagttagatttgtaactttgtttaaacaaaccgataagttatgtttagtaacaaacggctgactagtaccattgctttgtataaatcaataaattaaatatagataatagttttaaagattcttttctagagtaatatatattattttttttgaaaacttttaatatcattttaactaacaaataaattttaaccaccaaacgtttagtttttagagttggcaatcgtccattttttctctcttttaatcactttttccaaccgctcatatgattggtaatctccaaagctgtttgttttgttttgtttgcaaacaaatctattggatcttactaatcaaacccaatgtcataattaaatatagggcaaggcaaaatatttgtagtactcttatttgatttgctatatcatctttgatcccattaaaaatatgcagatatttgtaagtaaatttaatatatgttagagggaaagttaattacaaatattaaaatttgcaatatggatatccaaaatggataatacaatttattagcattcaaaaaggttttgcagtactggatagtcctaatatttcacgtataaaggaagatcaaccgtttcacaaatggattgacaaattacatgcgttttcattgtttctagattttcatgcatttgatgttctcccgaatactttgatttcgatatttagggatgataagtctgaactatcgtgtcacgacatgttcgattaaggtttttcttctgattttcaccaaaaaaaaaagaaagccttataacaaaaaaaaattaataaaacttttatcatattttttgaactttcataaaatatccaattaaaatttaaaaattaacagatttgtaactagttttgagaggatacgaatatgaaacacataatatttcattgagttggaaaaaaaaagttgtagttaaatcaaatttttaaaacaaaaattctatttcacaaatcttttctagctccaagcttatttttctatttcctcctaaatcaatttttttcttaaaaactccatctttttgactggatagtttggctgctttacgaacctgttttcaacaaaggtcgtgaaaattcaaagtgagatctgaaagaagaaaattcctctgatcgctcacgatttctcctgaattctccattagattttgcagagaaaatggtacactgctttatttctcttccactttgttttcctttgttcatgtctgacgctcaattctgatccacctctctcccaatttgtccagatccgattcatattattgcagaacagacaaggtaagactcgtctagccaaatactatgtccctctcgaagaatccgagaaacacaaagtcgaatacgaggtactactcatttcaaattctatcatcttcctttttttatcctttttaggtttctgattcttaattcttttcacaggttcatagattagtggtgaatcgcgacgccaaattcaccaacttcgttgaggtttgctgttttcattttgtaaaatttatcattcttgaatcagattttgtataatttgattgattttaaaaagcattggcttgttgaaattgtcttaggtttgaacctgatttaggttttgtataacaagattagggctgttggagatagattattcgagatgtagtagaagtgtgattgagaaacaataatatggaatgcgttttatgtgagtgggtgtcattgtgaatgttaatgtatgaatgatgaaactgttttgcaactattttcagtttagaacacacaaggtgatatacaggcgttatgctggattgtttttctctgtgtgcgtggatataaccgacaatgagttggcttacttggagagtatccatttgtttgtggagatattggaccatttcttcagcaatgtttgtgagctagatttggtgtttaatttccacaaggtacttaacctctttacttactcttatcctttgtaaatagcttctggaactgcttcgttggattcataactttaagttgtgatgctgtacaacaactggttttgaataaacactgggattttgctttgtcttttgagtattgaatgcttacaagttttgaactagttaagtgaattctcccagatgttttaaaatggttttctgagaattctcatatattaagcttacaagggtatatcaaactaagcttttgtttgcgaaaatcaaaagctagtttcgttttcttctcagtatacttgtcccaattctaagctgaccatcgtgacccattagataaatatctgtatgcagccttgaaaagcattccctatttgtgtttatatatgcagatgctacagtgtttctagatttgatctgtgtttgtactctaataattgctaactagttccctatgacttaaactgaaaggtgtacttgatactcgatgagttcattcttgctggggagctccaagaaacaagcaaaagggtgtgaaatttttgtttcaagcttctctctttcacttaaatgtatcacacatgctcttgctcaagtgctaaacttttaaatgttggggacttgttttaattcgcaggcaatcatcgaaaggatgtcagaactcgagaagctacagtgatgacggttaagaatcacattctacttggttaactgcgtacctgccagatgtttcttggcatgttcagagatttgctatactttgttgagttgttagacaatggtgtagcgtttacattgtgaatgaagaatttagagtgattctgctaaagatctctcatccaacattttgtttacctgtgagattttcatttcaactagtgatgtactatttgtttcgtagaactatgataccacacatgctttgagaggatatataactaatattgatagtaactgttgaattatcaacataatgtgatgaatcgatttctcgtgacaactttaaaatcctttatgatcatgtcgactaaaccattttctgctatctctgccagtgactggtctgtgctgatacccaaatccttctttgtcctccactgataagattcatcaggtcacagaatctcttacatctcagcgacaaaacagaagaacatgagacgttttctcaccaaccctactctttcttaaactctaacatgttagacttactaagcgtcaaacatgagactttgcgagttcctgaatcaatcatgaacattaacactaaccagtaatacgtaatgtaaccaaatcagtcctgcatctaatgcccaaaatacctttgttctgttctctagtgtcatcacagtttccctgaagttccaagagcttccttcaataactcaatgagcattcaaagcaatgcaatcaccaaccttaagtaataattcaacaacaccattactaaattccacctagcagatgcaaacatttgaacataacttaacccaagtcctcatattcttctttagataaacagaactgttccacaaacagaaaatttgaacaaaggttcaaaatctaagcaacatcaatggaaaaaagacaagacagcaagtgataagcaaaaggaaaaactcaaatctttgtcttcttgggtggtttcacaggacatattacaggagaagcatcatcatcatcaccttcttcatcatcagacaagatttggtcagggacatcatcatctggaacattatgctttgtgataaaatccttaagtatcttcatactttcttctttcatcgaaaccaattggtccaatacagtatcacccttgattgaatcaattgtgtagctctctgtcccaagcttgaactctactttaactagattcttcccagggactgaaacgtgactctcaatctccatatctaccctgaaattaaaactaaagaagaagaaggaaacgaaaattacagcgatgtaaggaaagaagaaccctaatgaattttaatttagcttcggtacctgaagttttatttgggtggaagaagaagcaaaaggccgatgaagcttagccgataattaattatgagcgactacagtttatctttaccaaatatttaggaatcttgcaaaatctgccatatttcactcaagaatttacaatccatgccatattcttataggctttacaaaatctgccatattttaccacacgtgaaatttcgtgaacgaaattacccttaaggtgggttagcgctctgacgaaaatagcgacaacttcgtccggcgaaaagaggtagctactgttccgtaataaatgtttccgttaccgattgaatattatgtggatttattttttaaaaatggtaatataggggttagtcactttaattgttattaatgttgcagaggaaagatgttgtgttgaacagactaaaaactagggattttaggaggtgttgttgaagacacggccatttattgcggaggaggtaaaatttattgtctgggatttctttccttcgattcgttttaggttggtagttttatttgtttgtttggttgtgataaatgcaattatttatgttgtgtttgaaagacataaaaggatggacgaaggagttatggtattggtcggtggctgggaatgcaaagacaatggggagtggcgtttcaagatgtcgggaaataagtacgcaaagtgtgttgacgtaagcgaaggagatatgttgactgaagttgtatcgaaagttggaacaacgtttggactagacaggaggaccaaatttcagctgagtttttggttcgaaggaggagacactgtttacacgcagcagaagatgccacctgtctctgttgacagcgaaagctcgttgaagaaattcaaaaagataaagcaagaaaaaggaggtttgaacatgtatctatctatagacgatgtcgacgtggctgagattacgtcccctgaaataaggggacacaaagacaatagtgttgtagaggtagaagtggcatgatacatgggcgggcgaatgggtgatggtaatagcacgcatgcaattccattgacttatgaggaagacggcttcttagataaaataaatgtgtgtgaaggaactttgaagaggaaggctggtttactagagttgggctgcgcaaagcggggatgagaaaaagaagtggatgtagaattggcaacagagagaagatgatgggcatcagacttagaggacgaattgttaagggaggtatcagattcagatgattatgattttgataatatgagggatatgattgatacagattacccgccggattgggatccttggaaggattggaggaacaacacattgacaagttttgaccgtcagccggggacacaaatgtgtggaacaactttgggggatgagtcatctaggcccaataatatgggagacgatatattcagctctgtcgggggacaaagccgggttgaccttgtcgaagtagaagttgttgagatggaatgggcgatgagagtgcagaaatgtcgattcagcgagggcaaagtagaatgagagctcaattaacggatacgcaagcgacaacattggaagaatcgtttgacaaggactgtcaaagttgtttgaacaacgtgcgtggacaaagcctgccaggggtaggtatagtggacgttgaggttacaacaatcgcagacgctgatgtagaaggtgagaatgatgaggaaaatacgagaatgtctatacaactggggcagaggacagggccaactatgaggacaaattcaataacagagacgctggatacgtgtgatttggtccctgaatctggaggataagtaggactagtggacgttgtagtgactgcgttggaagcaagtgcagctgaagaggaaggacaatgtgatgtagaggttcgtaatacatacagtgcgagaaatgataatacagcaagggcactggcagaggacatgtcgagaagagtatcagacggagagactatatttagtaaattagcgggggacgagatgttgatgtgtagggatgccaatccgttcaaggacaacgtagccgcgattgcttccgacaaagctaatatgaatcttaggaagggtggcgatgcaatatatatcgggcgggtattcagcaataaaggcgagttgcagaaagcattaactgtgtactctatgaaaatgctattcaatttccgaataaacaagtccgacaagatacgggtaattgcggtgtgccatgataaaaagtgtgattggagggtatatacaacgtttcacgagaactctgaaaatatggaaattaggacggcgactctaaaacatacttgtgatgtcgaggcgcggtctaagtatggtatgaaagcaacacgatcgatgttaggtgagttgcttaaggcaaaatatacgcatggtaagaagggaccaagggcctgtgaactaccagaaatagtattggctgaactaaatgtcaccataacatacatgaaggctaaagaaatagcaatgaagaaagctcgttgcagtgaggaagaaggttataagtttctgcagacatatctccacctgttgaggacaactaatccaggtacgctgtccacagtccatacagattatacggaggacggaaatattcgtttcaagtatctttttttttgcgtttggagcttcgattgccgggtaccagtatttgcagaaagttatagtgatagatggtacacacactaaaggaaaatacaaaagctgcttagttactgcaagtggacaagatggaaattaccaaatattcccattagcgtttggtattgtagacaatgagaacatagcagtttggcagtggtttttcgaacagttgtcacagtttgtccctgatgaagaagatctagttttcgtctctgacaggcatgcgaccatttatgctgggcttaggacagtgtaccctcttgtgaagcatgcgtgttgcacagtacatttgttcaggaatgttgtccataatttccagtgtgagggacttgcgaaaatggtctccatggcggcgagatcttacactgtgggagatttgcgatattggtttgaagaaatacataagagaaacattcaatgtgccaagtatttagtagagatagggctatctcactggacactggcgtactttccgggtatgcgatacaatgtgatgagcagcaatatctcggagtctctaaatgctgcaatgcaaaaagccatagatttctcggtagtgaccatggtggaatcaaacaattatcaaatcagttattcgatgtgataaattaattaaacatacaagaggacgaaaaatcctaaaatctgtaatgtgagacatttcgattaatttctctcaaactcaatcaaccgtcttaattgctaaagatttccgagttttcttggtaaatgaatcgcacaggagaggacgaactatcgaaaaaccctaaaatctgtattgggggacatttcgattaatctctctcaaactcaatcaactgtcttaattgctaaaggtttccgagttttctaggtaaatgaatcgcacaggagaggacgaactatcgaaaatcgtaaagggagacaaactcgaattatcgattagggtaagtaacaggggatttgggatttgcaattttccaaaaaggcttcattgaacaaaacatgaagacaggattgaagatagcaacatgcagaaactcgaaatggccttaccgaagatatattccgatgaagttaacggcgaagagaaagggaaagtatgagagagatagacgaaagagagagagttaactgttgttgttttaccgcacggtttacagtgaaagagagataaaagggattgtcaaaagacgcagttgttgagcgcgaaaactgttcaataaactgtggggacaaaattgacatttcccaaccaaatgtggcatgagttgtaagacccgggaaaatatggcagattgcataacgattttgaaaaatatggcagatgatgtaattttttcaaatatttaccctaacaaccaaaaaaaaaattattgcgatccttctcgtataaatataagataaatatttggttgttagcttgaatatatatatatatttttttttttaattcaatacgtttaataaaaaaaattacattataattttgaaatatatattaatggtaggcgtatttaacatttttacatgtttggtcattgtttcttttagttcggttatttttaattactttcaaatatatatatttcagtatatcagaatgttatcataacatatccgttgagtgcttgtaataattctggagggtcacaggttcgattccttcttggcgcaacatttttaatttatttttattttgaaacgacgttgtttcgcttttaacgaaaattgctaacaaaaatttaacccctttatttttttgttagcggaaatttaacgacatgtccaaaatagcaaagtcaacgaaacttaaccattttatcaaaagtcaaacaaaacttaatgattttagtagcattttggaagttcatgtttttttatcccaaatttgaaagttcatgatttttgacattttttccataaattttagattttcttatacaattttagttaagttattatttaatggtgaaatgcaaacttaatttatttttgaatattattgatttaaagttgtggaaaattatcaatcatacaaaataatatatatgtacaatcaactttaaatatatctacttaatatgtgtgaaaattacaattggattaataacaaactgctataatatgtagtaccgtaatatatgacttatatatatatattttatatattccctgagaaatgaatattttgtggtttaaaaaaagttattacaaagacatttacagaactactagaacacaattattatatatgcatatatatgtaccatacacttaaaaaaaattactagaacaaagattgacgatgcttttagaagagtagtcttatccggtaataaaacataaaatctgttattgtccaacttcatatttgatttctcttggttacgattgtcatgccatcaacttctggcttaacttctttttgcaaaccatatctttaaaactgatgtgtccataaatatctctgaaatgtataagacctttggcaaaatcagaattacaaattttcatcgtttacctttggaagaaaagaagaaaagtcaaatctttgtcttcttgggtggtttcacaggagaagcatcatcattagacaagatttggtcagggacatcatcatcttgaacattatgctttgtgataaaatccttaagtattttcatactttcttatttcatcgaaaccaattggtccaatacagtatcaccattgattgaatcaatagtgtagctctctgtcccaagcttgaactctactttaactagattcttcccagggactgaaacgtgactctcaatctccatatctaccctgaaattaaaactaaagaagaagaatgaaatcaaaattacagcgatgtaagcgaagaagaaacctaatgaagtttattctagcttcggtacctttgggtggaggaagaagaagcaaaaggccgatgaagccgacaattaattatgagcgattacaagttttgctttaccaaatatttaccctaataaccaaaaaaagaattattgcaaaaaaatgtataaattttaggttttcttatgcatttttaatttagttattatatattaatgatgaaatgtaatttatttattttgaatactattgattgaaagttgtggaaaattatcaatcacaaaaaataatatatttacaatcaacttttaatatatttacaatcaatttggattaataataatttgattgaatatgtagtaccactagattataacccgcggtacaccgcggagataatttttttttaaattagtatatataaaagtctgtaaattatatttatctataaaatatttatattttatagtttacaattgttattaagtaacatccttccaaacccgttctgccaaacccgtcccgttaaaaaaatctgtagtacatcgctaattttaaaaaaaaaattacgggattgcaattatattttagtttgtcaaacaaatttttgttttaaatagttgtcgaaatctaattcaaatattggagaaataagatttagtgaactgataagaaacgtatttaggtgcgttttgctcattttaagggattgcaattgtattttggtttgtcaaatattttttgttttaaataatttccgaaatctagttcaaattttggagaaatctgcgtgatatattgaattagaatatatttggaatattttttgtttgttaatcaatttattgccaaaagaaaatcaataattaaaagttagtggcaaccattgtaaataagttataactccaggatttattttacaaaatggctgcaaaaatgtatatatagataatatatattcccgacaaaccttttgtgatttaaaaacgttattacaaagatatttacagaactactagaacacaattatcatatacgcagctgtatgtgccatacacttaaaaaaccactagaacggagattgacgatgcttttagaagagtagtcttattcgctaatcgaccataaaatctgttattgtccaacttcgtatttgatttctcctcgttacgattgtcatgttatcaacttttggcttaactttttttttgcaaactgtacctttaaaattgatgtgtccataaataactctgaaatgtataagacctttgacaaaatcaaaatcacaaattttcatcttttgccttcggaaggaaagatgaaaactaggaaaagcaaaaggccagcgaggcctaagaggcagtaccgaccagaaaactaagataatgaaggttgttgcctgaaaaaccgctttgaagaaatcgtctttggcgatatattaatgttttgataatctattaatactaaaaatcttaataaatatattttgcacttctaaacggttgcatttaatcccaagactgctgatctctggcgagggctgctgatagctggcgaagaaatgagatcctattaccaattgacgaaggcgacgaagttgtttttgtcgaaggagaatcgagtaattaggttagtgcaaagtgaaatagagctgcaagcaagcgaatgcaacatgtctttaatattattcaaaagtcaaagcaaagaacagaacaacaaatcaagagacagcttaaactagatcttgtagacttgtagttgaaaagaagcaaacagaagcagttttaatcactctctcttaaattaacataacactctctacgaaatgcgagaaagtaaatactttacaaaaatctctaaacttatacttggtgtttccttcaagctcaacacatctaatcttgttgcttttgcgatccagaaagtaaacaacaaactctttaaaaatagttgggtgcaaagataacctctcccatatcagaagttcccaagatttgtaaaccttgaggcaatctaccaataacacctctacgaatagatattcgttgttctttcgaccattgttgtttcttggcgtcctctaaaacccacaaaccgaaatcgccacaaaagtatttagagaacacagctacttttccacggtagtttatcaaactaggtttaaccgacgatttaaagtcctcgggaaatacagaagcaatttccaaactttcagtcctcaaatcaaatctcaccaagtttaatggttcatgcatggtaaaacctctggaagcactgtaatataaaacaccgtctatgcacacagaggtggttccaggatagtgaggagtggggcattggatcattctccatgagcagttttgagctcccaatgtgaggacttgatgtccacaaaactgcagtgaagatttgttcaaacataatactttatattgtgcatggataggatcatatcctaaaaagcttccaatgatcgtttcactggatcccaaagtgggtaagtttatggacttacctatgctgggattacatatgatttgttcttccccatataaaaagctaatcaacccatggacgtagctaggattttggtatcgcattttcttcaagtgacacaccgtacttgattcaaaatcaggtggttcctccccaactagagcttcaaatttgttaatgttttggtccggtaaaaccagtgagtttggctcatatagtggagttgaaacatgagttgatttggagaaaaagtaccaattttcttgataaccttttatttggtttttgaaagcaaaaaggagacggtgttgcttattctctcggaatgatcgaaacgagaaggatctgatgaaatcttgattgcggatgattttggcccataacttcgatacacaaacaaacctggctaaaaatttcgctggcaagtttaagaagatctcgaacaacacgtcaacaggaattggatccagagattgcaaactcttctccgtatctgccatttcaactctgctttatcttctcaaaccctaataatatctttcccttgaactccaagatatcaaaaacacgaaatattattgaaacaaaaacaaatcagctatttataaaagaaatgtttcactttcaccatgtcgacacttgtcaatttttattttatataaagaaacattaattacatatttaattaaaagaccaaagaaatcactccatattaatttttgcaagaatattgaaattttaaatgaaaaagtaaattactccaaatttcactctcaccctattatacaacttgccattttttcatttacaaaactaatataaaggtataattaataaaaaaagatattatctttttctgtttcaaaatataatttgtaagaagatatctagatatttatttaaaaataaattcaaccaatcatgcataatataaatggtcacgagttattaaatacatcaaaatttgcagatacttgcaaaacttcttttagtagaaaatttctaaaacatcttatattttgaatcaaaagaattaccaaatacatcacctccactttatatcaaattgacttttgtaatagtaaatgtgtttaagaaatccaatgcaacaagtctttgatattattcaaaagagtcaaaacaaagaacagaacaacaaatcaaagagataaagctgaaactagatgttttagtaaagaaaaccagaacaaaactaaccaaagcagtttgaaacactctctctaaataaacatattaatactctctacataatgcaagaaagtaactactacattataatctctaaacttaaacttggtgtttccttctatagtagaacacttctaatccggttgcttttttgatccagaaagtaaacaacaaactcttcaaaatggttgggtgcaaagacaatctctcccatatcagaagtgcccaggacttctaaaccgccatggaattgtccagtaacacctgtatgaaaagatacgagtacattcgaccattgttgtttcttggtgtcctccaaaacccacaaattgaaatcatggtggtcattgtgataatttttactgacaacagctacttttccatggtagtttatcaaagtaattccattcgacgatttaaggccctcgggaaatttggatgcaacttccaaactttcagccctcacatcaaatctcaccaagactgttgtaaaactagtgaaagcactgtaatataaaatgccatctatgcacaaagatttttcgccacaatagtgaggagtgctgcattggatcattctccatgagctattttgagctcccaatgtgaggacttgatgttcacaaaaccgtgtaacattggtcaagcacaacactttgtattgggcattgattggatcatatcctaaaaagctttgggagattattccacttgttttgatagttggtaaagttatggacttacctatgctgggattaaaaatgacttgttctccgctacataaaaagctcatcaacccatggacgtagctagaattttcgtgtcgtagttccttgcgagataaaaaatcaggttgttcctccacaactagaggtttaggtttaagttcctccattagagatttataatgtttcggaagataacgtaaacacctagcacgccaaaagagcccgaaccggtgcggttttacgggtgggcctggagcaggatcccacggtaatagtggagttgaaacaagagttgatttggagaaaaagtacaacattttgttataaagccttagacagtcgactaaagcgaagaggaggcgaggctgcttctgtggggaagagtaagacgtgaaggatctgatgaatacctcacctcggatcattgtggcccatacctttgatacacaaagaaacctagctacagatttcgcaggtaacttcacgaggatctcgaacaacacgtcgatcggaatatgatctagagattgcagattcttctctgtctccgccatgccaactctgctcggttttttcaaaccctaataaattcttgtaatccaaggatatcagaaacacataaatgatattaaaataaaatggaaaacaaagagaggaaatttagcgaaaatatatatatttgtaaaataaaccttttagtaatatcaaatcttgcctataatcattttatacaaaaaaaggaaggaaatctcaattataaaaaaaaaaaaaagagaggaaagtgatcattttatttatatatgttcaaatattaataataagtaaaaaaaagtatagaggcatacatactgtagtttacatttatgactgaagaaattaggttttgaccaaagatggagcaacaagagaagaagaagagaaaagtttacagaagaagaagattacaatcaaaaccaacttcgtcctttcctctcgatctagcctcagagatactcttaaggctacctgtaaaatctgttgtgaggtttcgttgtgtgtcaaagctatggtcatcaatcatcaccgatccatatttcatcaagacgtacgaaactcagtcttcaacacggcagagtcttttattctgcttcaaacaaagtgacaagttgtttgttttttcgattccaaaacatcattacgattcaaactcttcttctcaggccgctattgatcgttttcaggtgaaactcccacaagaatttagttacccctcccctacggaatctgtccacggcttgatctgctttcatgtgttagcaacggttattgtttggaaccctagcatgagacagttcttaaccttacccaaaccaagaaaaagctggaaggaactaacagtctttttaggatacgatccaatagaaggtaaacacaaagtagtgtgtctgcctcgtaatagaacttgcgacgagtgtcaggttttaacgttgggatcagctcaaaaatcatggagaacggtaaaaactaagcataagcaccgttctacaaatgatacttggggaagatgcattaagggggttgtatattatatagcctatgtttatcatacgcgtgtttggtgtataatgagctttcatgtcaaatctgaaaaattcgatatgataaaactaccattggaaaatatttatagggatgttatgataaattatgaagggaggttagcttgtgttgataaactatataccttgaataacgatggtataagattgtggattttggaggatgcagagaaacacaagtggtcgagtaaacagtttcttgcacgttatgttcacaatgacctgagaacgaacaccatttccaagctaactggtgtcactcatgctggtgagtttgtttatatttcaacgcagtatcttaaatcgtttgttttgttttgtgatccgaagaaaaataggtttagaaaagtagagtttaatggaattgtagacgaagaatttaggctcagtaatggagttggtaggggacgtatatatgcgctctataatttcccgaatcattgcgagagtctcatgtctttgtagcataaaagattattatttgatttgttccttagaatgactcttaattgttatcaactttattatggctttttcttataattttatcattccttactttgatcttatcccgtgtcgttaccagacaaaaaggtcacccaaaaataaatgaaatgtggcattttatagatgaaataaaaatatcacaaattaaaaataagaagttattaaccaactcaattaaatatgtacctcactaattaagttatataaataaagtggacggttaaattcattttggtttactaacgtaaaatacattaactattgactatgaatagcaaagaaagaaagaaagacaaaaagaaaatataaaacttttttaatgtatatatattgtactatagtctggtgtctgattcctttttcttataacgtagactttagtgttaatcctcagagcccaaggtatcgtctgagccattccgctacttcattccaattagtttccctgtacatggcaaagacatatgttcaaacaaatggtaatgaaagcaaagtaaagagaagtaattcatgtttagacccttgatatttttttaacatgatttggaatccagtcatgagaagggaatgagcacatttgtgtacaaattcgtatggaaccacatcagtagctgtgacacataaaattccaaaattagcatgatctcgtgattgttatctaaattgtagaaaagttatatagatgatacacatacaatgtgtaagtaagattggtgttgattgaggttgaggacgatttggagcccaggggttagatgctacattgttttgtaagcttctacaagattgtattaggtttctcatgtttaaaatgtgagtctaaacattagtacaaagtgagtgacagtaggacttgaagactctacctccagccaggaagccatcctttaagccctataacaactcgtggctttatttgaagccgttgattagtgtcatagcaactcttactcgcaaggtagagagcttgcgctgcacccatgcccatacctcctactcctatcatgattattcagaccaaatataaacttgatatatatatatataaggtctaaaatatgtatattaatttaaagtatagaaaattataagttactatttggggaagcatgatcagaaaaaaggttagcaatagataaagctgcatgatgtaatgacacctcatcatcttgcatgttttcagaaatttctgcaatatcgaaccctgattcatcaaagaagagtgtagatacaatattattaataatatattagaaacattaaatgaaatttgaaatcaactgatcttacatgcattggtttccattccacctaagatagtaacggggcgtctaggagcagttggacaaatccacttaatctacacaaagtcatatatatactttattagaaacttgacgaaatttctattaggatataagaatcgtgaaaacttgatccatacatttcgaagacccaactgtctcgcaaatcgaaccgaactgcagacataatagacctatatatatagtgaggaaaacttcgaatacaaagaagaacaagattcaaagtatatacatttttagtgaaatgagtttaatatgtcataagaaaagatgaactcaatagaaagatacaatagatgatatttattattgtttgtggtgccaaccatttatataaaaataaaaggtcaacaaaaaaaatagtacttgtagaaaatgccaaaatttattagtttattttttttaagtttaataatataacttaattgaatttattccaaaacatgtttatggtgtatatctctttgatctttgaatatataccaataaatttaattaaataaagaatgtgtgagtattattattactttgcgcttgtctcgccgatatcatgcagccagactatagtggccttatgagttcctatgggtccaaaagattgaacgtcttcaaatttaataccccctacatttctacgagctgtaaaaagtttaacatacgcagattcattaatcagttccacgtaataaatataggagagaatatagtccaacaactttgaaaagtatgcaagaaacatgaacaatcacaagaaagaaaaaaatatactagaagccatgctttgatatgaataagttcttgtttccgaagagtcttttatttgttcttctgaaaacgtttatgttgcagtattcgaaaacgtaaggaattgtaagaggggaaattgtgtatttatacaccgaatgatgtttatggagataatgatatttgtattaaaagttggatgcatgacaaaaatcctactcttaaaagttggatgtatgacgaagatctttatcaataaaagtttacagttaataaaatttattttgtattctatatttattccaaggttaaatttcaataaatgaagatcagaaagaaaaaaaaaagatggatggaactcaattaatggatgtttttagctgtaaatgaagatcatatatataaaatataaaatagcacctctatgtagagcggcccctcatcaactatgtatatatatatatatatattgaacggttcaataacttttaccttaaaattacaattagttttgtttaaatgttagtttaagaaaaagttaaggatctaatatgataagtttctatactcttaaggtatccaatatttggagcatggttcagtcaagactaggacagccatatctaatttttgctgattggtctggcctcattgcgtggttatctcctccgccagatcacaaagcttagttctcaaatgcctcattgtacaaagaactatcttcttttttttttttttttgaataaaatgtcaaattatatttaaaaagaaaaataactttttacatcagcttaatcttatgtgagttgaattatttgttttgataagaaattacaatctgagagcttaacagaaagagcagagagagtctagagccttgtcgagaaccagacttgtaatccgttctcgtagcggcggtctcctgtcgagattatgatggagagttgattgcgaatctgtttgtccatccaactaatgagattggctgacgttctaggctcctcaccatggcgtcgatcatttctctccttccaaaccgtgtgtactgtgagttggaagatataacgtgacaaaaagctccgaattcgatcagtttgagtctctgagatgtaattcactattgcctgccaatctgttgagaatcgatgttgtaaaacattctttgcaattgcagtccaaatcgatgaggcataactacacgagaagaacaagtggtctcgtgtttcaatagatgtggagcagaatgtacacttcacatcagagccattattccaaaactgcattcgatctcccgttgataaccaacatggtttcatcttctccatatggcaaagagagaaacaacaggcttcacaacatggtttcatcttctcactttgtaatcttcaaagagattgatcatagtaaccgggactccattcttgctaggattatctagagaaaatttcgaaatctgctttcccgttggtttacctatgagtagttgctcctcaagttaggacttatgctccttcaccgattttctcaacgttttttttttttttttttttttttaagacttttttgaaacatttttaactcagtcgagatcagtaaaacttttttagctcagtaaaaaaaactattttcttttaggtatttaaattttacattcatatatatatatatacagtgaattgcgaaaaaacaaattggactaattcagattactaaaaacgtttcattatgcaagtcatccaaaaataaatgaaatatggcattttatagatggaataaaatatcacaaattaaaagaaacttattaaccaactcaattaaactatgtatctcactaaattataacataaaatggacggataaaatttcatttggtttactaacgtaaaatacattaactattgattatgaatagcaaagaaagaaagaaaaaacatataaaacgtttaaatatataatgtatatatattgtactatagttctggtctccaattcctttttcttttaatttagagtttagtgttaatcctcagagccgaaggtaacgtttgagccattgctttacctcgtcccaattatgatccctgtacatggcaaaaccatatttagaggcatctgttcgaataaatggtaattaaaccaaagtaaagagaaagaattcatgtttagacccttcgtattttcttagcgtgctctgaaatccagccatgagaatggaatgagcacatttgtgtgtaaattcgtacggcaccacataattagctgtaacacctataagattccaaaattgttttcagttttcatgatctcgcgatggttatctaaattgtagaaaagttaaatagatgatacacatacaatgtgcaagtaagattggtagtgatataggacgatctctacccccgggatttgatgctatgttgttttgtaagcttctacaagattgatttaggtttttcatgtttaaaatatacgtaacttcagttacaaaaattagtaataagtgagtgacattattgaaaaacattagtaataaaatgtactcgaagacgctacctccagacaggaagccaaccattgagccctataacaactcgtggctttatttgaagccgttgattagtgtcataacaacccttactcgcaaggtagagagcttgcgctgcaccaaagccgatacctcctattcctatcatcactattcagaccagagatttataaatttgatatatatatatataaggtctaaagtatgtatattaatttagagtgtaaaaaagtataagttaccgtttgtgggttcttcagataaaaggttagcaatagataaagcagcatgatttaatgacgccacatcatcttgcatgttttcagaaagttctgcgatatcgaaccctgattcaccaaagaagattgtagatatagtattgttaataatagaatattagcaacattaaatgatgtttttgataaaattttaagttaagtgatcttacatgcattggtttccattccacctaggatagtaagggggcgtctaggagcagttgggcaaatccacttaacctacacagaatcatatatatacttattcttagaaacttaaatcaaatttcttttaggatataagaattgtgacaaaacgttcttgttcatccatccatacatttttaagacccatctgtcttgcaaatcgagttgaactgcagacataattgatatagaggtatcagagccggaccaatgaaattcggggagctatttaaattacgaaaacaaagtatttttgttttaaaaactatagagtaaatagaaaccagtttaaacaaaactctaaattatttatttgaatacagtgagaaaaacttcgaatacaaagacaaacaagattcaaagtatatacatttttagtgaaatgagtttaatatgtcataagaaaagataaattcaatagaaagatacaatagatgttatttattattgtttgtggtgcctaccatttatatacatataaaggtcaaaaaaataaaaacaattagtagttgtacagataatgccaaaaaaataaaaaattttaagcttaataatataatttaattgaatttatccaaaacatgtttatggtatatatctttttgatcttttgagtatataccaaaaaaaaattaataaagaatgtgagattattattattactttgcgcttgtctcgccgatatcatgcagccagactatagtggccttatgagttcctatgggtccaaaagatagaacgtcttcaaatttaataacatttctactagctgtaaaaatttcaacatacgcagattcattaatcagtgacgcaataaatatatgagagaaaatagtccaacaactttgaaaagaatggaagaagcatgaacaatatatcacagcaaagataaaaacatactagaagccatgctttgatatgaataacttcttgtttccgaagagttttttcttttgttcttttgaatgtttttatgtataattcgaaaacgtatggattgtaagggggtacattgtgtatttatacaatgaatgaatgttatggagaaaatatttgtattaaaagttcgatgcatgacaaaaatcttacttttaaaagttgcatgcatgacgaagatctctatcaataaaagtttacagtaagtaaaattaatttcctcttttgaaagttggatgcatgacgaagatctagtgtttgtcgacactgatagcatgatccgatactagatttgtctcttcagcttaatttcttatttttttcggttttcctccaaaatgcttaattatctccaattaaatctcaataaaatatttgaattttttttaaaaatactttagaaataattaaaaaaactctaaacctaatacctaattcataactaaacaggtgaaaatcaagatataacaggaaaataaacggtatgaggaaagcttccaacaatagcttcatcgagagtataacatttgattcatgttttctataaaagtttttggctttacgttctttaagcaactttttgattcacaagttatagaaacatttattttttctttaaatctaatttagctagcattatattccaaaaaaagaaaaaaaatcttaatgatgaagttacaaaccgatgtatgtatccgctccattgcttttccgaatcacgtgtagccatttgatttttgttttcttttgaatcatcatttatgctaatttatgaattttgcttaataatttctcattccttactttgattatatcccgtgtcactacgatggttctttgtaataaaaataacaaattatggttcttgtctcttcttcttttttgtgtaaacatgaactgcacagggaatcatctcacctcaaccaattagccaaatcgaagtccttaaaacgaggagtttaattctatctttagatttttaaaaataaaataatatgtgatcgtgaatatgtttacaataaatgtataagagtatattgcgtattattttttatttcgtaagattattcaacatttttcggaggtggagagtttagttacataaatggacgattttgaaagtgtttttgcacaaagcccttttaaatatgaaacaaaaaaatttcaaattatttatctaatcctcaagtctgatagccatttcctacgtactttgatctataaagagttaaccgttttaacgtaactgagttaaaaacgtaacatcgagtgtgactaagcaaaacaatttagttttagtcgtatcctcagttagaagcgtgacatagagtttggctaagcaaaacgatataattttagtcgtttcgttgcatgtctaagctttggttatcaatcagcaccgatccatatttcatcaacttgttggaaactaggtctccagtctccacggccgaatcttttggttttcttccaagaatatgacaagttgtttgtgtcctcgattcagaattccaacgagcctatttattgttatcatatggaattcccacaaggacttcgtaacctccccctacggaatctgtcgagggcttgatctgctttaaacaatcagcaacgccgacagtttggaacgctagcacgatagagctcttaacttatgaagggagattagcttgtgttgaaaaacgtaccatgaaggatggtatccggaagcatagtatcacattgtggattttggctgacgcagagaaacacaagtggtcgagtaaagatgttcttgtactttctagtcactatgatggaagtttgagaacatgtttcaaactaaaaggttgcactcataatggggagtttatttacgtatcgtccacgtttcgaaagatggattatattttattttgtgatccggtgaaaaacagctttagaagattcaaacttaataaaagaaatcgcagatgacaaatctaggctcagtaacaaagttccaaggctccatgccttcctcgatcacaatgagagtcaaatgtctttgtcataatttaatttcttggtttttttttccttaagaataatcttctttttttttggtcaaagtaaaatgatcataaatgatagaatgatcacttgtgcaagattatgattattattttcttctaagttctccttccttactttgattttattacgtgtaatcttcctcccttgccaattccctactgcattttacaaattcatcataaccgttcaatagtagtacctctcttccttcttaatgactttgacttgcaacttgtacagtataataataatgcgcttcaatatgttttggttcttttctttggcatacttttctcttcttctctatctgttgctcattacattagagaactacgtttgttgaggaggacaatggtggaaagtgcaaagccacaaaagcgagactatatatggttacttttacatatacatggactctaagagacgcatgaagttttttttttcttttgcttagggatcactaagatcgccctgatctcttaaacttcttttttttgccaaacaataatttccattcaaaagaggaaagtccatacaaattagaattaagatagtacaagaaaataaagatagaggcttcatgagttttgcaaagaagtgttcacttttaaaaaaagttcacaaggtttgaaaaatctgttgaagccttgacggattcgaccatgttgacgggcttcgcgaaatcctcgaccaacgtgtggtcatagacggctattgcaaacaatgcatatgaacctttgaaaaggtgctccacgggagaagctaaagggtagataagcgtattatcttagtgcagttcacttctagggcccaaaaaataaataaaaagccatttgaccaaaacgatctcaccaccatagtagcctccaagatgcgccattttattgaaccctccatcacataaaaacaaatcttggaccatccttgtgtctccatgacccaaatttccatactctggtcgcaacacacaatcctaacttcccttgggtagtttataggatacgaacagtgatccatcagtgtttttatcagatctaacatcaaaacttatcagtttatatcgagaagtagtgtcatatatagtctctacttggtaatagatagccctgtggatgtaaaccgcacctttcaatggaaagtgaggtccaacacctaggatattcctccactgcttcgtcgtgggatcgcaatgtgaaaaaacttgacatgaattctccatacaatactttgtattgattcttgagagcaagtgcccatatccggagtttgtagcaagtgcggctcctatcggcgggaccatcctctagacttgcggaatcgggtgcatcgccgttttttcaggtaccacagtccctttctggcaagttggtgagcttcggtaaggcgattcttctcttctcgggtccctctttccttaattttctcccgctctgatggttgcgtatttggatctgacgggtcgctcttctagaggcaagcctcgtagtcttttttggctctttggattgttcattgcggttagaggcgtagtggtttgtgtttttggtggtgtgcttctttcctcctttagagggctgaagaaggtggcaaattcttcagccatggctatggctcctccatctaaatttgtctttgtcccaatcgctagtctttggttgcgttaaggttgagttttgttgttaagttgtagtcgagttgggatttttatgtgttaatgagcttctagttgtattgctaaggttgtcgagtgtagaatagaggcgtcgaataggtctaagtggcatcattatctctttgagctagtgtagaagtccgcggctgcctatgcgtttttgcgttagtcctcggagaagctgtaagcttctttctcgaggttttgtggacaaatctcggatccattagttcatggcaactatgatgaggattccattacttcgtgttgtggcagcacgcaaatttttgagccttgcgagctcggaaacggtgtttctcctcgtacgatcgaagcgatataatgcattttgagttgtaatgttgtatttaatttatgtagattgtttaattgcgtttcttgtaatcaatgtaattctgtcaaaaaatttaaccttttaccaaccaaagaaaaaaagtgcccatatgcatggatttattcttcggtaagtaaaaggattgcctcgtggtagatttatatataacacccccatgacgagagtctgaccaacaaaaaatcaagccacggatgtaatgccttaatccttcagggatattaatataataatattgattctatttcgaaggtaagtagttgtttgaagtgtggccgtagtccgtagatgaaataagctaagcatcacgtggagactgagccaaagaacgactcacaatcgattctatgatgtctctatgtctactaataattgatgaccatagcttcgaaatgcataggaccttcgaaagagatttcaccggcagtctttttagtatttcaaccgtaccatcgagaggtaattggcttcacagtgaagaagtcgtagtgtcgacgatagtgaggtctgtttgtgtcctctcttcatcgcctctgttttctgaagccctagagatcacttgtaaacttctatatcacgtaagtagaaaattaggttgtctttcttggccctacaaattagaaaagcccaagtttttgtaggcgataggaaagtcaacactaatcattactttcctctgttccaagaatatgggaacatgacccatacccatttctccactttcttcgaacttagtagttccgagctttctccttggatgatttgaatataatttggattatccgtttaaatttagcttctgcaaaaacgaatctaagaagaattatcatttattttgcataactgattgtcttgtgtaggcttttggttaagcgttcccactatgacaaatgaagaacatatgatcgtgttataataatcagtgttcaagaaagaaagcgctagccgctagggactagtcgtcgtgtatgtgatttaaggcgatttgtgtgtaaatatataatttaacataatagaaaaggataacagttttcaaagaatgtatattggtggtttacacaacgttttacatgtatgggattagttatacaaactcacacgacgttgtgatttatttagtttgttgtgtatgtttttttcctgctcgtttgttatgttgtatttgaggttgttgcgtttagtgtgatgttttcgttttcctcgtttcttgtgttgtgatttggttatgaatttttatttttattaaacgtggtatgagtttttgtgctttacgttgatttgtgctcgaatgtgagcaacacaaacgagttatatttaatttaccgtatgtagctcagagacatatgcataaggtagaagacacgagaagaagagaaaaagagtttgtttatttacctggtccatcatttgttcttggtgactgaattttctcctgaagttttgtttctgttgttgctcaaaacatatgcatgaagcaagaaagacgagaaaaaaagatttaaagagtttacatgtttacctgacctttcattttctcattggcagataaatctctacttgaagttatgtttctctgcataaaaatcctctttcttgaaaacaaaacaatgctgttagcagtaaactataagctgagtaattaggacactaattgtttaactgaagacattgaacaatagataaaactacaaaatttatgtgaagaaagaaagttacgacgaattctccagagtctactctaatgcgagattgactgttggctcacattttttccttttagttttctaatgcagtattatgaaccatcatatgattcctcataaatgtactaaagaaagactatacacactgcaaaataatgccaagtggtgtaagagaagacaaagagattgaattaccttaaaaggaagtgacgagggaatatcaagtggtcgtcttgtgttcaaaaagcttcagcttctctaacagctaacatcttatctctaacatctttagtattttacctaaaaaaataaagatcaaaataagttctaatttctgtcttaaaataagttcaaatctttcccaaacattatataaaaatcagtgcatcggttgtttacttggttttcatccaaacggagagcttcataaacaccacaaacgttctgcatcaagaaacaaactcatgtcatttctttgatggtaatgcactagtactgaagaaaataatataccacgagaaatatggaataaagtaaatacacaataaattatacatattatagattgtgaataataccagtaaacatctaacagagaacaagagagtatatttacctgacccttcatttttcgaggcaactgaattgcttccttgaatctagttttttcagcttaagaatcctaatttgaccaaatacagaatcatatttcgtgatctaactcattatgttaccagtaaactatgagtaaagacaaaagaccaaggtacttactggaaatcttacttaactagttaacctgatccaagcctatatatttgactgcttgtccatagctgaaaactaaaaaaaatgttcatcttcatagtgatattgaaaaggtttacaaagtatgatggaaactagttataattgtgttaatttctcctttgcgaagtatgaatttatattttgtttaaagcaaaagtaaggttctcgtttcttttcttggattttgaatcatcaccgaatttccattcacatgaacagaacgtaaaaattgacaaagcaaaacatatctacattgattaatgattacctctttgtttttgtatgcaaagcacagttttccctcgtattggcttgaattcctctttcaaataacataaaaatttaccaacttgttaagaaaacataatgaacttcaatatgaccaacaatagttgtaagatactaaaatagaaagggaaggagagttcacctgatattgacttggcaacataatggcatagtagtattgtgttgaattttactattgtgttatgttgtgttgtgttcgagggtgttttgagtttatctgccttacgtgttttttttttgtatcgtgtttcagtttcacgtgtttctgtttgaattttgttgtctttcggtgtgttttgagtttaggtgattgcatgtatttgtattcgtgaagttgtgtggttctagatagtttgaggaaccaaaacaagccaagacacctaggctcatcaaatgaaaataacctgtagggaagaatacatgagaattgagcatatacacatgagaatagaggaaactttactttacttgacctctcatatgctcttgctgcaaaatcgtctctcaattgctcttgggacctttgttctttgcagaataaggatccactctctagaattcaaatcattttgttagcaaaaattatgtgcagagcaaaacaggatcctaacacaacatacaaacaatatatttaaaaaactacaaaatcaatgccaagataaaatatggtatgattcttacagaggctgacaggtttgcatctcttgttcttttaatcttcaccgaacatgctgtataacgtaaaacccgaatagaaaacataacccttcaacttagaaaatatcaagaggtgtcaactgttgtaagaggtgatgaaaaaatttaatcacttagcactaaagaatatatatgttgtctcatctgcacgagaatttccaataagaagaatctgatacctgatttcgttagtattgtaccatggaaatcaagatctagtagagaaatgtgatatgccttattagttcgtgcaagttaaaaaccactcaaacacgtcagacatttccaaaaaacactgtatcagtgtgtgtaatttatatatatacctggcccttcttctttcgaggagacttgatggctttcttaaatttggttcttttccgcttaagaatcgtctatctttgtagaaaaccattatgttagcagtatatacacaagaccatgatttgtttacaaaaactctaaaaagggatgaagatagtttatctacctgatcctttgtttttccgaggcaattgaaacactttcctaagtttagttataatcagcttaagagttctccatcttgatacaaaacccttctaatagcagttaataagaatataagactacaaataaaccacagaaataatgctaatcaagaaacttactggaatttattaagtatgatccaagctggaattcggctgctttgctcttgttgtttctgttactcttgacaaggaaacaatatccacaaaacatgtttattacgtatgataaacattctttgtgaaataagtattaataagaacattgtatgaagaaaaagtaaatgagacgaaataaagaaacttcaccttgaaacttgtgaatctcttggattttgaagtatcaatgagtatcccttgacatgaaatcacttgatgaaacatatctaagtaaatatatttatttttgtatgacaatgtttgagcttgtgtggcttggaattcacttttagagtagcataacaagtacttagattcaatgtgaccaaaaaatgattaatagttgtaaaagactaaaaaaaaagagaaagaaacttcccctgaaattgacttagcaacagaatcacaaagtttttaactataaagaaaaaaagatattgattgtttttttttgttctttcatgtctctagttttgtgttgtgctgtattttatttcttatgttatgttgattatgagatttgtttcgtttgagtacgtttacagttttgttgcgtgtgatgtgattttttttttgtagagtttgagttttgtgtgtttatgtttgagttttgttgtctttgggtgtgttttgtgttttgagtttgagtgttttccgtgtttttgaaagtgtgtgtttccagatattgtgagtaaccaaaataaagccaagatagctatgcatgacacaattgacatgagagtaaagagaaagatatctgacctcccacatgttttaccttcgaaatttttgttctttggacctcaaagatatctccatgaagcagttaacaaaacccctcattttctcttggctattgaaccacaatttcacctgaaagtacatcatacaaattggacaataaaatgaaaccacaaaatcattgccaagaaagaaaaaaaaacatggtaagagtcttacagatccaaaatctgactggttgctgatattttctacttttaatcttgacggataatgagttaacgaagaatacaactgaaaaacataactatcaaagttagaaaaacaatctcactttaagaacacattaaggacactgcatcatcttaggaacacatataatttaaagagtgttttaaaacttacatcaatgttcctgtctccaaattaattgagatatgaattgccacgtgattgctgaatcatatgaccacaagattgataagagctcgaaacataaacatgcaattattgaaacacgggatatcgagataaaccatgtatgtgatgccatagaatcttcttgtatgaatataacaattcaccagtttttccaaatcaatctctagagaaacacatataaagatagtgatagactaataaccaaacccattagtccagattatacgaatatgatggcttccttaaattccaagacagagccaaaacgataccataaaaaacattagtttgagtaaacaagccaaggtatctcatcaaatgcaaataacctgtagggacgaatgtatgagagaatacacaagagaagagaggaaactaattattttacctgaccactcatatgcccttggctagaaaatcgactctgaaaatgttgctatgtgcagctgatagatacatgacctctcatttgctcttggcaagaaatttgttctttgtagaataaatttccactatctagtattcaaagcattttgttagcaaagcaaacagaacgctaacacggcatacaaacaataaaaaaaaattacaaaatcatcgctaaaaaattatggtaagaatcttacagagcctgactaagttctttgtttttttgttattcaatctttgacggatcgaagaacctgaccaaaaaacacaaccattcaagttagaaagataatatagaacaagagagtgtcaagttttgtaagaggggataaagaaaattagtcaccttagcacggagaaactatctggttgtcccatgtgagaaagactctccaacagctagaatctgatccctgacttcgtttgtattgtacttgaaaatcgagatctaaaacagaaatatgatatgttttattagttcctacaagttataatcacttaaacacatcaaacattttcagaaagaacatttatctacctgacccttcttctttcacggaggctgaatagctttcttaagttttgttcgttggtacaaaaccattgtattagcagtttacttcatacacaagaccatagaaaaactacaaaaattttgaaaagagacaaagatagtttgtctacctgaccctccatttaccgaggcgactgaatcactttcccaagttatttttcacctcaagagtcctcctccatcttgagacaaaaccattcttatagcagttactaaatacatacgactattaaataagactataaaacagtgctaataaagaaactgctggaaatcttactcactaatccaagtggggatcccactgcttggctcctactgtttctgtttatcttgacaaggacacaatgtccacagctgaaatattgaacatattaataacaggttaaaacttggttaaatcttgaacatatgatatacaaaaaccagcttttacaacaggttttgtcctatgtgaacttgtatgaacttggttacatattcaaaatcaaaactcaaaagtagatgagaagaaagcgagaaacttcaccttaaaactctagtgttttttccttcgatttagaatcatcacagagtatcccttcacaagaaatgacagtattaaacatatgtaagtaaatgtattgattacctctttacttttgtatgcatgatattgttttcgcttgtactggcttaaatttcactttgagagcagcataaaaagtaattagattcaatgtgacaaaataattgatagttgtaaaggacaaagaaatgagaagaggacgatacttcacctgaaaatgaattggcaacagaatctcaaacttcttacaagtacaaaaagatattgatcgtgaagttttgttgttttgtccctttttggtatctacttttgtggtgtgctgtattttgtttcttttgttatgttgtgtttgagtgtgtttagatttttgttacgtgagatgtgcttgtttgagttttgtgtgtgtatgtttgagtttgttttgtgtttgggtgtgttttgattttgagtgcattgtgatggagtaattttttgtgtctgtgaaattgtgtgttttcagatagtgtgagtaacccaaacaaagccaagacaacttggctaatcaaatttaaacaccctgttgagatgatcctgagaacttatgcatgacacaatagatatgagaataaatgaagcgatatctaacctctcatatgcacttggttacatattcactttcgaaattttgttctcttgacctcaaaattattagcaagaggcaggaaacacgacccctcatttgcctcttggctaataaaccaaaatttcacctgaaagtacaacacaaacaataaaataaaaccacgaatcaatgccaaaatcaaataaaacagagccaaaatatgactgcatgctactcttttttacttcaaatctttacggatcatactttataatgaagaacccaactgaaaacataactcttcaagagagaaaaagaatctcactctagaggaatataaactgcaaaacgcttgaaacgcattaagatgtcgaaaagagaatccaaccatcatcttggcagcaaatttgatttaacagtatttcaaaacatgctaaaaacaaacatgacaagatcatagaagatgtaaacaaaagtttaagagcaagaacttaagtaaaagaaaatacaaatatataacaatggattttcttgcaataaaatcaagtgtagccttacatttttttgtcctgtagacttattaaaatggcttcttgttgctaatggcagtactgtaccttggaaatcgagatctatatgatatgcttttttagttgatatcacttgaacacgttagaaattagtagaaaaacattgtatcaaagtgtgtttatctacctgacccttctttttacggagagattgaatagctttcttaaatttggttcttttccacttaagaatcgcctatcctagtaaagaaccattatgttagcagtacactatatacacattagcagtacaagaccattagaaaactacaaaaactctgaaaactaccattattttatccggtagtttatctacaaaaataaatgccaggccttacagagccaaaatctaactgcttactaatataactatcaaagttagaaaaacaatctcactcatgagaacacattaagataatagaaagagactctaatgcatcatctaggcaacaaattatactttaaaacagagtttcaaaacttacatttgttcccgtctccaaattgagatatgcattgccacttgattgctgaaccatatgaccacaagactaattagatctcggaaatggggacataaacatgcaaataagaaacacaaattcacagattgttctggcatgaatataacaatcaacaatttctttcctttttcaaataaatcttcacaaattcacagataaagacagtgatggactcataatgacgcaacaaccaaagaaaagatccattagtccagattatgcgaatatgatttcttccttaaaatcccaaaacggtacaatcaaaatcatggacgtgagggaaattctctaaatcgttgggtttttttgaccatctagactcatcaattcaacaagtaagagagaaattttgatgtagactctgttcaactgttatccgatcaccaaatttaaaacctatcgaacaagttaaacattaccctaatagaaagatcccagaactatcaaacctctaaattccaacagaaatcaacgaaagcaaattccaaatccaaaccctagattcccaaattaaccaagaagagagagagatcgaaacatttcgtaccttcttcgatttcgtaggactatcacacgatcaggactcaaatcaatagacaagtaataatccttgcatcaatcgtcagatcatcaccgacccaaaatcaaaaccctttgatcccgatttgaattgacccaacgaatcagagacgcaattcaattgatcggagttaagaatcagaagaagatagaaaatgaaaaatcgcttctccatgcgattatgtaaaccccaacgcgattttctgaaagaggatttgaaaaaatgaattttgaaatttcaacattcgctaaccgttacttgtggaaggggaagagttaacgttgcgaaatagagtagtgaggccagagctatttatcccgttcttttgaaacaatcagcatgttaatttacggttatgaccctgagttttcaaaatttgtttcccgcttttgagttagaatcacatacatgctagagtagtttaaacgttgtgtaaaccaccaaccaaaactaatcctttggggtttagattaacaaaaacggaaaattaaaaaaactaaattatttaaggaaattttttattattttttaattggaaatatgatatatctaatgttttagatttagaattatcaaactattaaaatggaatttttattaatgaaaattttatcattatttaattggaaatgtatattttttagattgattttatcatatatatttaaaatatattttcttattatgtttttaagtttttacaaatataattgactcaatttaactatgttatgaaaataaaaattaataatttttaatatttttccgaaaattacataagttttaaacttgtcaatatattttagaacataaagatgttattttgagtcattttgttattagtaaacacatcgaaatggagatgcaaatttacaaaaattaaacccaaaaaacttatatttacggtgagcatctaaatgaacaaccaaatatagaaacaaacacagattgaattcatcatctaaatatagcatttgaatgcaatctagatgcacaaacaaacatcaccttaatacgattcgttgcataaaccattgattcagagaaaatctctctctacatgatgaggaatgcattttacatgtatctaacaatttcgttcgttgtttagtttaatctatgtatctcaaaagaagtggtcaagacaagagatatggtcattaattagacaattctgaaatgacatgggagaaaatatattcgtttgatatgccagtaacagttgattattatttcgttctatgaggatgtctacccatctgttactctgatcatggttatgaagaataagaaaccattactgcgcgcttttggatacaaatgccaaggatcacaattttattatattcgacccttaaatgaaatcctataatttatgtattaaactggttcttactcatatgcgttttcttataatcaaagcttgatgtcaactaaataaaaacagtataattcgtttataagtattttcttttgtaaatttggtctccataacatcattttggcctcaaccttaatcgtaatgtatatgtcaatctcataaggatttgctttgtcgtgctgaagtaaatccgcaagtgtctcttctctaacacaaaataaagtcacatagtcatcatccccagcactaaactactattattctacaccacttgtctttacatttaacgacatttacaatgttcgtgctgcttctttagaactactaaaccacacttgttctgttttgcattagtgagagttttgttacatgtttctgtaaccctagtggaataactgtttttaattttgtttgaaccattggaccgcatgcataaaagttatttcggtgaatggagggtaaaacacgttactcaaaaagtattacgatacgtcgataagtgtttcggccatttctagctcctcaaaccttggtgactattttttctatttccataacaaaaatcaattgacataatattttttgaagatttacttcctttcaagtttttgagattaaaaaatccatgagatatgattaaggtctgatatgtccatgtatatattttatataatataacaagatttttttcacaactttgcatacaatgacattagacatcatgtactttcggcacatgtctacacctcttaattacttctcaattattctcttcaatcaataaaaataaaaccaaacctgtaacgtcactgttggtcactgtacaaatgcaacatcaccatcttttagactcttttacccttttactttctttatcttcttccttctttcttctgtttttccgacgacacaaaaccatgacaataataatagcaatataaatataaaatcgaaacaaaaatattaaaatcagaagttggccacaaaacgatgataataataatagcaatataaatataaaatcgaaacaaaaatattaaaatcagaagttggccggaaaaacaaatcagagagttgtgtgatatatttgtgacggcgctggtttacgagacatagagactatgaagatgactggagctccggccgcttccgtagcttatttccataaccaacgagcggcagtgtggatcgtcggagataaccaacacactcagtcctaaccgtttgtcatctgatttcctgtcagacggctatcacttcgtcgagagttagggaagacgatgatgacgacgagaccgcagtttgatttggagttaagcgagagtgatttattagatctgaagcatcaaaggctccacctacaattttctagtacaaaacatcgcaattgatgtcatcaatcgaattttcaaagtgttgaaatcgattcaatcaaaattttctcgtaatcaaacgtcatttagaaaaatggtgagatactttgctaaatgaaatattagtccgttacaattttatttaccattgttttaaattatgataaatgaatagttaacacataatttataatctattacgatattgtagtagttaacatgttaattaaataattatctacacgaatattatattatatgtaactcgttatatttatttatgatataataattgaggtaacacgataaatactaatttatctcatatttataaagttaccgcgatacattatgatttaacctggttgttaacatagtaatccagtagataatcatctaacttatatatatttttacccaattgtttgataaataaagtaaatgataattcaaaattttaaattgatatttcacattaatttatatgatatgataactggtttaacacgataaatatgcatttaacacataatatataaaattttatcgcaatgaattagttaacacgttaattaaatagttatccagacaaatcacaaaatgttttatgcaatccggtgataaatagtatcatatctcatattttaccggagatcatgcagcttgaaaggacaattttctctgtatcttatcaaagaaatttgatcttaaaaataaatttctgaaagtgctctattatttagccatttatgagggtttacgtgactacaaggctataaattattgagttttaattgtaggttttggcaaaatggggaatggcaaatggatcttgtaacaacgtatagtgcggacgaacgacttagttagaagcaaatggatgtatagtgttcagttagttgattaaaaattaaaattaatatttttcattctcattagtttttactgtttttatatctttttatgttataaatatttattatttttgtttttttttttcttcttcacattatattttgtatttattacaaagtcaattcaaattaaaatataatgatgccaaaggaaattgcttctttgatatcttatacatataattgtttttgtgaaatcataatttaaattctctgtatttgaatatcaataaatgacaaatcattaaaaacaaaattactaaaaagacattgcaaaatagtttgctaaaactattagaatataagatatgttttaaagtaattatttataaatttacttaatattaagtttgttttattataaatataacaaagaatgtgtctctcatagatattcaatataatgatattaaatatattgaaaacaaatcattgtatatttctttttgatttaaaacttttgaattttttaatatataatgatacaatcaaatcagataaaaataaatgttggatttaagtataaaagaaatgacaaatgtcaaaaggaaaagtgctacatgtcaacttctcaaagtataagtttgaaggagaacccttatttatcattttttttttttttttgaacaaacccttatttatcatataagatcttcaaataaataataaaagtagaaaataaaacctaatgcataggatgtacgtatatatatatatatatatgtatatattgagaaaaggttgaaagcaacacagcctgaacaaattagggttttgactacaaaagatggagcaacaaaaacagaagaagagaaaagtagtctcgaaaagtaaaagaacacaatcaaaatcagcttcgtcccttcctctggatctaacctcggagatactcttaaggctacctgagaaatctattgcgaggtttcgttgtgtgtcgaagctttggttatcaatcaccaccgatccatatttcatcaacttgttcgaaactcggtccccacggccgagtcttttagtttgcttcatagaaaatgacaagttgtttgtgtcctcaattccgcaacatcttcattcacttcagaattctaaaaggtcttactcttcttctcagctctttatcgttatcatatggaattaccagaaggatgtagtatttattcctctacggaatctgtccagggcttgatctgctttaagacatcaaaaatgccgatagtttggaaccctagcaagagacagttgataactttacccatacccagattaagctggaataatataatagtttttctaggatacgatccagttgaaggtaaacacaaagtaatgtgcttgccttttagaagaagttctgatgtatgtcaagtgttaacattaggaccagctcaagaattctcatggataacggtaaaaacgtaccataagcattgttctgactatcagagttctggtcgatgcatcaagggggttgtatattatatagctcaagtttatcatacacatgcttgggttttaatgtgttttgatgtcagatctgaaaaattcgacatgataaaattacatgcggatatttatagggaaattctcataacttatgaggggaggatagcttgtgttgaaaaacgtaccacgaaggatgattacatagcattgtgcattttggaggacgcaaaaaaagacaagtggtcgagtaaagatattcttgcaccttttggtcactttgatgaaagattaagaacctttttccaactaaaaggttgcactcatgatggtgaatttattttcgtatcttccacgtttcgaaagatggattatattttattttttgatccggtgaaaaaaacctttagaagattcgaacttaaagaaattgcagacgaccaagctagggtcaataatggagatccatatggacctatatttgcgttctgtgctttcttggatcacgttgagagtcaaatgtctttgcaataattttaatttttttcttttttgttcttcctttagaatgatcatttttgcaagtttaattatgatttttttttcttataagttctcatcccttactttgattctatcacgtgtcatcttcctcccttgccaattccctacagcatttcacaaattcaacatcaatcatttagtagtagtaactcgatccttatctttctaaagacttttatttatctttttgggccctataagtgaattgcaccaagattacgcatatacctgttggaacttttttgacaaaacctttccggtgacttttccgccaaatttcgaccaaacggctgaacggaattatcgggacattagtgcattggaaagcgggtaaagagtactacaaaatggtatactcatacgtcaaaaacggagttgtattgaataagaaataagggtgtaaagtgggacacttgggccaaacctgatcgaaccgaaccgaactaggatgagccgggctgcgggttgtcgggacgtcccatcgtcgactcaagggctgtcgggcttgcggaccgtcatgcttgtgagttattgggcttgctgagttgaatcttatggaaatattctcagaatagtctcaaaatattcttaggatagtctcaaaatatgtcatgcatatcctgagaatattctcacaaaatcctattttcctctactatataaagagacccagcctctcattatttctcaagctctcaaagacaaaacactctaaattctaaagtctctcctctctcttgcttcttagaagtaagttcttagtttaaaaacatcatactgcttaacatagataattatataggttaaacaaaagctcgataaacgcatcaatggcatcaacttccgattcgggctacatctctatggggctcactctaaagatcgcgaatcaagatctaaacctcgacgattttaaagaatccaccatcttctcatcttctgatcaagctttctctagatttactcatcattttcggaggatacgtcatcaatcgacttccctcttggaaagaacttttaaaattgggaagactgtgaaaaaggggatcgaaaccctaaatttttattaatttgggcattttgttataacctatagaaatatgtatgtttctgagaacatataaataactgcgagctaagtcggtaaaggaaagttgttatatctcacaggttgcgggttcaattcctcaacttgtaaaaaaaaaaagaaattgaaacgacgttgttttataagttaacagaatttataaccgaagacttaattctgttaatttcccgtaattttggctcgtttaagtcttaaataatatcttatgacaaaaaaaagacttaattctgttatttttttcgtcagttgacgtaacgttttacccgaaatggcaaaatcaacgaaagttatctatttaattctaaagtcaacaataactttggtatttaagtgacatttcgaaaattcatgtttttttgttctaaatttgaaagttcacatttttttgacatattttccaaaattatcacatatattgtatattatttatatataaaaaacatttcattacgaaaatccgattgaaaagataacaagatggaggacacaacttccttcaaactaaagcaaccaaaatttattccttaaacttttggaaagaaaaataaacggtaattgatttatatgatataaataattatatatttatatttattttgacgattgttctaaatagttccaagaaatcctgggccgaaagcccgaaactcatacattcctttgctctgtccagacgaatactcggtcctcatcatcttattctttgtattctttgagagtatcgatggagaagacaaatcctccatctctacatgtttcctctttaaacctgcttgataggcctcgagtttcgccttgaaagcaactaagtcctccaatttcagatctacattctctttcatattggacttttcaaggtttctttgctgtttcttcctcaaatcctaaaattgacaaaaaaaatattatataatataaaataaataatgattatttaattctgtgtataatagcaaacccatctttgtaatctatatgttgagaacgaagaagaaggaaaactaacggatgagattatattaatgatgggaaacatacctcctgaaactctttgatttgttccaattctttcatgagactcctgagtttggacgaagcactaggattttgaatacgctcaaccacatcgttgaagcatggataaccgtatgtgtatggtatattagtgggggagatgaccaagacagcaatctctacattacacaacttcgcgagttcatcagccttcttaaaaatgccatttcggcgtcttgaaaacgtcgctttcctttcgatgctatcttcaataaattttatctctatttttctacgacccatttcttagttttagagagatgtttttgttgttggtgttgtttttgttactactctactccattttatagatggattggttcaagtaggtttaacgcattaattataattttttatctttgttatcctttttttattaaaatatttgaatttaccttttaaatatatttatcttttaactactaccataaatatctttataactctgactacacaaatttatcataatagtcaagagttggtattccaaacaaattcttaagatatattttctgaagaaagtataaattttgtaatgcttatctttcattagaaaatatttaggaaaaatacaaattttgtaataattataaattagatttagtatctctacatatcattccatatatacaaattttattttaaaatgcaaactcacacgcgtcaaacatgcgcactagccacgacatatcaataaaatgaaaataaaaaactgatgaaacttggtaacaactttttctaaattaaaaggagttttttattttattatttcatgttttgttttcactcacacggatccgacaataatcacttctcctaaattcacccatcaaaagacataggtgtcaaaatcaattcttttaaacatttctacatgcatcaccatatttcatgaaactaaagtgttacaattcatccctctagcagatcgtatcgtcctggttgcgcatcaagaccgtcacaatcgactttgttaaccctcttaactccacattcgtctgggtttggctctgataccgtttgtaactccccgacctccatctttcttagtgaccccacgtcctctctcggctcacgggctcactcttacccgatagccgatccattacgtttacgaggctttaaaggcttgtttaccgatcctacatatcaccacattatattttctcgtgttttatcctcgctcatatacagttgcgacaatcacttcttggaaggtcattccctgtaatttttctaacttaagcacgcttaattatgaagttcttttcagatgtttgactgaaaataagtgcaatttgatgatataggtggtcaaatcaaatttttaaaacttctctgcatgcaccaccatattttgtgaaaccagggtgttacaaaaggtcaaataaattgatgtggatatcgaattagaagattcctcatgtgatgcacaagatgtgttggatggacccacatccaactagaagattcctcacccgatacaccagaggtgttggatggatctgtgattcgaccatgcaatcgaaaaccctaaaacaagttcagtgcaaatctagagaccctatttaactccatggaattttagctggagcaccaactttccgtactgagctgtttttcagccgaagacccatgaaaaatatctacattaatcaactcgacaacgaaacgttagaggatatattcaaaaatactttaccggcaacatcagttagcaatctacgacaaatgacatggcgatccgagaccaatggactaaggcttcaaaaatcatcgaaaattcatgcattgtaaagggaatagtctaaccgaaatcatgcattatcaaactcgttttggagatgaacaacatgagcattatgacaaccttacatgtagccgataacatgtcttttattgagttaaagtgcgtttcaagattttctttaatcctttacaggttttagattgatatggaggaaaaaacattttgggatgcaaacacgcatttggagatgtgagatcatgtataagggtttggagtttcgcgtcatgtggaagattttccaccgttatatcttcctcatattgtgatacaagctaggtgatgatctttgcttttatttccaagtgatttgaagaaaatctaacagtgaaataagacgttatggccaatctacttaagacatgtcaatcagatgaaactggtgtggaaactgatccagacaatcagagaccgataggtctatatatacttgggaccgatcagtccaccttcatttttgagtcgaccctagtaggccaaaggaagatataataataaggtccctatgcagccaatgtattgacctttttcgtatctagatcaataaagtccaactttcttctcaagctgtttgcgaaaaatagatcaaaccaattttatacattttccacggccgcattaattaaaccggacaattcgggaatggcacgcaaaccaattaatcaaactcgattccggttatcttcaattctccttcttcttcatcttcgcgtccgtgaagaacaacaattgaaaaagctccatctcctccaatggctacgaaagctccagagaaaatcaccaaaccaaaagacagagatttcctaaatcatctcgaaacatatctctccaaaagagatggtgtagacaaactcctgaaaatctctcgttacgcaacaaaaatcatcctcgcatcatcactaatcccagaaaccagatccataatcccccgactcaaaagcttcgaatcaagcgtcggagtcagtcgcaaagccttccgtctcggaaaattcgtacaagacatcaacgcattaagatcctcacgatgggattcaaatcacgagctcgtcttactcataatcgcgtacggtggtgaaggattatactatttcgttgaacaattcatatggttaacgaaatcaggactgatcgatgcgaaacattcgaaatggcttcagaagattagtgcttgggctgaattggttggttatgtaggaagtgtttcgattaagattagggatttgaggaaattgaatgatgaagagagttgtgttgcttcgacgatcgagatctcggtttcgagaggattagcttgtgatggtgaagatgagaagatgaagatgattaaggagaagaagacattgaaggttttatctattttgcaggatcttgctgatggtttgatgacgattgctgatattcgtgatggtaagggagtgttatcggctcctaatgtgatatcttctgcaggtttgttttctgctattgttagtactcataagaactggatctcttgttgatgatcatgatgatgatgttcatcgttcgtttttcgattgaattatagtatttgcttatcgaataaaggtttcgttttgattcttcggtggtttgaactaagagagctagtttagatataaacagcgttgatgcaatacatgattttgaaaatgagaaaagattcaaatttggaagcaatacaaacagaaagaagatgaagaatggcttatgaaagcctgttaaaatcaaatgaaaagcgatggcgcgggaaatctgttttcgaactccattacaaagatagaagaaggataaatcgtggtttgtgttgctaacgaaacgaatgagagaccgcaatggtttttgttggaatgtctacctttctttcaaggagctgctgttagattttgagcgtttgagttgccaaggaggtaagcagcctctgagaggtgattgtaggaacaatgatgatgttgaaagctgtttttgtctcatggagatggatgataaacagctgaatgagcttctaagacttctcttttcgttttcttcctccgggatttgcccgtctggatcgtggcagaccgctgttatcttgagggactcgggaagtatgcagctgcacacagaacctgcagaaaaaaaagtaaattagtctttcaaataagacttcttcaacaattctcaaatgcaacaaacatttgttacctatttgtgcaagccgattcacccattttgggatctttttcccggtaagcttgtagcaaacgtcctggcagaaatggttgcagttcttaacaatcaagtgatacatattcccgtagtaactgcaagccatgtcttccataaactctctcacttgtgttgggtttaaattcgtggttccaatgaatatcgatttcttgaacttgaagcccgggcattgccttggttcaacctcaaaaacaccactcgttgcataatcatgggcaccaaaagcatactctactccatgaactgtaaacgccaaatgttcagagttagctatagcagtaactataagtacaccagagatgcaaatctttggatacttcaaccatatgaacaagaaaacacaagcgagcgcctaaagcttaccttctacaccagagtgaaatataccaaggcctgcccaatagatatatccgttaataggagtcaagtcataaacattgagatacactggtgcacggcctggaccatggttgtttgacttcaacttcgaaaagaagcaaaaccgtgcaactgatttgcttttcagatgaagaggaccaagagatttccaacgtttcttcgacacaactttcatcttttccccaaaccctgaccgaaattctagcagcgactctgaccaacctgccgatgaagaaccgagccacataagaaaagtagcaaacacattatgatctctaattagtacattaatcacacaaatgtcaaatcaaaaccttacctttcttctgcttaggctcttcttttccgttcaacatttggatgcctcagtagaggttatcctgtatgtaaacatcatcaatcaataaaagattctgaaaggtacaaaagcaaagacctctgtgccacattatgttttcattgaacttaagagactgaaatgaaaaattttcctattttattttatcttatgctagttggctgaaatacaacaacagctcatttaaaaagtcagcaccaatctccattggccggcttcaatcagttatatatacaaaagcataaaatataatagagcatgcatcttagaataaagcaagacaagattggtctcattttttccatcttaatgataaaagacaagactgagtcatctaaactgtgattttgtatcattgttaaaccaaatccttacttccccaaatatacagagatcaaaaggaaaaagtgtggtcatgttacagtgttataaaatcaagtcttgttcacaaagagttgctaccatgtcagatgcaatcatgaacgagttatgtattaaataaagagaaatagacaggagaagatgatacagatagattaagtaagagcttaggagacaagtcaatggttcaacaactcattccaactaattgagtctgaccaaaaaaagcaaatttgattccacattaagatgaatagtgaatattaaagagtaccaaacaaacagcattacattagtgtttctaagatctaataaacctacaaacctaactagttccccaaaatagtaaatcttgaaaactggagcttacattactgaaaatggaagaattgtgaaacttttattgcaaatcaaatgtgacccattaagcacagtcaatttataaacacatttaaggtatcacagagactaaaatccctaagagtaaggagacactgatttggtcttgttctagggtttatgttccagatctgccaaaattagcttaaggaaagcaataaagactaaagattaaacaaaccctttactcaaagatctcgttttttccaatttctccggcaattccgacaaacaaaaaacccccataaatttgagaaattcagagatgaatcttcaagataatgtaagaattgatacaccaaattcaattttcagaagagaagattaacttacgaaattgggatggattcatcattgcaagtagcattaactgtgaaccacctgagactgaaactttgcaagattattttgttgttgttgttgttgtaataagttgaaaatcataagaagaagaagatgagagagtgggagagagagagaaagaggggaaaaagaaggaatttgttcgctcttcttttctctctctcccctttgtctcttcttttttattttttttggttgcatgttttgtttttgtttgtattttatcgtctcttactctggtaacagtaccaaaaaggcttttgggatggttaaaattgtgtttcgctacaaaacgcttttaaatcagtttttgtattattctctattgatatggttatatgggtgtattctcttcgagtttggatagagtattttggattatgagattttgatacacagcattgatatactattcgcgtattttaaaattttgatgttggttcaattagttgattggagagatctaaaaccattattttttgggaatattttgatttctgacgtctttgaattctttttttttctaacagagcatactttatgtaaaagaatcaagataagaaattcctttagcgcaactttttactctaataaataataatttttgatttggaagaacgataattttaggacctcctcactctccatttatgaatctgatataactgtttgaagtagtatatatggtacaactgatatttttgaaataacaactaatattttcttttcaggagaatgagcaaccttccaataaacatatattttgattatgatggatattattcaaaaaccggagatgcatatcaatgaaattcaaaaatagttggtttgtatggtatatcgtttaggacatcatcaatagaggagataacttactcgcggttagtggataagatactcatgaagattaagataaatgaatctacgacaatcattcctctttttttatctttcctaaattaaaaaaaaaaagtgatttaagaatatttagagataagagttagaacatttaagattgaaagtgtgtgggttattatttaaaaattaaatatcaaaagtaaaactagacacaataagatagagcgtgtgtataactaaaatgttttgttattattcattaatgacgtgtataaaattaatatccagtttattatcatgaaatgaatagttaaattatattgcaaaatagaatgtgttaaatttgaatttttgttcaaaaattctttatattaaatgaaagaaaaaatgtagattactattacaattcaaatattattaaaaaaatctatttatttctcacaccagtataaattttgtatattattaaatatcactagattagtttagttggtttagtgctttatgtatagttttgttatcaactctggttaagagtcttggtattttaagtctttctttgtacatcttttacgattaaatttagtgggaaaacagtcgatttccctccaagaagtattgacatcacgtcagatagagcctatttttttttatctcggtctagatgtttaggaaatggaagtttaacacctataagcattttttccttttccaatttagtggaaaaggaaaaagttgagacatataagcataaatcgtggaaaggaagtaccgacttagggttttctccaagatggagcaaagagaagagaagaccgaaaatatccagagaaaaagaagcagaggaaaatcttcatcatcatccttacctctcgatctaacctcggagatattctcaaggctgcctgcgaagtctgtcgtgaggtttcgttgtgtttcaaagctttggtcatcaatcaccaccgctccatatttcaccaactcctttgaaactcggccgaatctcatgttctttttcaaagaaggtgacaagttctttgttttcacgattcctcaacacaatcagaatccgaacgagtcttattcttattcttcttctgagattattgatagttaccatacaacctatccaaaacgttgttgcgtcaccactttaaccgagtcggtccacggcttgatctgctttcgaaaagcagcaacccctataatttggaaccctactatgagaaagttcaaacctttacgcaagctggatgagaggtggaagaatataaaagtctctttagggtacgatccagttgatggtaaacacaaagtagtgtgcatgccgtatggtaatgctttttatgagtgtcgggtgttaacattgggatcagatcaagaatggagaactgttaaaaccaaccacaaaaatagcccttttacattccatggtggagtttgttatagacaatccagatgcatcaacggtgttatatattatcgagctgatactaattctggtcgggtgatattgagtttcgatgtaagatctgaacggttcgatgtgatagaattaccatgggatgagaattttgggcttgtgatgatgatgtcttataaaggaaggttagcttgtcttggtttcaatcatgagaagaatagtcgttcaatgtgggttttggagaatgtagagcagcgcgaatggtcgtgtcatacctatttacctatttctcattatgagccgggtttggagaactatttcaatctaacaggtatcactaatgatggtgaactgatttacgtaccaaacactgtgctcgaacgttttcatgttatatattttgatgcaataagagagacgtttagaagagtcatatacaaaggagttgcagataaaggttttcgactacgcaatggacttgaagacaaacctatacgtagactccactttttccccaatcacattgaaactctcatgtctttgtaatggactttgaaattccttttcttggttttcttcttatttttttagtgtacagttttattaggcaactttattattttactagataatgcccgcctatttaggcgggtgtaagatataaatttattcaaatatttatcgataatatttaaaatttgaatagtaaatagtgatccacacacttttctaatatttaatttagtaatttttgaattaaataaaatttcaaccatacacattcaattttactatacattttaactatctctttcatcataataaactgctttttaattctatacactccaacttattgatgatatttgaattttaaatagtaactcatatttttcagtatttaatttagtatttccttaaactaaatttcaatcttacaaattcgattttacaatacaatttaaatatcttttttatcataatacaatacaatttaattcgattgtatacaattcaaatacaatccaatttttcaatacaaatacaatttaattctatacccttcatcttattgttagttttcctttttaattaaaagaagttataagttaaattttttagatatagaaatataaattagtatatgtaaatatgtttatttcttttttttaaagaaacttttttttgacatatatcaacatgtcaatgatatacttgacacgtgtcatgatctcgtgagttagtaactttcaaaaccgtgtactttatataataagatatcacatgttgtttttttcttgttttttttttcaatataatcatatgttgttttcattatcaaagttcttttgtgatctatataatggattttgttactttacaaactcaacatctccaagaggttttggaatggttcgacgatcactcttacaatcaattctagatccaaatcgaatgggcctaaacccataatgggcctagaatcaaatatttcactcaaaacccaataacaagaaaccagagacctcctctgtttccgaatgatcaaatcagcaatttagaaacaaaaatggccgccaacttaaaaaccctaaaaatctcaaatttccccagtagatgaacacgttcttcaaactcggaagcttaatccaacgcactgcttctcaaatctcttcttctttcccaaaatctcgtttcttctccgatggagaaagtgctgtttatcaccatgcgcgtttgttcaagaaaccactatctaccaagcttaaattcaatcttgtgaactccgtgagtcttatgggtttcgttgatcgatctattcaagtcatgaacaccggacctgataggttcggtgttttcactattcttagagtcaaagaccctctcaatccaaaccggagctttaggtcaggtttgttcgattctcatagtctgttgcttattcgacgattagggttcttgattaactgagtcttaatgttgtttgatttcaatctgtgcataatcctgtattgttcgtaagccttgtgattgttaaagtcttagtcttttgttaatgtgttgtatatttaatgacaggatatcacttagaatgtgggacgcaatggcacggacttgtattgcgcatctgaagctaaatgatcatatacttgtctcaggccgtcttgagtcttacagcaagagctccagcgatgtatatagtggcttaaatctcgattatcaggttcaagttcaaacttaaactctatattagcaaaatgtcccagttctattaccatcagcttcttgtgtagtcaagagtcgtttatatatatgttttaaagcaacttcgtgtatctgtgtgtagctaagattgaccaggctggtaaattattgcaggttaaagtggcagaagtgaattatgtggcggctccaccaagtcacgtcttagattctcagatatccaaaaacccaaaaacgaaaacaggttattatctcttctacgtatcatcgtctctattggtagtgaatatgaatccacgttgattaaaagaaccttgtaccaagctgaattcacactgaaacaggttttatatcttctggttttgtgtacttagggtttataaaaagtttcattcattagttttgaatgttgtatacattttacaagataagatgataaatattgcctgctacttgtgtgctttggtgtttccttagaggatgatattgaagaatccaagaaagatgagatatacttgtggcaagtcttcttttcgaatccatacgattggtgggacaacaggagaaataagaagaacccaaagcaacccgactttaagcataaagatacaggtgaagctctctggctttgctcagatttaccggactggattactagacgacttgaattgttcgaccagaaaaaccgcttttacgatgaagaaaaaacacgtcgtgaccgtctttctgactatatttaggacgagatattcttgggaaattacaagtatgttgcattcacttcatgtttatcatctagagaatgagagttaaccatcttaaaaaccgtttatgtatagtaaaggttatgatttttgtgaacgttgtattactatatactatataattttcttagtaggtatatataattgtttgaagaatccttattgcagttattcacccagctcggtggtcattcattggtcagtgtttgcccaccagggttcgaatagcatgcacccaaaagttgatgattcatctttcttaaatttgtgtgtgtgtgtccatatacagtgaaacctctataaattaatactcgatgaaatgtatgagaccaattgaggtattctaaaatacctttttccaattattttattattgaaatttatttgttagcaaaaagaagtgttatgtacacaaaagaaaccaagaatgataagattatcttgttgcaagtcttcttacagtttattatagtttttgctactcatattgcaaaatccatcgcttggtaaataattctaagattatccggtttatgtggatacatatcagttttgatttaatttttttcaacataatcaagagagacccacaagagaactccaaattttcaccgttggagatgctctaagatgacagatgaaaaaaacaaaaaaaaaaagtataagagaactctgattagcagaaaagtccatatttatgcaagtatttttttaatttaaaactttataggatcaatatgtctatatttgttacaaataatataagttatccgttttatgtggatacatatcagatgaaacagcgatgactgcagctattcatccggtttggtggttggtcattcatggttcagtggttatccatcagggatcgaatagcaatgcatgcaaatcgaaacctctgtcttgttcacataaatatatatatgtctgcgtatatatatcacatacatatatgtgacaccaatcaaggtattccaaaataccttttttcatttattataatcattttaaagttatgaatatatttaggaaatggcaaatagaataatgttgagttgaaaaaaaaagctaatgtctacggatttaatggattcttttcatttatttatttttttgctgccaataagttagtagagtgtaagataaatctgaattggtcgagtaaaattcaattagtagacagaggtttacgtgtatgtaaccatgaatgacccaatacagtgaatcattaagatgcatcacatgtatgtatgtctatcagttcagtacatgtgatccaaatacagaagaaaagctgttatgtatcactattattcttacacacatcaaagagtcaagacaaaggatgttacataaagatgagtcctcaaaaccaatgactcatttattttaagtaaaaccaaaaacttccacattagctttagattaatgcaacggatcaacaacttggccaatgaacagaaccactcctgttatgttctctgtgaccaccaatagaaacggatggtctgcaacaaaatctatttcatcttcctccataagcaatcctcttagctttataactccagctgatgcagctgcagcttctgttccttcttcattcacttcgatacacgctttatggaaaatgttcgatacgcatagattcttccccatctcaggagattcaaccatctcagttaaaccttcttcaccgctgaaaggcgaagtcagtcccaatccttttaaaacatttgaagcatcgaacccgaaagagaatttaaactttggaatcttgaattcgcggactttaacttgtctgcgtgggatgtggttgtctaagaacccaggagtggaaactattttgtccagaagatcagacagtccgttgtttgcatcgggaagataaaagtacatggagaattgtcgcttatcctgtccttgtaagtaaggaagtcccaaaactttgaaaccatcgtaagcacttacgtattgtttcttcttgctggtcatgaatggtgcagtcactttgttaccgtcaagaaggtgaaactcgccttcttgtgttaacgactcatcgaatttctcgttccatgttcccttgaagtacaatgcatttgcaaatatcagtttggtcatactatcagctgatccttctggaagaacctcagtgatgagaccatttgtctccttttcagcccatgaattcacttcagcaatcacctccacagccttcaaaaacaaaaattatcaaacataaacccaatcagtacatcaaatcacaaaccttttaaaaacctcatttccacagccttcaaaacagaataatcgaccttaaccctatcagtacatcgaatcacaagccactcaaaattccacacaaaccaagatgcataagaaaccctagacacagccacagaatcaaaacgtagtaatcacatcacaagccactcaaatttcacacaaaaccaaaagatccataagaaacaatgaacctatacagatcctcagggtaacataatgaaaacaacaaatccacattttggcctttgattgtgtctactaaaatccacacaaagttagtatttacaacaccctaggaagcagaatcaaaatgtagtaatcatattgcaatcaataaaacgaattcgagagcaagatttctgtagaatcaaatcacaagccaccctaatacgatcatatacagatcctcaagtgtaaaattcagaaacaaaaattccacattttggcctaagagtgattctattacaatccacacaaagttcctctgtacctgaagaactaagtctagatcacagaaccaagtaatcaaatcagaaaactcaccttcgattgaaaatcagcttgattcgaagcagctttatacgaatcttccaagagctgtttaaaggaaggtttaaaggagagagacttatcgatccaggcgccattagccaccgagagcttaggaccaccgttagcactaccgtcagcgagaacagcggagacgatttcggaagagaatgaattaagttgatcagtggaagagaatttgagaaacgagaggatctgatctttggtagcgccggcggatccagcggcgattatactgagtacgacgttgattgaagccggtgagaagatgacgttggagttttgagagacggtggtgattacgtgttttgcgagattcatggagacttggttttgcagtgagattgattcacgcacgtccattttcgccggaggttgtggtggtgatgactggtaaacgaatttgctgggtttaggagaagacgattgatatatttattttagagaaatatcttaaaattatataataataattaaatacaaagattataaatgacatgtcggtcaaatttttttattttttttcttctagcacgtcggtcaatggtatttgactatctggtggcatatgaaaaaatttcgttatgactatttcgttatgaattttttttatagagctgaatgttttttttttaaaccgagtaaagaagaaagagagacaaaaaatagggttttgaaaaactcttatacatttagaggatttagattcttaaaattttacttaaaattactattttttttgtataaataaattagaaaattataattttttttaattataaaataaaataagggtaaataagacttaatttttttttgaaaaacctacatttgactaatttacaagaaaaataaatagatggacaattttgttttgtagatatcctttaaatttagttttcccaaatattttttgtttttaaatttcgcctttgaaaaagaactgatacagatgtttttttaaaaaaactaaaccttcattacatagtaaaactgatataaaatgtttatcattgatttttcaaaaatgttattttcaattttcttcataaatcgttataaaaatatagaaaaaatatgctgacttaatccacaaaacttgcagtcttaatataaaataaatttagattactcttttttattcacggtttttattagattgtcaaaacctatcaaatattaagtttgactggtgatattgttagaatggacaaattagttagcaatttagttcgctttattttttgtgtgaattataaactgccgtaaaccaactttacttatatgtaaaaaccgtttatatttagttacgataatttcaattatttttattgtactctcattataatttataaatatagtttgtgaattataaattaaaactaatctaatttgttcatctcaactgccgcaaacattcgcgattattgacattttagtgtaatataatatgtgtaagaaaatacgctcaccgcacacgtcgaagcgccaagcgaagaaggtggcacatcggcaagaggaaaaaagatgaattgacaaaatcttttgaaatgatgtgtaagcctataatgaacttgaatgtatatgaattaaaaaaaagtgtgaatatgtgctttgcttatcgatgacttgttgtgtttatctctcggtggaagcaatcgattattataaaccatgtcttcgaccagaccatctacacatctttttatgaattttaattctcaagtctgtgataacaaaaactaaatagagactaaactaaaataataatttagaaatggtcttttctaattaagaaataagatggttttcttctcaagatgctatatatatttttagcatttgatattatgacactaactaaataaaacctctataaattaataatgttgggactgcaaaattttattaatttagagaggtattaatttatcgataaattaataataaatatataaagagattttcctaatttggtaaatttttaaaaaatttctataagatttctttctttgtagaaaatatctttctaaaatcagttacaagtaaaacataataataatgtttagaaaataacaccaaaaattttgatacagtaaaatatgaaaactatagtcaaacaaagaacaaatatgaatttaagcaaaaaaatattataaagaatttttttctataatatatatatatatatatatatatatacaattatatatatatttatacaattattaatttatgatattgatgagaccatatatttacataggactttcaaaaaaattattattttattaatttatcgatttgtgtcacattttacactggtcctaactcgggaccgaaagaatttattaatttataaaagttattaatttatagagtattaatttatagaatttatactgtagtttttctgacacaaatcttttatgtttacataactcgactaatccttgtccttatattgaggggcaatcaagtttacggtttggttcaggtttctaattttattggttttatatacgggacactaaaatcgaaagaaaatacggtttacttttgcatttggtttgatttttgttttcgtttctgaatcatttctattttagttaaacgtttttaagtgagtacaataaagaataattttgttatattatacatttttttgtttgttttattatacttacataaaatgattaaattattttaaatataaagatgtaactaaaatatttttaaaaaatagtacgttttatttgtttagttcgattgtgtttagtaaattcaaaatgaaatcaaacagtttataagtctttagactaaggccagaccgcaagggcaaatcttaggcattggttccaaggacggtaacctactgagaatgaaggaagagaagcgtgtgcaacccttcaacaacacctcaaatccttaaatttgagggctttttgaactctaacaagccctcaaccctttatttttttagggtgtgaatagtacaacctcaaatacccttaaaatctttcttatatttcattttagtctttataatttatatattttacaaatagttatatttagttcaattatttcaaatataaccatataattcaaatacattgaaatttaaaattgaaattattaaaacataaaagatataatgtttcaaaacaaattttatacaacaatgatatcacactgaacaatttaatacacattataattaacatttcaataataattataaacatgaacacacgagttttattttatattttttctaatttatatataattttgtagtaacttgtgaagttttgtttttctaatattgtttgacataatatttttgaaatgtatgttttctattttttttatataaacttttatcattataaaacattattgttaatattgaggactagaatgtaaatataaacaaattttagaaatatatttgcgggtatgttgttggagcaagtgacccttaaaccctcattttgaaggtttctcatccttaaaatgatggtcatggttggagatgctcttagaacgttaatgttaatgcttcagagtaggcgttcaggtatccgttcagattcggatagaatattttggatttttgggttttcggatttagaggtatataagtcatttgggttccaatcgggttcaacaataatatttcggatttggattcggattacccaaagttcccaaatatcaaattttttataactaaactatttgaaagtacacaaaatatctagaaatcttgaatatttctatttaaaagtagattaaatatccaaaaatatctaaaatatccatgaaatcctaatatctgaaagtagctccaatcgtagacaaataggcgaaatgagctggagctaatcctggcggcaaatgaggaacaatcgccggtaaattatagtgagcgcagttagctgccaaatcatccattgacgaagatgatttaataatatcaaatgttgatcaatgagccgttaaagctcatataagtagttagggtgctactcattttttgaatctcttccatcacaaccttccccactttctcaataaagttgagttttttcccttgagttttctcaataagggcatattcttcccttgtgttttctcttgtgatgtcgagcagaagccagcgaatatcaagtaaaatagtggtaccagatttgtcgtgctcgagctgagcatctacagtggtagtactagagaatcaagaaccccaaactgttatggagttcgggtagtagagaatcaagtatatttattttatattatgaccctggtaaaaattatggactaaattataaaatattttagaaaatttgactaccattaatgttatatctcatttgtagttatacattatgattatttcttttgactaccattatgattacttttgaaaataacatagtccactattttaaaaagtccaactgcgattaagaagcttctacatgaaaatattattgttttttctcataatacttacacatcaaatacttaaataacatgactttactcgttaatgtaccttttttttgttatttgaaatgttaattttgtgatgtgacataaacatagtcttattaaaaaagcttaagtgtattttaaatatgttgtttgtacaattttgtttgggttaaaatcatttaattcaattgatcaagtctcaaacttatttttctttttgattatgttatatagttgtagtttcactcgataatagacttttcttcgagatatgctacacaaattatagagttgtatttccactgccatgtagtagttactataaattgaagtttcaattcaagttatatttttaaataaaaattttctttcaaatattttaatttttggttgaataatttgataaataagattacacatatatagttccaactcatgcaatatatctccttcttcatgtgtaagaaatcaaggaagttttggctcatatatctaaatctttatttttagtgatattttttgctaactttatttgtaaataacacttgaaaaacctaaccattaaaactagcgtttggctacacagatttaatatttactaaaaagatatttacaaaaaaaattgtccatctatttttttttggtaaaaatgtcaatttggactaaaatacccttacacttcattttaagttgttttcaaaacaaatattcactctaacatgtaaatatagaagaatggagatgttgtgaagtgtaatttttttttaattttattggaaaagagtgattttttttaatagataaagtttgtatgaatttgttagaacacgttttctagcgttatacgaaattcagaatgtgaattctacatttttgtaaagattttacgaattttgattttttttttcgttctaaataattcaaaagtctgaaaatccgatttctaaaatttttagaacacgtattcttggaattactctatgaactaaataatttggaataacaattctacgaattacttcatcgtttgctaatgttaaaaagcgtaatcttcgtttagaactgacattataccataatctagatttgagtttttgaacttttagaaaactctgaatatagatagtgaataatcctactatattatttgggaagtacattttaaatgtaaccttattttttgtaagtaattacataggtatgccattagaaataaaatttaaagagtaaattaattcatctctttaaaaattaaaaagtcaaatactaatttaattagttaaatttaattaaaaaacgaaatacattattaatttccaaaaaagtaaccaattaaaatcaacaaattagatttgatatctaaattatcatattaattttttattaattattatagttcacctcttatctttatatgattctatttttgcgaaaaattaatatcatcgttataaaaaataattagagttttttcgcatacgccataatttgaatttttaaaaacgaatataaactgttcaatacatgaaaaaatattgtaacggatcaaaaatagatttaagaaaattttctactgagtaatgggtcataatttgaatatttatattcaatttcatacatattattttaaaaatttataatcttatatactacaataattaataacatattagatttttttatgtgtatgatgtgattcaatttttaatacaagctggaaaatcctagaattgacggggttaaatcgatattaatacaagatggtatactaaaggtgaaactctaaaattaacaatcaaaatacaagtgtataattttaaacactaaacaatataaataatatcaacaaaacatatacgactcgcagtttactatgcatttaaaatcaaataaaataatatcatatatttataatcatctttacaataaaagtttttagtttaactaaaatataagcctatgagtaacccattcgtgttcgggtagaacccgtttgggtttgggattaatgggtatatgatttactacccaatagaataattctaaatattccgttctggtttgggtcggatccagttgggtttgggtcagtttagataaaaagttatagacccaaaaaatacccaaaaaaatagaaacaagaaatttgtatttagatagcgggtcttcaaacaaaaaaaacttttacatttgttaagttttaataaatttaattatatttgaatatattttactaaattttgacaaacataacaaataatttttgaatagtttagttgttttggatatttaggtccaaaattaattgacatatttagacttataattataatcttagataattagataatattacgattaaatataattaatattttggatattaaattaatgtttgggtttttgaatactctttttggataacgagtaatttccggaccaatcggatatacacggatttactaaaactctacccaataagaaaatttcctaaaattttaactcgccctaaccctgttttttggttcaattattgggttggttatcgggtccgttttttcgtcagccctatcaaagataatctaatataggctccaattagatccacaaatagtataaccaaaatactatacaaagactaattttaagttaggccaaaaattagatcctctaatacaaaagaaacatgtttcttaccaaaacaacttgtatataaattttacacatttacttaaaactacatatgttgtatttattataaaaataacatttttaaaaaaagtcaattcaatgcagcattatatgcaaatagtaaaaacattgaaaaatattatagcatcacttttatactatactatttcttatgtaattcaaacaaagtatacaatttaatttatacaaaatattaatgcccgtgctatacagcacgggttatgatctagttagataagaaaactaaatatttattatagattacgttttaaatgtaatttattttgtttttattacgatttacagaattgagagatcgtattctaaatattttagaaacactaaaagcaaagtcgtccaaaccctagcagctagtttttcctttttttccatgtttaacaatatttgtagtcattttacttttatttgtctccaaaatttactatattttttctttcttcttctattccacaatgtgtgcctttggttaatagatgcacatttacgtaattagtggtgtgatgcacatttacgtaattagtggtgtgtggagattgtaagaataatatgttctcaagaacttgtatctaatcgatctaacaccttctaagaacatttcatgctctatgcatgaaaacaaagtcactttgaagtaaatttcagaagatataatttggtaactctagaaaaaactcttgtgactttaaatttcatgatctaacaccttttggatctctcaaactaaaacaaagggaacagaaaggacttatatatcaaactctgcaaaattttcaacctcgtcaacgtaacttttttttttcttgtaccttttttgatttccttgcatttgaagaaacttagcataatggttactttggttttttacttctatccattttcatacttacgtatagggatttgacggttcgattctgttagacgatacgtcgagcatcacatgagaacaaaacgcggccctaaaccgcaattcagctagtgaatttaatgtgatcactgatcgataacatcaaatcagcggtttagaaagcatgttccgggttgtatcttgcggtgacatcttagccattgcagctagaaactctgtcgtaggcgtaagctccatgtttcttctctcaatcttgttttgaaacttaaaaaaaataaaccggtctaaaatatgaattcttctttatatatgttgaagcttggaggactgaattaatatgtgaaagtaggaagaagagatgcaagaacgggggagtcaaacgacgacgaatatgtagaaacattatatatggtaggtttagtcatttgagagagaatgagggtagatttgggtttaaaattttataacaacctatcttaccaatctactaaaaaggtatatatggacaaaagttgttgtagatatcctacatatccaattttccctatatatttttttccaaattttgagtgtgaaaggaataaaaattcaatttgtttggatgaaataatagttaattttacttgatttagtttttattttcttacaacaagtcaaatatattttatgtctatatttaatctatcttatctcctcgtaattaactacaaactacctcatgtatatataaacgttctcatctcatgttcctcctacctatgaataatctaaagtaacaaatattttcacttttcttttctttcttcttcacaaaaaaatatattcctttaacaattcaacccatggagaaatcgcaatcatcgtgtgatacacggaaaagaagtgttgtagttgatgttgacaacactaaagatcgcattagcgatctcccaaacagaattttgggtaaaatcatagtaaaacttcctttagacgaagctgtgagaattatggctctatcaaaacgatggaagagtatatgggatgataattgaggataaatgttgtatcaaaatcttttgttttgaaggttttattattctatccgaatttgtattcctcagtaactgtcttattgcaacttattaataagttatttaatttaattaaaaaagatgtactctttttatccttcaaaatatgacagatcgctaaattaagaactatttgttgttgttattagattcttttttaatagcttctctaaagaaatttttgaaaaaaatatagactaatagatctgtgtataaactgaagatttagggttggtgatatataaaaaaaagacttaagaactcctgaataactctaggatcttgtatgttaattgttgaagtgagaaatcaaaacctagataatcgatgaatacctttggtatatttgtgctcaaataataaaagaggtaagaacttcttcttttttgtcaatcgttattaaattattgttcaaacgagccatttcttagaagagataataactttattaattactttcttattgtcatgtaaatttaagataaaagttaacgggcttttggtgcgtaaaatcttttattttcaaactttatgatacatacatttgaaattgaaccgtgaacatgatattattgtagtgaatagaaaatttaggaaaacatgaaattttgtcttattaaacttaaaataaataattgcatacagaaaaatattttttaaggattgttttgataatttattgcaattcaagggtaagaactgttggagcatgaatccaatatattccaatggagttatgtataaaccacaatgagattaactatatgaaatcatagttagggaaattaaagattaaggtttataaatgtattttggacaaaaagagcaataaaatacaagtaattaatatttttgcctagataacgtcaatacaatttgaacttcaaatgaacttggatggtaagatatattataagaaaagtttggagtagaaaatgttgaattataattcataatatttaaataatattttttgcctatcattgtttcagtaaaatctactgtatattcaaaagattttttttggaaaaaatctttattgttattatatttagatcacatcccatatttgaatcaaaaattattttcagtaattggaataaattcatttgaccctcgagaagatatattttaatataaattataaatattattattttggtactacaacaaggattaaaaccttattatgatattttgacatgtcgaaacaagttgatttagttaaaattgtgtggaaaaaaatttgtttatgatatatcgtgggctaattaaatttcggtgtgttgcaatgtatcatactcatttcagctttcttagctaaatattacttgtacttcaataactagtacaaaacaccaaaataccatgaccttgcttcttttgatattctctaataaaacccaacttggtttaaacatctctaaaatctgacttgattccaagattgaccaatcatctaccttcttgagatgcagcctcgtgattatacttcttgactcttcatctagtttctttagatgtagtcccatgatctttgaatgacgtacgacttctccccacatatcatttagaatcttcattagatacctagagattcctcctctatgcaacatcgattgaactctcttgaagtaaactcccctcctttatgggtacgaaaggttttaatagacaagccgacttgcttctctacaaactcttgaaaagcttttaaaccgattagaaacttgaatcaatatgtcaacaaagaaccatctcgttcttgttgactgattcaactcctcttcacatgctttccaccattaaagcacatctttagcctcttggctcattacttgtcgaaagttgacgtctcttacttttaacataagctt

SEQ ID NO: 1005 - DNA, 119091 bp, Arabidopsis thaliana
gaattctgcttttgaagtggaagataaaatctctcgaggcactggaagctcttctcgtggaggatgatgactgagttccaagtcttgaggaagatgattatctctcttctgattctgattctgatattgaatcttaatgctagacaaaagagttgacaaatctgtcctaaagaaaatgttttctgtttctcaaggtaaaagaaaatgttccattgaataattccaaactaaggcactaaccctgactattcagtggccatatagtgttaccaagaacaagtagtctcaacactagaatcagctattcagataatcaaaatgtaaagtgatcaaagtaaattcaaggtgaattaaaattactatcagaattagctgattatcatatcaaaatcaagtaatttaaagcaattccaagatagttcaagatcatacacgaactaatgaaaatttatatagcatcaataatcagagatacatcataaaaaaaaggaacagccttgttggatcttcagcaactagaaatctccattgtttatttctgcgaacgaatcttgttgatttcagatttagcgtaatcaagttgtttctgcgcagagattttcgctttctcggctgatgtgaggaagaagaggttaccgtttttctggtagatacttcgagaagaagagagactgctcaattcatctaacgaaacctcttgcctctttatctctttctcaagctcgaattcgcgatccgacgaagttgtagtcgccattttttccaccggtgcggcagcgactgcgacggaaactaaattttcttaggtttctagaaaaataaattaaaaagaaaaaattggtaaaagccagagtcccacatcggaaacaagttataagatgataggttttggtcgagtataaataaagcggctttgaggtgagaaaaatttatctttgcgcttggggcaatgacgcagctaatgaggttctaaccgaggcgcgtctattgctggttgaaaactatttccaaaccccctcctgggcctaagcttgtcttgggccttcgagaatttctggaagggctcccttcggggtaaagccctacaatctcccagttaaattttttattttgtataatgattagcttattgcctgttttacatttatcagtaatcatcttctattttgaagtctacattttgtccatgactaataaaccaattggttaagtactaatgttatcagaacttggtgcaccgatgtaccgatttatgcaaaaacaagtttaaacagcttactgatttgttctaaaactcgaatgttaggctaacaataggtaatttttcgaatttgttgtgatacttcctaacacagaaattctgtcaaataaagtacaaatatcaatagtccaaaaacttttgtttttatccgagtttgaagaggctacaaacaaacaaacaaatggacaagaatagagaatgaagctgagtttgaaacgcggattagtgcctcaggtaagagcgagagcgggttttcaaacctgctcctccttagacatctctccaaacgctgtaaccggaaagtttctcacatagtgcacaaatgacaaaggggaaaaaaatttgaaacaaacaaattggagaaatagaaagaaatgtgatcccgtcatggaaacgatgtctctttagtttagaagcattttctgtggacaatgcctggacctgcttcatcatactctgccttagagatccacatctgattacacacacacacacacacagaaaatgtaaaccattagaggagttgtctacatttaatcaaccacaagaagcaaaaacttagaaatgacagtccaattttacctgctggaaagtgctgagggaagcaaggatagaaccaccaatccagacactgtacttcctctcgggtggtgccacgaccttaatcttcatgctgctcggggcaagagctgtgatctctttgctcatacggtctgcaatacctgagaacatagttgtaccaccactgagcacaatgttaccgtaaaggtccttcctgatatcaacatcacacttcatgatcgagttgtaagttgtctcgtggatccctgcagcttccattccaacaaatgatggctggaaaaggacttctgggcacctgaatctctcagcaccgatcgtgatcacttgtccgtcgggtaattcatagttcttttcgatggaggagctggttttcgaggtctccatctcttgctcgtagtcgacagcgacaaaggaaagcttctccttgatgtctctcacaatttcccgttctgctgttgtggtgaacatgtaacctctctcggtaaggatcttcatgaggtaatcagtaaggtcacgaccagcaaggtcgagacggaggatagcatgtggaagtgagaaaccctcgtagataggcacagtgtgagacacaccatcaccagagtccaacacaatacctaaagaaaatcatttcactgtgatcaatatgacataatcattaaaaacagaaaacaaaactttgttcattttctcgacattaataatgaactaaccggttgtacgaccactggcgtaaagtgatagaacagcttgaatggcaacatacatagctggagaattaaaggtctcaaacatgatctgagtcatcttctctctgttggcttttgggttaagaggagcctcggtaagtagaaccgggtgctcttcaggagcaatacggagctcattgtagaaagtgtgatgccaaatcttctccatgtcatcccagttgctaacaacaccatgctcaatagggtatttcaatgtgaggatacctcttttggattgtgcttcatcaccaacatacgcatctttctgattcatcccaaccatgacaccatgatgtctaggtcgaccaacaacactggggaaaaccgctctgggagcatcatctccagcgaatccagcctgcacaaaggaacttgtatcaaatcttgccaaaattaagagaatccttaaagtaagaaagaagagactaaccttaaccattccagtaccattgtcacagacaataggttgaatgtcatcagcatcggccatggtctacgatctgcaatcaaaaacataaagatctgaatcttgatcgagaaaaccgaaaacacttgcttaatcaaaccaggcttttcattcatgagtagattcaattcaatgtatgatgtatctatcaatagaatcataatgaaagcagatttcaacgaatccatactcatcggaagacaaaatgttacagtcaataaatcaacagaatctgaagtcaaacttcaactaacatttcaaatttcagattcctattgacagaagaagcgaaaggatccggatcgatttcaaatacaacgcaagatcaagtcaaacatgaatcgttgagctaatcggagccaggatcaaaaatttccaatagtttgaccgatctaaattccaatcaaaatcaaatcggaaacaacttttgaagtaacttagaaatcgtaatcgagatccaacacaagaacaagtagatcggaggttttaattaccttaatcggaaaagcaaaagcagaagatcgagagatcgaggaagaaacaagaaccacgacgatgaagatctggctcactctttctcctctttctctctcttatcgccgggaaatgcaacggccgatgaagctgaagacgacgaggcaattcaaagaggggagaagaaataaaccgagtgttgaactatttatataggcgggtttatctgaaaaactatttttttttctttagagtcatcaattttggaaataattaaattcgacaaagacgaatcatttcgatcatacggaaaaagtataacgtgacatggctgtcagacagcctcttttatttatacttttttgaaaagtttgtgaaaatttgtgagccgttggatatatcagttggcgaatataggctattggattgactgtgatagggtcgacatatatgacagcttcaataatcattccttttttttttttattattcttttcatttttcttctaattttcaagtcggcgatcgggtgttaccgagtcgaggagacaacggtggtcgtgttttggattgtttattaaggaaaatccacgatttctacaaatgttatttctatattgaaaagggtacagttattttttttctcctgaaaacgtaaacaagtcctgaaatattttgatgattattttcagaagacaaacacataaaacgtaatgtcaggtgaatgtagtagacccatgtatatatccttttaaacatgaattatgcaagatgaaaaaaataaaaaaataaacatgaattatgcaaaagaaaaatggcttttgattgaaattactcatatttgacattaatatagagtgtgagaaaaaaatatagcattttgtaatataatttcactttttctcgtgattttgtttgtacttatgttgtttatgtaactatttgtattttgatagttctctataatatgtttggaaatttagtttgaataagtttggtgagaaaagaatacaaaatggtatgcaattttgaaaggaaaaagacataacaaaaagagaggataaaagtgataaatttctatagtagtattagacattataatttgataacaacttattcaaaaaaaaatacaaaaaacaaaaacaatttgacaacaacacataaaatggacaactttatcaataacttactaaggccacgatgaactactcctgtaacatgcgataagtttccatctattagctagtaaaatttactaaaatatttagaacattgtgtaggaaccattgattaatcactagacaattttatcacatgtatttttattttataattacatgatttttatttcataataaaacaaattacgtgttatgttatattgttacatattagatagaagtatgtgactctattatactttttagatagaagtatgtaactctattattagatagaagtatgtaaattttagagaaatttgggcttataatctacaaaaatattatatttaagaaactaacactccacaaaaaagtaacgtatattgtttgtattttttgtaataatggcaacattatccttgtttgagaaacacgctcatcatcttcttcttttcgcaggaacccaattcttctctttcaccaactgttaactttcaaacagagttttagctctaataagttgcagtccaccttttctgaaacttctaattttgccaacaatcagcagaggtatattgacgatggaagcaatgcaattaatttcctgaagtgacttatagggtttttgattaaattgaattggggttttgatttacagaggcaaaacttcaaattttacaaaatctaaattgggggtttcagattttgttgtttgggttccctaccattcttagggtttagttttctgtacttataaacaatttgatattttttcaaacaaagtaaagcttgaaagcgaaatatatgtatctttacattttgaattgtcgtattaactgctaaactattttcaccctcatctatatttttttgttttgtttgcaggacttttctttgatgatgctactgaaaattgcttggatgaaaacaacgtcacgttacccactcgtattcaattcttcgcctattccacgcgcttactatctctttcgttagaaggagtttgtgatctttttaccacacctaaatgttattcactacattatagatttgtagtgctatattctttatttcatctcctaaaaacgtcatttttgcaattcaccctaaattttattacactttttttctatataaaaaaaagaaaatcaaacatttgtaattaaaaaaatcataaacaatggtaaaattatcatatgttatttttttttatgcggaagcgttcaaacggaacatatattttggccggtttagtgataactttgatatgaaattatatgggaagtgatgtaaacatcagttaagagcacgaacgaaaattaatcccaaaccaccgctcaaggtcactttgacttcctattgatctctctaaattctctctctttaaaacgttttctttctttaattttttttctctttgtaatgtttacaaagatatcttttatatctttctcaaatcgtccttttatggacaaaagaagatgaaccatagagagacaagaatggttttagtctcttaatgaagtaacttcccaataatactgcttaactaaaacttgtttggtatgctgcaaatcgaccataaaccaacaagtttcctgacaacccaaaagcctaatgtcgtagttattcgtattaattacaaacacgggttaaattattaggtataacaaaaaaaaaaaattaccaacagatacaacataaataatcgtcgtattttaaaattatgcattcatttcgaatataaagttaattagttaatacaggacaaagaggtacacatcagatatacgaggcagtacttgttagctatatctcgtaatttgtcttggctttgagacacatccactacatttttcctttttctttttttgggtaaagtacccactagtccactacaatattataaaagtttgcaattatatatgtacaacagctcacctcagctcttcattgtgtaacaaaattgaattgaattttaagagatgggaacttttgtattgtagctaccaattatttatgtttttagttaaaagattaattgaggtgtcatgcaacattaccacttatgtggagagtccaaagaaccctaagaccacctctttgtaactttgttgcttgtcatcacttatgtaacgtttggtttttatctttaccagcctctttcttggagtctttaccattctgaccatctagtacagattagccatgggatgaataaccgatctgaaataaccaaattgggccgaaccaagattttagctgttcgctttgaaaagttacatgtccttaacagattggttaaatttgaattttacttcaattaaccaagtattttgctttagttcagttatcacttatcagttaactaaattatatgttgtttataaccagattataccacaattataccgttttttaccaaatttaaactagtttccatcgataacctagccaaaattaaactacccgaatctaaccgaagaaccaaaattattcaaatataatttaaaaatcggattagaaaataatcaaatattcggttaaattacattttggggataaaatttattttttagttatatatttttgatctatataagagagtggatggatataaaccacaaatatatgtacctacaataatgaatccaacaaaaggtagttacaatccacatgaggtaggtaccattaaaagaaaactacaaaatcttctatttttgttacgagggtaaatagaaatcaaaagatgtgtagaacccaagaaactgtcataactaaacttttaacgttggtccactaaccggagcaaaccggtagaaaaccggaaaagaaatagctgttgtgagatggaaatccaaaagtcaactttatgaaccatgtgtacagcacatgccgagagaaaattgagttggtagtactacccttaagaacgttgtgccccatcattatgaaactacattactcatgatcatgactatattaaactgacactccattgatatataataatacatatatataagttatatgaccggccacgttttgatataatatcggaaaaagtcaattaacaatcttttttgttattcttggttttacaacatgggttgtgaatggttacggcggttggggcggacacaaccgtcaatggatcaaaccgctttttatttttcattcatcaattatagtccgcagtggtccaaacaaaaaaaaaaagaaaaaacccgcagcggaccatctgcgaactatttttacatacaaataaacttgctccgcaacggtttattatccatcccaaaaatgaaatggactaaaccgcagataaattagaccgttttgtccgctgcctccattaatagcctatgtgtttttttcttttctcatgtggttgtaaataatttcttgtaatgagtggctcaccacattcattataacttgttaaaccaaatgtttataaactataaccaacaaagagatattttaaaaaatccctttctattttgatataagaaaaacacccgatttaggaaaaatgctaaatgggctttatataaatgggcccgttaaaagccgacccgagtggaaactatggaagatccgatattggtttcaagagagaatttctgaaaatcattggcgccaacaaagcgaacaatctctgaacattgctacttcgtcgtcttcagcagatcttcatcaacgaatacggtaagaaaattccccatttttcacatagttttctgggtattttcgtacagcttcatttgaacttcgtatctttgtctccttattgtcaatttgattggagcgaaacttgattttttcaatttcatgtactcttgtttacttcttcttgttcattgtttaatcccgatacgtaattagttcagaagataatctcatttggttgatgcaaagtttccccattttggtatctagggtttacaatttcgttcgtccacctcataacttgtttatcaatttctttatttggagattagtgaccatattgatgggagtttctagattactactaaggatctctctttagctagtcagtaaagtactgttacacgtactgctttttttaaagttctacttctaagtaattgatattgcagctcttcataatccattatctatgaaattgatcttggtaaatgccggttgttgaattattgtggtcactcattttcttcatgtggtcagtataacattgaacctccccttttagtattatttgatttgaccatatggtgggattcgtcctcggaccccattcgctttgtgctgtttcttatggtggtgacctctctctcttgttctcctttcgatggattatattattgcatgtttctctcatttgtgggccttgacatttttctccggggcttcgcattgtcacagcctacaacttaatttgttcaataacaaagcaagaagactcttctacctctggaagggtacattatgttattgtatgatttatataaaagtgtagtaacccttatgataatcagtaaaataagctagtggcagagcctgactttaataaccttgaaacttcataatggtaaagattatgacatctctctttagttgactaagtgtattggccacctccactaaactattgctttaagcctttcagtgattttccttctcatcatcctgtacatttgatttttgaattgtttatgttttgttttccagtgtgagtatttgcagatctaatgaaattttcctttattggcttgtaactgtgaaatataaacatttagtagttcaagatatgaagaaagtaacattctcgtaatatttacaactttacagttgaaatgctaaacttgtttttaagtgtagaccgcttgtaatctcaaataattctaaaacatagtagtttaatcatagctgctacaaatatctaggtgactagttctagttcacctaaaccagcgtatccatctttccggttctagtggtgctatttggagaatgatgctgtcttgtggtggttgagtagagtttaacgagcttgtttggctgcagtcggcaatcttctcgcatgtctggatgaggcagtgcctgcaggtgggacaggacgagtgtgaactaagccacttgtctatacaacggacatggaatccatggtggcatgtcggcaacagcttcacacgttcctcggctacaaattccgagagacagatagcacactcggtatctaagccaggcagatttagttcagtagagtaacttactgtctggaaactcttcaaggcttttcgtttgactcctgtgttggtcaagcgaacaggatagttgtcaccaccagcttcagatggtactaaattggagcacctcaaggcacatcttattatagaattgagtccaagtgagcaaacaagtgcacataagaggactgataggaccataacaacatttgcatcaaagttgttatcgcctacatatggggatggtgctggagttggtgattgatcatgggtatgaaatagtaattttcttgagtaagaacttccaagaatttcttgaaagatctcagttggttttatggtggaaatggaaatggaaatggtagtgcacatgataacttagttttaagatagattggtggctttctgtgtttccgttggaggttgtttatatagagtaaaggtttggaggctaattgtttatatagaggaaaggtaaagtttcaattttttttcagatatttaatgaggaatttttttttatatatttcatttagaaaaacttatggttggatgaataagaagctataaagatcaagctcacattatggacctttacctttagtgtctaattttataaaatcatttgcagcgtaatatgctttgttatataaaatgggtccatcataccagttgctgcaatagtagtgccatgtggctgtggccttagcaaatcatatctcccagaattgcttctagggacccatgagctttttaactggagcagccatgaactttccctatctttgatatagcagcattcaaatattaatatctcctggctcattttactgatatctcactgttccttgatattagcctgttagggcttataatatatgttttctacttatggtcttgatgaaaaccgagtttcggtagatagttctgacccagtgatatatcacatatgtgtctaacctgtaaaggagtttctcatatataaagcaaggtttgatttaacttttcttttctttccctttttgctattttttaacagtggtggaatcttaaaagttttgttgattttgtgcggttttgagagtgtacggatgaaatatttccatttagtgaactctacttatgtttggggaacaggaatccaccccattcgtagtaactcaagttgtccatagagtagccaaaaggacaaagcctctcccaatcaatcttgttaaaggctacttttatcactctcatagcattagtatccacctcctgcttttttttcagtaaacagtttctctctctctctttatctttacatgcctttgttttaaatcagaggtaaaggaattggtcccacggatgaacgaataaaaaatgattctttttgtttgctttatgagatatcttcttccattggttgcaaattgcgagggaaatctacatgaatctagtatctaatgtttttcttgtagctccaaaatcaaagcaagattctttgatatgtgcttttgtataacattgtttcttgctactttcctaatagctggtttagtgaaacattagattagggaagattgtgtatctttgggataaaaagttgatgttacacagtaggagatgcatcttttctatcttttctcaccagtctcactcggaaatggattccttttttcttttgtctgtgccattaggttacatataactggtacaaatatatatagtggtctgttttcttggtaccttctttaaagcaaataaactttacttttgttgtgttatatgctataatgattcgtttgttgggaatatcttaatttgatactcattcactttaaaactgcaggggtaacatggatgaagatgagaaatctgaacagacagaaagatcatccaaactaaaattggtcattcaccgtttttttttttgaatgatggaagtgaaatgttaccaacatatcgaggtgaaatcacacgacacgacttaaggtgaaataacgcaacttggtgagaatttgaaatatttctgagaacatttttgctggatgcatttatgatttggaaatggttttggatccagtgggtgttaagagccataagaaaagtttcagaaacattttaattatagttctctttggctagaaagttgaaatactgaaacacagagctttagtcctgtcttttaatcatttatgtaccattattgactttctttggtggaacctattctttaatcatttactctttggcgccatttctcagtgttcatcttttggtgaacttttgattaaatatatatttgttcttagttcctgctaaatatctataaaatatctttttggtcattcttcctactaaatatctgtaaagtaaatatttatttgatcattctccctacttaataatttctttctgtcaagtaaatatctatttgttcatagttcttactaatatctttttatcttttttgtcttgttcatggtaattgctattttgatgacttatgcgtgtggatcggttttgaggcatatagattaattattaagtgggttgattcatgtagatagatgtaattttgtttcacaaactttgtgcttttgtcattatcaagagtacatgggaccaggtctggaccataattccatatggtagactacacactgcttcttcacacaactaactcttggcattagttattgggaaaccatttattctgtctagtgacgttttggttcagtgtactgatatgacacataagaatatacgaccagcacttatcaatctttggttatcagatgaatcttgatgtttttggataagattgcaaaattcacattccaccgtaaaaatagttttacaaaggaagtttgatggactcatgagatgctactgaaaatgaaacataatcactctgtatacactttgtgctacaggtaaaaagaaagtcataaaaaaattagaagtacaaattctgaattgctgatggtttctgtctttctttgcatctagctgatttctctaatagtgtttactcttccttcaggttctagcggagcaatcatgacaataacgatctctgttggttctagaggagcaatcgtgacaattacgatctctgttggttctagaggaacaatcgtgacaattacgatctctgttggttctgccgtaactgaatcagcttgactgaagtcacctaatatcttttggcacgtctcaaccagacagtttctgcattttggacaagtcagatgttgttgaagccacttgtctatgcaacgaacatggaacccgtggttacacttggggagcagcctgagctgttcaccggaaacaaaatcagacaaacaaatgacacactcttcgtcaagccctggcaggttcatctcaggtgagtaactcacaactgggaacattctaagagctttcttcttgattcctttgtttgatgaaccccgtgttgacgaaagacttggtacaggctcggagatcatgaaacgtgtagaacgtctgagtgcacaacgaatgatgtaatgtaacccgaggcagcagataatgccacaaatgaggattgagagaagcatcataacattcccactgaggttgttctcatgggttatgagaggagatggtgcaaccgcaaaggctcgttgagtgttgtggtcaaatgggttgtgcagaagcagctttctagagacaaaaccgccaaggaattgttcttggaaggcttgagctgaagaaggtaactcatttgcagacatttttactctttgagaaagcttaaggtcaaagtcgcttctctatgctttgttggctttctttggttattgcttcttaagttctgaggaattcaaagttgtcttaaatatagctcgagatgcttactgattactgtggggactgagtattttatctaatactatttttctaagaaagtggggtttcttctttttagttttttttttcttcaaatgagacttgagtgctgattgtgccattggcccatacctcctccaaccctaagatgcttgtgtatagggactatcacttttccaacattaaatttggaaatcatttatttatgcccgactttaaattataaaactttgttttatcatttttgtcctgtgttgagtcttgataagctagattctatttgattaacgttattatatgtttaagtctgggtagtatttgcaaattttattctgataattcccaagtatctaaatgtctgcatgtatatggttctcttgaggtgaaataacatgagaattggaatatttctggaatactcaagtaagagtttggatccaatgggttttaaagtgtcattaaaaaaatttcaggaacgttataagtagagctcacttttgcaagaaactggaaatactgaaacacagagctttaatcctgtttttttagttatgcatgtaccattattgattttcaatctatgaatttctttggtggaacctattctttaatcatttactcttgaacgcctattctcagtgtttgtctctcggtgtacttttaagtacttttcctactaaatatctgttaagtaaatatctagttgttcatcgttcctgctaaatatctgttgagtaaatatctatttattcaacgttcgtactaaatatctatttgttcatcgttcctactaaatatcttttcttgtcatgataatgtagagaacttcggtatgtgctaggatgaataggcagagcctattgtgtagcagctcttttgctttataacggtatgtcgacgaaactttctttataatactattagcatagttacaatatatgttatattacaaaaaggttagacatgaatctatcttactgatcaaggtctttaggccaataagtggccaagattttcttaaagcactaagatagtattttgaaacattatcttctaaagctatcattgttctctagtgcttctgtatttacatacttttaacgcgtattaatataataggatagttctcccccaccaaaagaacattataataattgcgatagtagcagaaatttgaacatctttgttataaattacagctatgatctattgatatcctacagttgttccagtagttaactgaagtaaaatttatagattgttgagagagttgaacaattttagaccattgcatgttgaagtaagggcattacttaagctaaacctgcaatttatcacagcaaaagatgtgcttaggaaaactttgttgcagtttttgtacttacaaatacttcgttgcagttttcacaagctcaataacatattaccagatatgatttgataccatctaagatgcgtgtaatggacatatgctacctgtaaaccacagtcttctgttgttaaccaataacccttcttttttgtggaaaagctcaattactctattgaactctcattgttaagtggggctgtgcttattaattgaacttttcaacactttagttatatctcatccaataagaaatgcctaggatcttaagccctatttgaaccatcatatttttatgacatgttgcttcattttaaattgcaggatctccaaaatctcgtagttagttattttttatacaataggttgtggattgcaacttgtttggctgttttgaatcacccagtgatcaagattctgagtttggtatttggagaatctatgaaaacgactaagatatcaagtggtatatcactatatctagtgaacactccatgcattcttttatattagcataactttttttttttttttatcattaggccaactttgtagttttcttctgttttcatactaggagataggacttccaagatctgaatcgttacactaagccttttgttcgttcaattttcatgaaaatatcttgcagtagctagtgtacaatacccaagatgtgtgcctgttgtggggaaaagaagaacaatagagcaagtatattagatctagacaccacgatttgatacaaactttagtaccaatttgataagataaagggtgggtaagttgaggcatcaatacggtaactggtatcaaccctcagagtagagtaggagatgcttgtgataagaatccttggaagtttaaccgtatttggtttaataatggtgaatgatttctcacttatcttgcttcataccatcacttggattttggtgtatgaattttggggatggtatctacagatcaactctatgtttttacagtgtattttggcttggatatgtctggtgtcaaagttagatctcataagatgcgtttatcactgactggcggtttagattcttacaaggctatgcattccccaaagtagcttcaggtctaacttgaaacttatgttggttgtttttctctattattggttgggtccatattcctatggcatagtttatttctttatcattggggggaaggatcatctgacatgtgttatttgctatcccgatgtgtgtttattggttttgcggtatataggtagtttatgaagtgggtcgtgtcaagtagatagatacattttttcaatatcaagcatacacaagatgaggtctgcatcgtaaatgcatgcacttcatagactagacactgctgctttacacaaaccttagcatcattactttttggttctgtgtagagattgtgacacagaagaatatgattagacaccatttgttctgtctaatgactttttggttctgtgtagagattgtgacacataagaatatgattagcacttatcagtcttggttatagataattcttaatgtttttggatatgaatgcatagttgacatgccaccattacaaataactttgctaaaagaactttgatgaacccgtgagatgctcttgtaaagtgagattatattcgctctgtcgacactttgtgctacaggcaaaaagaaagacataaaagaatagaagtatctacctttctatggcttagaatctaaaatcttctatctaactgctgacagattctagattgatgttggtttctgcttttcttgcatctagctgctttctctaaaagtgtttactcttccttcaggttctagaggatcaatcctgacaattacgctctctgttggtgttgatgccattgaatcagcttgactgaagtcacctaatatcttttgacatgtctcaaccagacagtgtctgcatttcggacatgtcaaatgatgttgaagccacttgtctatgcaacgaacatggaacccatgattgcacttggggagcagcctgagctgttcaccagaaacaaaatccgacaaacaaatgacacactcttcaccaatcccgggcaagttcatctcacgtgagtaactcacgactgggaacatcctcagagctttcttcttgattcctttgtttgatgaacttcgtggtgttgaaagactggatataggctcagagatcatgaaacgtgaagaacgtctgaatgcacagcgaatgatgtaatgtaacccaaggcaacagatgatgccacagatgagaactgagagaagcatcagaacattccctttgaggttgttctcatgtgttatgagaggagatggtgcaaccgcaaatactcgaagagagttgtggtcaaatgggtcgtgcagaagaagctttctagtgacaaaactgccaaggaattgttcttgcaaggattgagctgaagcaggtaactcgtttgcagacatgttttactctttgaaaaagctttaaatcaaagtctgttctctctgcttttcttggctttgtttgcttattgcttttttaagttttggggaattcaaagtggtcttatatatagcatgagatgcttactgattacttaatggggactgagaattttataattggatagtaataattattgtttaagaaagtgtgttttcttctttttttcaaatgagagttgggagaatatgggacccagaaagagcttatccaattccatgaattcttgagtgctgattgtgtcgtttccccataccccctctaaccacaagatgcttgtgtcgggacattgaatatagaattagttctttttgtgttatatattagaaaactttctttaatcatgtttgtcctgtgttgattctttataagatggattttattttatgttgtgagtcagggtaatatctgcaaaatctattttgatctccctaagtagttacatgtctgccaaaatactcatgtaagagttttgctggatgcattcattatgtagaaatgctttggacccaatgggtttaaacttgagaaaagtttcagaaacattacactttggctagaaagttaaaatactgaaacacagagctttagtcctgtcttttaatcatctatgtaccattattgactttctttggtggaacctatttcaatcatgttctcttcaatgccatttttttggtgaacttttaagtaactatcattttgttcattgttcctactaaatatcttttctttctcttttgacaatgtagggaatagacttattgtgcacagttcttttgctttataacggtatgtcgcaaaactttctctaatttataattagcctagttttgaattatagctagtatatgtattataatacaaaaaagtgtagaaatgaatcttatcatattgattgaggtctttagtccaacaagtggccaggattttcttaaagcactaagatagtattttgaaacattatctcccaaagctaccagtgtcctctagtgcttctgtatttacattgttttacttataactctgtgaatagcagagtagatagttctcaccaacctaaagaacgttacaataattgcaatggcagttaactagtagcagaaatttgaacatctttattatattgatggcaattttgtagaaagtctcaattgttgagagagttgaacaattttagactactagctatttttgtaagggcattacttaagctaaatctgcaatttatcacggataaagttgtactaacaaaatactttatagcagtttttacactctcaatggcatatcattggatatgatctgatatccctcagatgcttaatggacaaatgttacctgttaaccacagtgttctattataaccaataacacttctttttggtgcacggcctcaatcactattaaattcccattttgttagtcgggtattacttattaattgaacttttgaacactttatttgtatctcatccaatcagaaatgcctaggatcttaagccttatttgaaccatcattgtttatgacatgtcttttgttttgataaccttgtttatgacttgttgcttccttttatattacaggatctccaaaatctcgtagttagaagatgtggtccttaactaaaccagtttagtaggtttgcttacaatgggttatggaatgctcaattataagattttgatatcttgataatatatgaaaatgacaaagatatcaagtggtatattcatgttgatcactcaatcttttcttttatatatgcacaagtttttttaatttatcatagagatggaattaaagtaagttaagtttgtagttttgtttttgtttgcatactacgagatagcagtgagtagatctgaatcgttaggcctagccttttctcggttcagctatcatgacaatatattgaacaaggtagtgtgcatacacacgatgtgcacctgtttcggagaaaaagtatataggagtatactaaatcttgacacaacatgcactacaatctgatatacctatttgataagatgtaggatgagtaaattttgaggcatcaaccgtcattttaacttgaaccttccactgtttggtttgatgttggtagatttatcctcactttaagattttggtgtgtgatcttgtggaaatgggttttctcgaccaggacggttcttacaaatcaattctacatctttgatagtatatcatggcatagctatgtctggtgtcaaggctatatcccataggatgggtttattacttgactggaggttgataatcttaaatgactatgcatccccaaactagcttttaggaattacctatatacttagatcggttggttttccttatcatgggttggttggttccatatcactttcctatggcaaagttgatttatttatcattgcaatgaagaatcctctggtatttcttatcttgatgactcatgtgttgattgatcgatagtgttttaagtgggttgagacaagtggataaatacattttttcttcacgaacttcgtccatatgtcactatcaagcatacatgagatcagatctgcaccgtatatgcatctagttgtctaaacactacttcacacaaaccttgccattcattactggaaaccatttgttctgtctactgaatgtgtaattctgtgtagtgattgtgacacatagaaatatatcacactctggtaatagatgattcttaatgtagtttacattccattgaaaattttactttctcaaaaagaagtttgatgaagtcgtgaaatattacttaaaagtggcatatattctctctgtaatctgtatacactttgtgctacaggcaaaaaagaaagacataaaaaaacattgaggtatccttctatagctaaagacatgaactaagctcagatcaaaaatctcctatctaactaaatcacgaattttgatttttgatggtttctgcctctcttggcatctagctgctttctcttaaaatgtttactcttccttcaggttccagaggagcaatcctgacaattacgctcgctgttggtgttgctgccacttgatcagcttgactgaagtcacctaagatcttttggcatgtctcaaccagacagtgtctgcattttggacaagtcaaatgttgttgaagccacttgtctatgcaacgaacatggaacccatggtggcacttaggtagcatcctaatctgttcaccggaaacaaaatctgacaaacaaatgacacactcttcgccaagccccggcaagttcatctcaggtgagtaactcacaactgggaacattctaagagctttcttattgattcctttgtttgatgaaccgcatggtgttgaaagaccggctataggctcagagatcatgaaacttgaagtacgtctgaatgcacaacgaatgatgtaatgtaacccgaggcaacagatgatgccacagatgaggactgagagaagcatcagaacatttccactgaggttgttctcatgggttatgagaggagatggtgcaactgcaaaggctctttgagtgttgtggtcaaatgggttgtgcagaagcagctttctagagacaaaaccgccaagggattgctcttggaaggcttgaactgaagaagaagctaattcatttgcagccatttttttagtctttgaaaaagctttggtctcttctctctgctttgcttggctttgtttggttattgcttcttaaggtctagaggaattcaatgtggtcttatatacaacttgagatgcttactggttactgagtggggactgagaattttataattggagtctaataattctgttcaagaaagtgcattttcttctttttttttttcaagtgagtcttgagagaatttgggacccataaagcttatccaaattcatgaatcattgagtgcttattgtgccatttggcccatacctctccaaccacaagatgcttgtgtagggactctcacttttccaacattgaattttctatcattactttttgtctcactttaaattggaaaactttgttttattgtcttgtgttgattcttgataagctggattttatttgatttccattattcagtgattgaagtttattttatttactttagatttttgttgttttttttatcaagaagaggaagattttgttgtatcttcctcgcagtttaatgctttgccgacaatatgtggtgtgtaaagtagtagtctttttgctttagcattaatatttctttgctctttccatgtgtatatgttttgttgcttaatagttcactttacttaaaaaatttagagaatggttgggtggtaatttcgattttaacattttaatttttggtatacttcataaaaataaaggctagctcctttcactatttctattgtttgctacttaaccaaatatatttgaatatgttgcatcatagtttaactcgattttaaaagtataaatgtttggagacttcataagaaaaattactacatccttctactattttgatttattgctacttaaccaaatagatatttgaatttgttgctccttctagttaccttttcattgttgagcttctaaaattttgaatcaaaattgagaaaataagtatgcgataatatttatttgcaaaacacgctattttaatatgacatgcatgttatctcttaaaatgacatgcaatttatacattattttagctatttgtaaaaaccaacggtctcttttagttatgattttgccaatttttagaccaaaatatttttatctacctaaaaaacttgtttttcacgaaattttagagagtttttatgcttttgaaagtttatttttaagtatatatatagcccgatcctctgatatgatttacgatcataagatcttccctaactttatatgatttacgaaatgtagggaaaaatatcagatcataagatctttttgacttttcctatgcttactaaactattttctctttacgggtaatatattgcaaaatctgttttggtatttcgaagtatctaaatgtcttcatataaatggttctgttgtttgtttatttgtttcatgttcttggtcggcatttgtttatttcttctatacctttcaagaaaaaggaacgtttataaatttatacgtttggatatgaactttgtcgctttcttcccctaaatttccccaaccttaacaccaagtcccatgtttcttagttcttaatgcgcttttttatttgtttcatgatcgttttatttaaatgtttaattcttctaaagttttctatgaatttattttttgggtgtttttctcttttcctttccggattcaatacgttataagctgataacaaataaataaagtattctcttttcgataacaaactaattttcttatcatcagtttatatgataaagaaactcttagaatttttataaaagttccaatccaaattagagttaaatcttgcaaaaaaataaaattggaagtaagtctttcttcacatgaaaaatactgaagctttgactaaacttgttcatatttaaaagttaactatgtggagttagtggaacaatggaacagaacaaggacttctacagttcgttttttgttagtattagtgtgtaattttgaataaatcatttaagtatagggataaacttctaagaaaagtaatatttaaatgcatatacagcatatatatcatgtagtaagtggaggtcggaataatgcatttcacttttaaccaagattatatttgtcagcaaattttgattactaagctagtatgcataccctttttcaattaaaaattatttacctgataaaatgattatattgattaaaagactttggagctatagtgctaacgaaatttgtggacaacaattagcccaccaaaagagaacaagtatgtgatccttcttcttttatctctttttttaatttgcactttcaattattttaatcagtgataatgtagtaaagccataataagtatttaacttctattttgatgcgccgtgacaagctaaatcctcggatttattacctccatcgtagtcgagaatcgtcataaagattttgcatctcacataaccacatgttttctgtaattgacatacatacatataagtagcgatcaacttgttgaaaaatactttcaaaagaacatgaccacatacttagaatagtacttgttgatcttgttttccttcttttatctttaagatttgaactttttcgttttttggattttcattgtttgttctaagatgtttttctttttgtttcatttttgagatctcctcatttcttaaatcttttaatttctctataactcatagatcttataattacccttttaacttttagaagaaacaaaaaaattctacataatttggtttctcctgtcaccataacgactctgcctttccataaaattcacaaccataccaatttctgaattgttatatgttttttcgaaacaaggttaattacaagaaccgttaacttctctcatgtacttttgatatcaaacatagttacgcgatcacacaaaagaaataactttataatatacgaaacaagagagttttaatgctttaggtttgtcgggatttgatcctaaattttaaactttacattacactttgctttcaccgagatgggtcatgtacacacgactgcccttctacatgcattgtcatataaaatatttgtataaatctccacttttttctttaggccctttgtaagaagacatcatcataatgattatataacaaagagaaagattttgtggtgagaaatattatgttcttttctaatatctttcaccacaatttcttctctatattatataatcacattatcattttcgtttaatttacattgatttttggtaatgaatatgagttcttttttctttaactcaccctttggtcatgttctatgcttaagatataatttcatgtattaaaaatagaactttaatttttttttgaataggatctcaaatattaatttccgaattggtcatgtttgtatagtgctcaagagtaatacgccaatctctttctatttcttcttgtaccaagaacatttgtgctatttttgtctattatcatctcgttagatcaaaaacttatctgttaccttttattttattttatgcaagctagtgtttagagtgttccaaccagttctttaactcaccaaacaccaaagtaaaatcttcacatatgactattttttttttccttcaaattaaaatctgtcatttttggtattcgtttcgaggattagaaaaataaataaaaactacgtacttatatggatattctaggaatcaaccaataatctagtatatattctcaaggatccttgtgcaccactcttcctcaagcttagcaacggttgctcgtgttaaaatgagcaactacaacaacgatatctcattatatctatatttttaatataatattaaattatattcaaaataaaattatcgattttataattaatgcaacgtttgatttaaatagaaatatagctgaaaatctaaagatcaaaagttgttaaatactggattcaaaccacatttgtagccttttgtcatatcttagcttccatctcccatcagtttgaatctcattatatatgtagctaaatattagggttgagacatgttgaatcaattaaaaacataaaacgtagaatcgacgaacattattcagttatatatatagtattggctttggaactgcaaatgttttgactaattaaggacatgatcaaaccccatatccgtttcttccggatgtattgaaatttctcttgtgggagtttttgtgttttgaaagttatatgttcttctctagactctagtctccagactctacccattatattggacatgatgggatcccatcttcaaatctttttgcttatgctttttatgtacttgttatatataaataactttagttttgttgataaataaagttcacattccaacaaataaccaaaaaactattcctgattccaatttttttatttatttttgcatatatgttatatcatgtacacgtctttagtaaagtgctctaattttataaattttaatcattcacgagaattagcaattcgttgattataaattagaatccagtttcttgttaataacattattattccataaaaaatctatgagaaaggaacaatgggtttatataatgagtttaaatgaaagaataatgaaacaatattgtgactcacaagggaagtcgcatattatttgtcatacatagactgccttaagtaaagagaagggctatatgactaattataattgtagccattgattagatactcttgtggatcatatggtaaacttggataagtgagttcaagatctgtcgcagagaggccagaggcttgaagaagttcttcattgttcatcaggtaattaaattgaggagaagactgatgttgctgttggtgatgatggtccaaatagggcaaaggaggcggaggattggttatgatctggttgttgttcattgtcaagaaaccattttgatattgattctgctggatttggttcaaagtggctggaccattcataaggtacgatggtattgttgtgttgacattgtctgaaccttggagagagggagctagtgtaccatacgcagtggcccaaccattcccttgtgtttgttgaggaatttggttttcttcaagattgatacggtgtttctgtacagcaacacaaattcaatgacttggaacttgtattatattggtatgtgaaaaaaccaacctaattcaatggtatacttgtcatgaaagaaacaatatttagcgtgtgtgtttttttctttacctgaagatgacttgccacattgcttctagtaattccttctatcctcatttcttgcaagcattcgacaagtacctttgggttagcttctgcattttgaaatccaaaaataattacataagaaccaacattaatcaagagattaatgaaagagttagctagagattaaagaaaagtttgattactttcgataccaccaattatttcgatggcttccagaaatttttggtgaagctcttcggtccacgtcatccgcggcttccgtggtttttttccttgtttcttttccatgttttgtatgccgttacctccgtttatggttatggaatcaaagtggtctcggtctaaaccgtcagtcggaaccagatgtgattgaaccggttgaaatacttcactccatgtcatccgcggtttctttgctgctttgttgaacatgttatcttcgttcatgatttgagaatagtcactgaattggctaaactcattggattgaaccagatctgattgaaccggttgaagtaattcgttccatgtcaatcgcgggttggttgctgatttgttgaacatgctatcttggttcatgctttgggaatatccattcactttgctgaactcgttggcttgaaccagacctgattgaaccggttgaatttcttcggtccacgtcaattgtggtttggttgctgctttgttgtacatgctatcttggttcatgatttgggaatagtcattgagttggccgaactcttttgtttgaaccagatttgattgaaccggttgaataacttctgtccacgtcattcgcggtttaggtggtgctttgttgaacatgttatcttggttcatgattggggaatagccattcacttggtcgaacttgttggcttgaaccagatctgactgaaccggttgaatttcttcggtccatgtgatcagcggtgtctcattgattattggttcatcttctacgatcttgaaatcagctttgacttggtctaaacggtcagagcgagccggatctgattgaaccggtggagcaacatccggtttaaagatcagcctcttccgtacaatgtgttgccatatattggccattacctcttctttaaccggtttcacaacatagtcacaagcaccgtaaaatgttgctttcatcacagattccgtttgattatcatcagacataactacacaaatatgaaatagattgtgttatttttctttagtaaaaacaaatttggtttaatttagttttaaaagtaaaaaagagagtttgagattcacatactcactacaggtaaatccaactttgaagtaatgctcttgagagcttgaagtccatcaattccaggcatatgaaaatcccaaatcacaatattgatttcatgtttgcagcttgtcaaaaacgcaagagctttttctgcatctgtctcaatagacactaaaacacaaaagaaaagaaaactgttataaaccctaaccctaacaactctctaaatcctcatagttagagagagagagagagagtgactcaccttgataagcgtattgtttcatgatttgtttcatgttgagtagagtggtgaaattggtgtcaacaacaaggacattagtattccccggaaattggctgagaagagaagtgatttcagatgtttctcgctccaaagagcgagtattatcttcatatccacttatctttcccaccaacattggaattgattttgtagagagagagagagagatatttttaagtgagagattatgtgtatgttgaagttgtatatgtcttattacaagaagtttcgatgcattttatagtacaaaaccagttgttcttatcatcaagaattgacaagtgtcgaaattaagctatgaaaactagttattattcaacaggtgtacattatacaatttatgagaaaatacataaaaaggaaatatagttacaacagaaaaaagaatacaactggtacttgtcgaaccaactaattcaattttattataaaaaaagaaaagaaaaaaaatgctattgaattttgccctttccatatatatgatatttatgctatagatttcttttcttaattaattgtaattatatagaaaatgaaagaaatccagaaaatgtgaaccaattttagagttttatattaaatgcttgacagtaaacaaacatttctaattaacttatagggatttacttccaaagataagacttttcccaaacgctcactgaaactaacattttcatatggaccatttgccaaaaaaaaaaaaaaaaaaaacatcttgttattgtcttagctagtgagctagagagatttgtgggggctgtttgttacttacttgtctatgaggcaaacacaatgacaaagctaaacgacggtggtgaagagtgaagactagatatacacgagacaagtcatcaagactaaaaaatactagcacaacgttaatatcttcaacgttaatatcttcaacgttaacaacttttttctcttaccattgtgtttttgtttctctcagaggcttcagagccaattccctttgttgttgtttctgtcataacgagatagagacatgtagatgaacaggcccttgtttgacgactctgaagtgatgtgacattattcaattgtacctatgacgaattttgttttattatggatgaaccaaagataagaaatctacttttatattcagttttttctcatcactttgagcatgttttacaaatttggttgaatttgaatagtttgattttaaatgttaagatggaaatgatatctagtattttttataaccatactgaatttgtggattttttatcattcatgtaatagttttagttcatccaagattcatggatgcagaatgcatatcatatgtaattcatgaactgaatattagtgcatgcattggaatgaaagtatactactatgcacttcgcatagtatctagctaatcaaaaatgtccaccaatattaatcaagaattaatgagttatatgaaaaaaacaataagtttggtgttaacataaataaataagtttcctgagtattttatgagatacaaaaatgcaaacaacttacatgtgatattttctttgataagtagttttaaagcgaaattttgaataaatagttgtttttgtaaatgaaaaacttcatttttgacaaaaataaaaaagaaataaataacttcattttggtttggaaactaatgattaacgataatatatatatatataatgacgcatataaattgccattagttattgttaggagaattagcgaatttagaatgtattacaagaagctcgattaaatcttatttataacggacaatattcggcgttgaagaaagaaaacaaatcaaaccctagttaaaaagacaataaaactcaaataacaaaaacatatcaaacacttaaagtccataaaattaatatataactaaaatgtcttaaaatagcgtaatgcattccatcacatattttttgtaatttttcaagacactttatagagttctcttaatgaacgagctatatataaaataataacaacgctaatatccaaagaaacccacaaaaattgagcaatgtgcagattgttttctagtgctagccccaaagattgtttaattcaaaaccaaataggataataacttctaattagggttttatgattcagtggagatgaaggaataccaaagaaattcacattattgaaaactcaccaaaccttttttattgtcataatattgaagctcggttatattttattcataacggaaaaaaaaaaacaaaccctaaccatgaaaatatgtttagttgaatatacgaggaaataaaactcaaaacccgaaaatgtgttgaacacgtaaattccattagatatttaagtaaaatgtcttaaaatagcgagatgcactctatcatttatctttttgtaaatatttacgatgcttcgatttatgatttttttttaataagcaagttatatattaaataacaacaacaaaattttccaaaaagaacacacaatggagcaatgtgtagattttctctagtgccttacctcaaagattgtctaattcaaaaccaaatatgataataactttcaattagggtttcctgattcagctgagatcaagttataccgaagaattttttacattattcaaacctcacaaatttgttttttttttgtcgtttgctatattgacactcgattgaatcttatttataagaagaagtattcaattgtgaagaaaaacaaaatcaaaacctagttattaaaggagataaaactctaaacacgaaaacatatcgtaaattcgattaaatattcaactagaaggacataaaacagcaatatgcactccatcaatgaatttttttatgatgtttcggttatgtctttttctttaataagaaagctatatattgaacaataaaacggaaattctaaaaagaacccacattggagcaaggtttagattttctctattccttacctcatagttcgtccaattaaaaatcaaagaggagaataactttcgattggggtttcctgatttagtggagatgaaggtacaccaaagatatttacattctttcaaaactcacaaagctttttttttggtcgtctgctacattatcatcatagatactttcgatctaattctattacaaataatgactactctattagatctagtgatatacaacacacgattctgcaaccaacacatagatattttattaaattgtttcacatgcaccatacaaacaatgtcaaattttacccctaaaaatttaaaaccattggacaaaacttgctgcacacaaaacctaatttctattcaaaatctaacggataaaatataaatataaatatatatatatatatatatataaattaaaacaaatccgttggattttgactttaatttaaacgcatgtttcttaagggaaatttttagaagattaaattttatatacacgatttaggatcttaaaatttggttggatttacattaccttttctggttttggtatggttttacggttattttgttgtaaccatataaaattgtatgtaatgtaactctcctaaagttcatttaaactacaatattctcaactaatgtacaagaacaacagattctagttttttttcttcttgttgttcattataatagagtgtgaagagtgatcattagaaagaaaaaaaatgtaattaacttcttactacaatgaaccatataaattggcgtaaattaaagaagtgagaagccaagtaagcaacgaagacttttctgtgagaacttatcttattctagtaataagtttacggtaacgaagggaagtcgtttataccgtaagctagtttcacgacgctttcgatttataccgtagacttttctgtgagaacttattttattctttacgaaaccagaaacgacgtcgtaacactaacattatccatttactaaaacctgacgcaagaggatctaacaacttcctttcaccaatttttgtttgaaacaaaggaaaataaagttgatctttctttggttgaagaagataatctctggaaaccaatgatgatgcttgatgattacatagcgaaatcgaagctcagtgagagtttaacctctacggtttggttagcgaagcacaagttaaccggcgaagaagcagtgatgaagtgtttcgacctctcgaagctcaatcgcaatctccgagactgtttaaacaacgaactggagtttctatcttctgttgatcatcccaatatcattcgtctcctccatgtttctcaagtactaacccaaaactgagtttttcaatatttcttgagtctatgaagaatatgattgatttgttttcttcaattttgcaggatgatgattttctcgttatggttttggaatattgtgatggaggaactttatcatcgtatattcaacgttatggtagagttgaagaagatatcgccaagagatttatgaagcaaattggtatctattgttatataggagaatgatttcactgcatttgcttcttcttgacttaatagtgtcatcaatgttttgatgaaggagctggtttggaaattattcatgataatcacattatccatagagacttgaaacctgaggtacttctagaattatagatactctggattcaagtttggttgtgaattgtgacaatagtatttgattggaacagaatattttaattgacggatctggtgatgatttggtgttgaagattgccgattttagtcttgcaaggtaaagttttttgaggaggaaagacatgcttatagtataaagatctttatatgtttcatgttcgtaagcagaaaactacatccgggcaagtatcttgaaacagtgtgtggttctccgttttacatggctcctgaagttcttcagtttcagagatacaatgaaaaggtgtgatattgtttttatgcagctccattgaatgataaggttttccagttttaaattcactgagaaacattgcaggctgatatgtggagtgtaggagcaatccttttcgagctacttcacgggtatccaccattccgtggtaataacaatgttcaggtgagatcttgaattagttagtagtattcttttatcaaaaagctccaatgcctttaacttaaaaaccttttaccactaaccataggttctaaggaacatcaaatctagtacagctcttccattctctcggcttattcttcaacagatgcatcctgattgcatcgacgtctgctcaagattgctttctattaacccaggtacagaaaaatctcatctgtttgcggctacactatgtacacatatcgctatatatattcagttcttggttaccattttctgcagttactcgtctctctttcgatgaattctacaaacacaagttcttgaggctatgattgatttgtccttgaggtaaaaagatgaagtcgtcttaaaacttctgttgaatccttgtatagattctcgtgcctgtatccatgtatataatttagttgaagcatgcattatatttgtatttcagctgagctagactgacatttaacctagcaaatatgtttttgattctcagagagctgccacactgggcatagaagattttccttttcttggccgtataaagaacagtagggtttgggtcaaggacacaacattttcttcaaggtatcttgaaatttatgtttccattatatccatagaagtggtggctcatatctaaattatactgcctttttttttttttttttctttcagatttgcggatctagttaattgattgtattattcatcagtattgggatacatccaataatattgagtcgtcttgtttcagacaacatggaacaagggaaagaaaagtggctacaattaacggaagacttcaatttgacctttcacaggttttttttgtccctaaccagtttaaatattgttggagtcatcattatattagatgctttattttcaaattaattgcaaaaccatcagccttcttcttcttttatatttttaggcaatgctaagagatcaatagttaagttcatactattgagtgtagaagattatagtttacaccattatgtttccatggtttctcagaattttgattttgttctattggtcacttctttcttgcagtaattgttctgtttctatttggtttcaactgttctttttctctgtttctagtccagtattagaatcttataaaaagataaaaacttaaattgcattcgtatttgctgttacaggatgcatacctcccacagaggcttcttgaaaacctgatgtatatttacaatactattgaaatggctcgtgtaactggagtccctacctcctaccttatttcaagaggagagagcatcaaggtaggtttcactaaattctgtcgcagcacactttctttgactaaggctgtctgagaagttatatatcttgggtctaggttctatctcaactacttaggaaagctaaacagaaaacctggttcttccaaatgctgagaagttggaacctgaacaaggaacttatgaaggtgcaactgtacgttggtggttttatatcccctacttacagttttacttattcttcgatcacttctaatattttgataaacatctccaatgatatatattcacactgttaacttcaaaatggtaaatcaggttttagaagcaagaactggtttctacgagccaattgctactctggattttgcttcgttgtactcgtaaatcatgatagcatataatctatggtactgcagcttagtattccatcaaacgcttttttttcttcttatatttattttccaacgtttgttgatgttatccatctattgttcaaagagcttattactgccatcttctcgtctttgaaggtgaaacctgaggatgcaaaaaaataaattcgacttacaccaaaattatgctaatcttaagaattattcactttttcattccaaagcccaaaccaaacccaaaagggccttttatcaaaagcctatttacaacatataaacccaaaaaggcctttcgtcgagaaaactaaaatggctccgacgaagaaaggaaagaagaccaaatcggcggcggaatcaacgacggtcacagaatcttcaagctttccgacgtgtttgcgtctccttacaccttcctccgtcgctatcaccatccatgcgaagccaggttccaaagccgcctccatcaccggtatatctcctcttccattcatcggttttgattttgtgtaaagtctcggattttattgattttggtttcctctctatgatctggagatgtgagcgacgaagcggtaggcgttcaaatcgacgcgccggctagagatggtgaagctaacgcagctcttctcgagtacatgagctctgtaaagtttctctttcttcgcagataaattttcacttttcaagttctttgaaattgtttatactctgttttgctctcatatctggatttggttctcagatagtttgataatgtcatgtagaattgtgtctctgtaatctttgatgaatttgattagctcttgttgagccactagtcataaaaaatatgcacttgtgagcttccgtggactaaaggaatcaaaccttaacttggaggatctttgttaagatatatgtaacatagttgttgctctgatttggattgctatggtttatatgctgctttaagtagtgagaattgtttgctgctgattttgagagataagattaagagatgaattctatcatcatattcatatcctgacttctaaaatgttatctttgataggtattgggggtgaaaagaagacaagtctctctcggttcgggatcgaagtctcgagataaagttgtgattgttgaggatatgacccaacagagtgtttttcaagctttgtcccaagcatcaaaacctacctaaagatctccaagcctgtaactaactatatggagaaactaaatcatcaaaagctaaatggttcatgttcacttaaggtacgaatggtttgaagagtttcaggatttgtgatagagatcattggtctgatattactatgagtccatgattaatgtcatgtaaatctatagactattgcttattatataacaaagctgtgtttagtctagtccccaattgatctgaagtcatggatggttttttgatgtgtttgttaatccttattttcatgtaaagtatttaggatggttttcttttctctcttgatccttatttgtctttgtatatttcaaccgtttttgacttttgaaccaatcaaaagagaagaaacaataatgggccaaaagaagataaaaatgggctatggagaatcacaagtccaatttctctgctcacaacttgaacaacaatattttttttttcctaaaaaacttgtacaacaaacttaaaaaacaataatatgagaattggaacaaaatccttttaagtttgtaagtctaatttcaagaaccaaaatacaaaagtaatatcaatttctcaatacagttataaaactacttgatttgtggattttatacgttttaaataataatggttggatattccttacgatttttttaattgattagttatgcgacgacccgtgccatgcaggttgaagtcactttcaatgatcgttgtctcataaattacaaagaacacagctattttgtttctatttcataatgaaaagcgaatatttgtctgttcagataccgatcaggtaagcgatgcttaaagccaccaaaagggattctaaagtaatcaatgatttgattaagaaaaaagtcagaaaacaatatccatttgagtatttccatgtcaccaattggtttataacttccaatgatcacatgccgcttgtaatatacatcacctaaccaagcgatcgactccaaaaacgaaaccgtatttattattatcttaagactatagtctatacaatatacattacataatcaagatgcccaattagatgttttaaaacaacaaaaagatcaataggcccaattatatcttatcttaataaaatgaaaaagcaattgcatgaggaattatggatatatataaattacatgggctaggttttttttatatacatataaatagtttggagagataaatcaggtggaaccaagtttgttgtttgtgtttcgattgaacaacactttaattatttaatctttccattgtctttgcgtcttcttcgatcaatttatcaaattagggttccaaccttttttcttttttttccccgttgtgtgttaagtcggcggaaaaacttagaacagaacaaaccatcatttttccaggtaaattatattctaatctcatgttcttgttaatatctgatttttgatgatcttcctatgcatgtttgtcattgcgtctttctcttacgtgatagatgttcgttgacgcgatttgaggtttatttaggttccttaatagatttaacaaaaagaaattctcggtcaataatatttatttgagctgatcaatcatttgctggagttagtttgtgttgtcgtcttcatatgaatctaaagggtatatatatgttttgcattctttgttatagaaatttgaagaatagataaaaaaagattaataagatatggaaggttcagaagatgcttctgcaattgttgaaccacctgacccagaagttcttgaaatcgacccaacttgtcgatatattcgggtaactacttcacctttatctcttccataattgttttaattctttgttaccaaatattaggctcgaccaaatatgccctgtttctccattttgttttcccttgacacattcaaatgtgtaaacctttcagtacaaagaagtaataggcaaaggcgcatccaagacagtgtatccctttctctgtttttctttacataatctctgtttttgttttacaatctgttattctgtgttatgtgacatcatagtttgtgctacgagaggatatgaaattcattatttctttaactctcttgaacaaataatcagttttaagggattcgacgaagtagatgggattgaagtagcgtggaatcaagtaaggatcgacgatcttttgcaatcaccagattgtctagagaggctatattccgaagtgcggcttttgaaatctctgaagcataaaaacatcataaggttttataactcgtggatcgatgacaagaacaagacggttaacataattaccgagttgttcacttcaggaagtctccggcagtatgtattttgctcatttttatactatcttgttatgtcgccgcgaaaatagcggttttggagttgtgtttaaagcagcgaaatcttggttttcttgaaggtaccgtaagaaacatagaaaggtgaatatgaaggctgtcaagtgttgggcgagacagattttaacgggattgaaatatctacatagtcaagatccgccgataatacaccgagatatcaaatgtgacaacatttttatcaacggtaatcatggagaagtgaaaataggagatcttggtttagctactgtcatggaacaagctaatgccaaaagtgtgattggtatgagcaatgctttttcttttatatagtttacaaattcgtttttctttgttttttttaggatctaaattgatagtgttatgttataaccaacaggaacaccggagtttatggcgcctgagctttacgatgagaactacaacgagctcgctgatatatattcgttcgggatgtgtatgttggaaatggtgacttttgaatatccttattgtgagtgtagaaactctgctcaaatctacaagaaagtttcatcggtaagttcgatattttcaaattgtttctaccattggttttatgatatcgaacaatatatgataatatgaatggataacttacttggtgagtcttttttttgtattctttacttaggggatcaaaccagcttcactatcaaaggttaaagatccagaggtaatgaaatttatcgagaaatgtttattgccagcttccgaaaggttatcggcagaggagcttttattggattcttttctcaatgtgaacggtttagttatgaacaatccattaccgcttcccgacattgtaatgccgaaagaaggatcattcggtgaacgttgtcttatgtctgaaggaccacctaatgctcggaatagaacgatgtcaatgaatcttgacgaagacaataaccttcctattgttatttcaagcaacaattcaggaacaaactgtattgaggttagacgggcaaagcgaggaaacttttttgtccttaaaggtgaagagaatgatgagaactctgtctcattaattcttcgtatagtcgatgaaaatggtaagagtcttttgcgtttatattttacaaaacatttcaccgaaaatgttagatgcatatacaatcagccaaaaattgcgtttggaaaattgcatattataccaaacttgattagttttgtcttctttttggcgtgtagggcgtgtgaggaacattcattttctattctttcaagaaggtgacactgcttctaatgtatctagtgagatggttgaacagcttgaattgacggataaaaacgtaaagtttatagcggaattgattgacgtgttactcgtcaatttgataccgaattggaaaaccgatgtagctgtcgatcatctaattcatccgcaacagaaccagagctccaaggataatcatcaaaacggtgcaagttctcaagctggtgaatccattagccactctttgtcctctgattattgcccacgatccgatgatgaggcaaacccgaccgtagctgcaacaacagaagatcaagaagcagagaaaccaggaagcttggaggaagaagaagaagatgagaggttaaaagaggagttagaaaagatagaagaacggttcagagaagagatgaaagagataacgaggaaaagagaagaagcaacaatggagaccaaaaatagatttttcgagaagaagatgcaacaagttgagtaaagtaaacaacagagcaacactctggttttggattcctctgttttgcttttctgtttttccatgttttattattttagttttggtcaaagagaaaaaagcttttgttgtttacttgtttcattgcaagtgtagaaagtttcctccataaaaaaaatagaaagtattttctaatggtaattgggatttacattatataaagcactaattgctgagataaaaccattcatcaggtatatatgtaaaactattctcgagataaaacaagaaagtgaatacacaattttcttgcctctattcataagaaataaacctgttttcattgtgtttatttaacaccaaaagcactcaaaattgaggcttaacattcagacaaaccgtaactatagaacataagaaaaacctaactattgaagaggttgcattatatcacaagtttaaaacaccaaagctcaagctgagtagcaaaaataggtctcttcttccgccaccaaaacctcaacaggaacgtctacaaaagccttgaccgccacaacgaccaccggaaaaacgaccaccgacgaaaagaccacgaccaccaccaggaccaaagacaggagtaccaaaacggctataaggttcctcatcagaagatgatccatccacagacatgctctctgcctgggctttacagagccaattttaacttcattatttgacctaaacaatgagatcaacagatccatcttctcttccattttatgaagacgaataccaaatccttccaacatctccatcgcatcagatattttcatctcagtcgtcatgtctttcttatctttctccaaattgtctgtaggcgtcgtgtccttaatcacagaaggagatgcttcagctttggttgcggatttattgtccatggagaagatgattagtagaacaacgcactagagctaggttaaaagagagaaattggagatcggcaaaaacccctaatcagctgcttaggaagaaaggtatttataagagtcttttatattctggcttggggcacaagagtcctttccttttattttatttacttttcccgttgttcattttttcaactaagcaagctttatctgggccgaggtgaggcccattaattgaattaaaagcccaaaataacaacaaaacattacctgattgtcggaaaatcagacggaaacaaaagaaatcaaaaatccgatggggaggaagaagggattgccggagttcgaagagtcggcgccggatggattcgatcctgagaatccgtacaaggatccggttgcgatggtggagatgagagaacacattgttcgtgagaaatggatccatatcgagaaggctaagatcttacgtgagaaggtcaaatggtgttaccgcgtcgaaggcgttaaccattaccagaagtgtcgtcatcttgttcagcagtatctcgatgccactcgcggcgttggttggggcaaagaccaccgtcctatctctcttcacggtgagtttttttcccggcgttctctctcacactggtgaaaatgcttagattgaaattcttagggtttcgtgtttttttccttagcctttgaattttgaattcagttactctttagtgtgtttgattgaatttgatttgaatttgatgtagagtggtctcaaaattcttcatgaatacctttgtgaaattgattcttcctttagatatatgtattgaattttttttgtttgtattgattttgtcaaaccaggtcctaagccagtagctgttgaagaagctgaatgatgttgtgtgcgtgattgatctttggtaagtaactggtgttgattagttatatagtgtgtattgcttagaagaggagaaaggttagactttctagcatgctttgtgtagacactatcttataactggacatgttatgtgaatctgtttgtggtaggagaaaattggaatatggatgtttggatagttatatgtatgaactgatcaggtcttagagtgacttagttttgcggaagttgtggatacactggttaattattgatatcaatctgactgcaatcacaaaggttaaagcttagtcatggactttcttcggtggttttagaaacaggacatgttttggaatgtatagaaatgaaattgatagatcttggagtgactcaattttggagacatatgggccgatattatagataccaatccgcttgcaattgcgtccatctttaatctgcaacagagctaaacctagtcacagaatttcattgatgaattaattatttgagatatgagatgttgtggactgtatgaagaaggatagagctccaacatttaggttttgattggtttaaacaatagttccaatagggttaaggcatatagtcaaaatctcaagttcaaattggattgatgatttttgtatttggttcaaagattttaaaggttttttcttgctccaatgacacaggtgagtgagagctttgattaccatacatgaatggagtctctgttgcaagttaatgctccacatcaaggttgttacttgatttatgcttttctgtttcgtaaaacatatattactaattggacttgggagttccaattggttaagctcagcttcgtttttcaaatgatttatatatatttttggcttgttgtacattgcgtccctgtttgtcgaaataatgaaattcccaagtacctttttgcatgcttgcaacttagtatatgtttttaagactttatctgataaaactaagaaagagttaactctaaaaacatcatactttccctttatttcaaaactgtaggaacatctttacttctttagtgttgtctaaatggattcatttctgaaatagttcatgaaatttttattaacctttaagtagtagttcaaacatctacggagtctattaccatatgttaaatggtgacaaagacaggtaaggaccacagacaaaatgagtcagaaaacaaaagactaacaaacaaaaagataaaacttagagatgggtaaggaaaagaagccataaaagacccaaaaacataatccaagtctaaccaataagatcgcaaagatatggatcaacttcggtacatgatgccaaatcatcactacagtgtcttttttccttgtacaacccaaccaaaaatgggtatggccaaacttcaataatacaccaagtgtttactcatctcaaattttactaccttttcttaagactaatctactctatataagtatgttcactaacccttaatgttaagattcaagaatattaaacatgtatagaacaagactcaaggaaacttgagctaaaaagtcatttctagtccctactgacataagaaagaagtgtcagtgaaaaaatcttctagattctaaaggaaaatgtctttgtctgatcccaacgaaaaagattattatatacctacctaagcaggctcctttgtcagtgcccattattctccatccctcttagcccttgtcttcttcattgtcccctttttctcactttaagatctttcttgttcttagcccatgacaagtcaccaaaatatcaaaatttcagaaagtatataaccattactctactgtttcctgataaacctccttttgtgccagtttcttcttctactttgatttcttctcatatctctgttttcatgttttgcgcagaaattatgatttcaaagtaccaagaagatgtcaagcagccacgagcttgcgaactttgtctgaacaaacacgcagtttggtactgtgcctccgatgatgctttcttgtgccatgtttgtgatgaatcagtgcattctgcaaaccatgtagcgacaaaacacgagagagtttgtcttagaacaaacgagatatcgaatgatgtgcgtgggggaacaacattaacctcggtttggcacagcgggtttcgaagaaaagcaagaactcctagatctcggtatgagaaaaagccacaacaaaagatagatgatgagagaagaagggaagatcctcgtgttcccgagattggaggcgaagtgatgtttttcataccagaagcaaatgatgatgatatgacttctcttgtgccagagtttgagggattcacagagatgggattcttcttgagcaaccacaatggtactgaagaaacaacgaaacaattcaactttgaagaagaagctgacacaatggaggatctatattacaatggagaagaagaagataaaactgatggagctgaagcatgtcctggacaatatttgatgagctgcaagaaagattacgacaatgtcataacggtttcagaaaagacagaagaaattgaagattgttatgagaataatgcaaggcatagactgaattacgaaaatgttatagcagcttgggataaacaagaatctcctagagatgtaaaaaacaacacaagtagcttccagctagttcctccagtaagcgcctaatcttccgagttcttacaaaaatgatattatattgtttcaaattgagaaaattgaacccaatctatcaaagaaacttattgtaatggttgttgattgcaggggatagaggagaagagagtaagaagtgagagagaagctagagtttggagatacagagataaaaggaagaatcgtttgttcgagaagaagataaggtacgaggttagaaaggttaacgccgacaaaaggccgagaatgaaaggtcgatttgtccgacgatctttagccatcgactcttagggaacagattctctcagtttcttctcctttgtgccaaataaaaaaaaggctactccaaagaaaccagaagctaatcaaaagaacaaaaaagctcatgtggaacatatttcgtagcttttgaatttatccctacaatgacatggttacaactttattcttaaatcaatttgagaatttaaatttcatactagtaaaagcttctcttatgaggtaaatctctttatataagcagttagttacaaaaaccaaaacgaattacaaacaacttgtaactcaaagatttgtagttttgtactaataccgttggccgtgtcaagaaagtattcataaaaacttatcgatccaatcagtagtaccattaaaccaactaaaatcatcatcctctggatctcctaataatccaagatcatccataggaaaatcttctaacttaaaatcatctatcaacggatcaaaatcaagtaaatcatcgacgaataagtccccattggtcgatacgattttggcatgttgattaactttagtgtgatccccaatcttaaatccaaatgttttctcctttcctactctatcattctccacaaaatcaaacttgaaatcatctacaatggaaataaattccactgaattgtaatccacccaaatatcatttgcttcaacagccgaatcaccaaaaatatcagcaattgacgatgtcatcaacggatcttccaacattttactaatcactccctcttcttcatgatcagcgttataaccacaaccaaatggcttctgatcagtaacaattctcttatttacctttttgcaattcgacttctcagtaacttccttctcttctggtttacgtacaccgcacggcttggtcaaatctactaggtctttttcctgtttaactaaacccaatcgttcatcaaactctcttttactcttttggtaagcttctgctgcttcttcttcagtaggaaacgttccaagccactttctcttcttctcaaacggatttcttatctccgccgcaaatttcccccacggcctccgtcgtacgcctttgaaacccgacgacgttttccggtttccggctgctttattccctgtagaattcgaaacgttctcataccttttgatcagcgtcgggacacagatctttgagacgtaacgtttcggtggttttggtttgatctgacggcgaggattattgccggagatagattcatcgtcgctagaggaatcggtggcgtctggatcattacagattacactaattgttttaatcaagttgagatcgatgttctcttctctgaaactgatcattgttctctctccgactaaactccggtactaagtaacagaatcttacaataaaaaccaaaaaaaaaacaatgtagtgttttgagttggtgatagagatagagattaaaaacctaaacatgggagaaaaacttgaacagaaaacatagttaagattcatcatcgtaccttgttatggagagtgtgtcaaaaataaaattcaaggagcttatggcaaagctaaggaagacgaaacatagaagacgttattaatagtttatgagaattgttttgttttcctttttaatttttgtttagatataatcataaaagtaaaatctgtagtaaatattaacgaggatatcggtaactaccatatctaaatttaccatttttttttttttgtgatagaaaaagaaagttaatattttagtaggaaaaaatggaaaattgggaattctctgatgatatattatagttctttttttctttggtcctaaaacttcaattgatatcacactctaatttttatttttttgtatttctcggagaataatttgtagactacacattaatgattaaataaaaagttttttattttcgatggagaaatcaaccatctaagtacggagaacacgtaaaattgggactatccagaatctcataggttaatctcaaccctcaacttatgattttgagaaaataacacacttttttttttttaacggcaaatcgattttattatatagttaaagtttacatgatacataagaaacattcaaaagcaacctgagaaaataatacacttattctatcaaaactagtagtgatttttttttttgttatattaacgagtttaattttcaaatcattagattattttttaagtcactacatcatagtatatatatttatcatcttatatgtataaaatgaaatttcaaaacttgataaacatgatccgattaagttgagaccttccagtttgagtgtgtcgataaacataaaatttttgttttaaacagtagattaaacttttaaaaagaccgtacaacaaaaagaaaaaacaaaacgcaaaaacgttacaaaaagaaagactaaagaaacaaaacaaaataaaaagcataatgagtagtattaatgagttatacattttcccattaacattttcacatttccccattaacgagttaatgagtcaaatctacttcttacgagtaagacgtctcttcttcttagatgatgtttctccaccatgaccaagaacagatccaatatctttcctcttattatcaacaagacaatttccatccatagacgaaaccggaacttcaaacctttccatttccttgagaacagcccgaagattatcggcttcgcgtaaagcaaaactcaccgtcttgcgttcaatcagtccttcaacatacttgtacaaaccgcatttcactccctctttcctacaaaaatcaagaactgcctcttcgtgcaaaacattgatggctacaccgaatgcagaaactggccagtacttgtctcggagacgaacaccagtatcactttctttcttcatgaccgcacgagctatctttagttcagagctatactcagcaaattgagcgttaaacgctcttatcatagccgattcagcagccgtcctaccttttgatgtcgctcgcctctttagcttctcgctgcgttgcacttccacaacggcttcaataccggcttttgttttcatccattaaacttcgtagatttgacggagattcatctcgtggcttagaggacaaatccctagtgagtttgccttggctaacacgctatcgcgtatatgggaagatactaaattatataatgacactgaattgaggcgagtgtgtgaaaaaagtagactattcagttgctgccttaataagtacgctgcttcattttcccaagagggataagaagcacgctgtttcattttcccataaagaaaacgaaagaaccgagtagtttagacttaagttatttatggattaaatataattctgtagtatattttaaaaataaaatgttactaaattgtattaaaaaaaatatagctttttgtatatatataagctgtttttataatttagcatagcatttgaaataaaaacagatttttgagtgtagctgacttctgaaagagattcattagccacacgatgcaaacctggcttgtagggctttgtcatagtgtcgttaatatgttacataatatattagagattaattaatagtatgttgtttttgttttaaaacttcctagacgaaaaccaaatcatgaaataaaatattgtatattgcaagtaaaagatacatttaattgttatcatataggaattttaaactgcatgtgtgaaaattcctctgtttttatagaactaaatcaaatgttagcattaattcaattatttttttaaacgttgttcaaggattgcatattttctaatacgtctgaccagtgtggttagagtctaaatggagtattcttgccgtgtaaccaaacaccgcatccatagatcttgatctccatttgggagattgcctctctagttggaacaagtgaactatcatcatcttttttctaacttctcttttttaaaatttttttttgaaaattgggtggttttcaaccttctttttcataaaaaaaatcagaatcattagagttggatacacgtctcaaaataacattctatatctctcgttgacatgttctccatatgctttaaaactaattataatcactcgcagtattaacttaccttatccgcatatatatatgttcatcgaatgaaaactatgaaggtaagggtcagctatatatgaagagatggagttgatcacttaacttaatgtccccaaacacaaatgaataattttctataccaacttgttagaagcatctattagggagtactattctttttgcttttggcacagagaacaacaaactttatacgatttttagagttaagctctttgaaataaaaccagtcggataacagaactttgaaatgacgcttacttatagccaaagtttcccatagggaaaaaccctaattaggctaaaggaaaaataattttgtattgaaatgttagaaaacggcgccttaatgttttgagttaatgttgtgaaattgcaaatgttagaaagttcagggttttctagacatattagtattttattttggccgttgacaatatatgggtttcgtttctttaactagtatccacttgatcagaacgtgatataaaataatattttggaacttaaaaagatgtcaagggtcgtgttatcctccagaaataggaaaaatggagaagtattttcatggagttttatgtgtgttcatcatcacagttgcttttatacatgttgttcaggctcaagatccaaacggtattatctttaaacctttgaaattaagaaacactcttcatgttctttttcttaatttgttttttccttttctgataattcctttacattgatccccttattaggatttttgttttggtttaatgttttattaggattcatcactttggattgtggtctgttacctgatggatctccatataccaatccatctactggattaacattcacttcggattctagtttcatcgagagtggaaagaatggccgagtcagtaaggactctgagcgaaacttcgaaaaagcttttgtaactctaagatactttccagatggagagcggaactgttataacctgaatgtcacacaaggaacaaattacttgattagagcagctttcttatatggaaattacgatggtcttaatactgtcccaaactttgatctatttattggccctaataaggtgacaacagtgaattttaatgcaaccggaggtggtgtgttcgtggagataattcacatgtcaaggtcaacccctttggatatttgtcttgttaagacaggaacaactacaccgatgatatcaaccttggagctacgacctttgagaagtgatacttacattagtgccattgggagctccttgctcctctattttagaggttatcttaatgattcaggtgtcgttttacggtacgtaaactttaatttgtgaaatgaatctttttcttggatcttggtataaaagataatgagtaaatataaaaatatttttaatctttctttgatgccaaacatctttgaggttttgtctagctatgtctaatacaagatacgtataggtaccccgatgatgtcaacgaccgtagatggttcccattctcatataaggagtggaaaattgtaaccacaactctcaatgtaaacacttcaaatggttttgatctaccacaaggtgcaatggcatcggctgcaacccgtgttaatgataatgggacatgggaatttccatggagcttagaggattctaccacacggtttcacatttaccttcacttcgcagagcttcaaactttgttagccaacgagactagagaattcaatgttttgctgaatggaaaagtttattatggaccttatagtcctaaaatgttaagtatagatactatgagcccccaacccgattcgacattgacatgtaaaggaggaagttgcctcttgcagctagtgaagacaacaaagtcaactcttcctcctctcatcaatgctattgaactttttactgttgttgagtttcctcaatcagaaacaaaccaagatgaaggttcgtaaatttacatttttcatacatatgaattgtagctttgaatgtgtttgattcttgatatattattaactatgaaattctagtgattgctatcaagaagatccaacttacttatggattgagtagaattaactggcaaggagatccatgtgtccccgagcagtttttgtgggctggtttgaagtgcagcaatattaatagttccactccaccaacaatcactttcttgtaagatttttcaatcaccataaccgtatcataattaaaattaaattctctattctaaatatatcacaattgaaacattctattttcatgaatgtatcactagaaacttgtcttcaagtggactaaccgggatcatttcaccttccatccagaatttgacccatttacaagagttgtaagtatcacacaaacacatgaacaaaagcaaacattttctgttttcttctgtgatttctgtgatggagcttttcttttaaaacaatatcaaatggcagggatttgtcaaataacgacttgaccggggatgtgcctgagtttctagctgacataaaatcgctcttgatcatgtaagtctcttaagacagtatgaaacataataatgtgttttaactatttttataagttgtctccttgtattattattatttttttttttaattatttttttttttttgataaacagttgtctccttgtattatatatctcttttttataccttaacagaaacttaagtggaaacaattttagcggtcaacttcctcaaaagcttatagataagaaaagactgaagctgaagtaagtatttattacattgatcttcagttgatgattatcataggtctgatcaataaaatatataatgaaattttaattcatagtgttgaaggaaaccctaagcttctttgcacaaaaggaccatgtggaaataaacctggagaaggtggacatcccaaaaagagtataattgtaccggttgtctcatcagttgctttaatagctattcttatagctgcattggttttgtttttggttcttagaaagaaaaatccatcaaggagtaaaggtatttatggtgaacgcataagctcttataattactatacactagtagaaactatacaaaatctatgaaatttttatattgcagaaaatggtagaacttcaagatcatccgagccaccaagaataacaaaaaagaaaaagtttacttacgtggaagttactgaaatgacaaataactttagaagtgttcttgggaaaggagggttcggtatggtttatcatggatatgtaaatggtagagagcaagttgctgttaaagtactctcacacgcttcaaaacatggccataaacaattcaaagcagaggtacttataacaccaaaatattcctctatgcaagtgtcttttgttagttttcaataaatatggaccatagatttgaaatatatgtgtgcttttgtggttcattaggttgaacttcttttgagagttcatcacaagaatttggtaagcctagttggatactgcgaaaaagggaaggaattggctcttgtctacgaatacatggctaatggagacttaaaagagtttttctcaggtaaaccaaatttaagtattataccagacacctaatcttaatccattttcgatggaacaaaaacatgtaacaaatcattcttggtcataagttaacgtcctggttaaaaaacacccagggaagcgtggtgatgatgttttaaggtgggaaactagattacaaatagcagtggaggccgcacaaggttagtaaagccttatatatgaacctattattctcttaaaactttagttttgtatgacatatataggtccaaatgaatttgtgacactaggtttggagtacttgcataaaggatgtagaccaccaattgttcatagagatgtcaaaaccgcaaacatattattggatgaacacttccaagccaaacttgctgactttgggctttcgagatcatttctaaacgaaggagaaagtcatgtctcgacagttgttgcaggaactattggttaccttgatccagagtatatacttaacacacattgttttattcttaattcaaatgattagaaacaatttcaacatattttacataatgtcttgcagatattacagaacaaattggttgacagagaagagtgatgtgtatagttttggggtcgttttattggagatcataacaaatcagcgcgtgattgagcggactcgagaaaagccacacatagcagaatgggtgaatttaatgattaccaaaggagatattagaaaaattgtagatccaaatctcaagggagattaccattctgattctgtttggaagtttgtggagctagcaatgacttgtgtaaatgattcttcagcgacaagaccgaccatgactcaagttgttaccgaactaaccgaatgtgtaactttagaaaactcaaggggagggaaaagtcagaacatgggttcaacgagttcaagcgaagtgaccatgacctttgataccgaagtgaaccctgtggctcgctagactgcgcaaggaaaatatcggttgcattacattatgtacattcacataaagcaaaaatattttttgcatgatttctttgattttactattgccaatagaaggtaaatttgatgcattccttcatagatgtaccgtgtacgtaatagttctgtataacaaataaagaacaaaaggcctagatatggcacattgcagttctgatccgtcctgcttgtttctttgattaataaagaatttgtttgcaaactagtacaaaacttaattataaaggtagtacagtcactattcacaattagtaatatagtcagggttttactgtttgtgaaatagaaaacttgtgagatagaaaagaaagtggggtagagggtatagaaaggaaattacaaacaagggctttttgttgggtgagaaagagagagacgtgtatagagtttgtttagtgggtctgttttttttttaaatttatttttctttctttactacatttcatcccttctaagtttaataactaaaatcttcatttgtaaattttatttttctaaaatttatcataaaataaaaaatctatattttcttctctataatttgatatgcattttgtttcatgattttctaaatttttattacaaagcactttacaacagtctaacgacaaaattatctgtacagcataatatctgtacaaatatatgtacaacagtttaacgacaaagttatattttcgtttgtatccatcccctttattttcgtagtcatactgtacaattttcagaatttcaaaacagatgtacagtttactctgaatttcgaaacagctatacaaaatactattatgggtaatatattgtatattgctcgtgtgttgattcagatggatgattatgccaaagtatagctacaaaatcacctaacagtcaaaatttaaaataattgttccaacataaatatttcgtatcgtgaaaagtataactttctttttaaacaaagacggtgattgcattaactcgtatcaaatcaataccatggccaacttaatgcattaactttcaaatcaatatgagattgcattcactttctttttgggtcttcaaaaagttcaaaaacctcaagtgatttctctacttaaattatccttataatctgaaaaaagagattaatcaacttcttaaattcttcttatggttttggtttacttttacttttacatgaataatacagaaaagagctatacattcatcagtaatacttgccattttgaaagaagttcaggtaatttgcacaatgttttctgtacatcgctatctgtacaccgctatatgtacaccgctatctgtacagctatatatgtatagatattatttgtacagtactcagtaatataaaaattaaaaataattaaacaaaatgtatatcaaataatagagaaaaaaatattttttttgtttatatgatcaattttttaaaagtaaaatttacaaatgaatattttaactattaaactttgcatggatgaaatgtaataaagaaagaaaaaaaaaaaattaaattagaaaagtctggcccacttctctctctcaccctctctctctttctcaaacgctctctttctttctagggaaatttgcaaatataaccaagaaaaatttaataatttagaaactaacacttcaaaaacaaatagatgatattgtgtgtattatatgtaataaatacaattctatcctcttcttcctctttcttctgcgtgaaacatcttctctcttccttctccttttctttcactaccaccacaaccaccactacctttaaagccattgtcgccggaaaatcgtatccggagccaccatcgtcggaaaatcatcactggagccaccatcaccatcattctattctattaaaattttggattgaaaattgaaacttgagatgatatcatttcgtttaatgatttttgtttgggttccatgtatagtatcttagggtttagttttattagatcaataggtgtttgtaattagattgggataaacataattattttttctggaaaaaattcttggattgaggagaagacaagaaccgggaagaaggtgaaggaaagagtgtgttgtattttcacacctcacatgtgctactcaataaattatgtatattatagtgttagatatttaataactttatgtagattggttattcacctaattcacccttctttctaacgcccaaacaaaaaacttttttttatttttttatttttaatgtgtaaaatatgtatatggcattgtcgtaaatataagaaacatctggggattacaatgtcttcaaaacagtagagcacagtaaaacatgaggaatttgccaattgtaaatagagtatctgtattagttttctaattaagtttgaaaaatatactaaattccaacatatctctaaaatcaaatgagtgcaaacatcactactggttattgaaacttgaaagcaagccacgtaataatttgtattatgatgaacacaagaaccagaaacaagctcatgaagaaaacacagtagacgctaaaaggggaaactaggtgggattacaataccttgaattgcttaccaatcggatcaaaccctaaaaagcttacccaatctacgaacatacgcactacgcagtttaggtaaaattgcatactgtcactacaagaaaattgccatttaccgactacagtattagtcactctgtagtcgttaaactcctatttacgacaaataaacgactattaaaattagtcgctaatcgagagtcgctaaataacgtaatcgtattttagtcgcaaaagagcgacaaagttacgactaagtttgggtaatcgcttttttagtgacattttagtcgttaaatttagcgactattagacgacaaattaacgattaacttgagggttatttagtcgttgtaggaaattagtcgttaaaatttacgactacgttgtcactaaatttagcgactattagacgacaaattaacgattaacttgagggttatttagtcgttgttggtaattagtcgttaaaatttacgactacgttgtcactatttttaagactgatttgcgactaaaatagcatttagtcggaaatttttgtgactgaattgttataaataaacgactgcttggttacatttttgatgactaaatttgcgactattgttgttattagaacatctatatgattgttataatgattgaaaccttcctgagaaaacaaaactttacaataagcataaacacaatacaagaagcatgaaaacaaatttattgtcatttcagaaaagtacaaaacccaaattacagaaacatgttcgattcactacaacttagaattttgttcagcataagcacaagcaacacaagtacacatataaaaactttgagccttgatattgagtcttgaggaaggagttaagattcagacctatgaagcagatgaagagggagaggcagctggagagggtgagataggatctgtggttgtctccttagctgaatgagattcgaggaaattgaggaaccgaggatcattttcgcgcaaaaacttctccactaaggacaagtgctcaagcttcttcttctgctcatctgcagctcgggaattctcagcttcacgcctctgattgtaagagacctgctcttctatcttgcgttgagcttcaagtaattgttcttgcaaagccacaaaagaagttgagtcacctgcttgcttccgcttgccattgacaagagactctttgaggcttcctactccataaggaacgcctcttgaatccctctcagtggactgcatagtatgataaaagctgagattagagactgaaaaagacaactcaaaaacactaaattgggaaacataaaacgttacctgaagaaatatggttgtacattcctcagctgtgagctcccgtacccgcgaagtgccatctgaaacagcagaagcttcagcctcgagctcagactgcctcagctgcaaattcttctgatataactctgcaatcttctctgcctttcgatcaacatacgtcccatcaggttttgtatgtgttttaatgaaaacgtcaccaatactgacagttttgcccaattggtcttcctgtaatgaaaaaaaaaacaagtcatagaaaagtacattgaaacatcgagttaaagttgcaaaggagtaaacagagagaagacttaccaattcgtcccggatttgatgatatgacttagaccctgagaagtgtatgtgaggacctagaccgttacggtcagacatacgggcatttgaatagatttgacttctttcctgagcttcttcagtgtcccagtacgcagtcatttccttccatagagttttcccaatccatttaggtttctttcgactagttcttacagtgctaaccatgcctttcattcgccttaaacagatctcgttgaagtaaaactgaacagtccctgtgatcaaaggatcccaatggtgtgttttctacaaatagaaaaggtaatgtcagtaaaaaaaagaagtgtaatcaactatataaaagaagggctgaaagaacacttaacagcaaactcgaggaagtatttctcttgtctctcttgaggcacacatgtccagctgtagtagggaccatcaaacttgtttgtaaacactctagtgatattcctaacaagtcgtgagtttgtgtcccgagtaaacctccatacacaagaaaaacaagcagttatatatggcagaaaatatctaaatatcagaccaaagactaggaaaacataaattgtggctgcaaagtacaaacagatcatatagagcagaacatagattgtggctgcaaagtatcatctagaactaaacttacacaatgacagacacgatactttgcagccacaagcagttgttctcgcaaacaacaagtagagtagagacctagacgacaaggctcttcaaacacattgcaatagattgtggctgcaaagaacatcaaaatatcaaagaccaaagaccaacacaacacgagactaaaacaaagaatcaattcagacattttctcaatctaatcaatctcacaaagctcattactcaactaaaccctaagatcaaaacacaacttaacaaaacatgttctcgcaaacaacaaaataagaccaacacaacaagactcttcaaacaacagaatagattgtggctgcaaagtaacatctataatatcaaagactttcagaccaacacaacacgtcacaaagatcattacccaactaaaccctaataacaaaacacataacttaaatcctaagaacaaaactttcagactttcagaccaacacaacacgagacacaacaaagaatcatttcagacattttctcaatctaatcaatctcacaaagctcattactcaactaaaccctaagatcaaaacacaacttaaactacttgttctcgcaaacaacaaaataagaccaacacaacaagactcttcaaacatgagaatagattgtggctgcaaagtaacatctataatatcaaggactttcagaccaacacaacaaagaatcaattcagatattttcttaatctaatcaatctcacaaagctcattagtcaactaaaccctaattgaacacaacatgggatcacaaacaagagaagaagaagatcataccaggtggtattcggtcgaggaatgggagagaggacggtgacgaacttatccctctccggcaacataagaagatcgtttagggattgaagtgtgtcctcctggagatccggcgacagaggtggatattcttcgaagttgttgccttgagaggatgggtgactgtgagcccgagactcttgaactacagaaggcggagggtcttgctgagaaggcggagggtcttgttgaggagccggaggaacctgctgagtagtcgcggcttgatttgcaggattgttctgcacttccacggaggcagacctttgcacttcaggttgtcgactgccagagtgctggaacaactgcagaggcggcggatagttccgaacatgagctgccgttgcctgtaaaggaggaccggcgtcttctgatgcaggcgtctgtagctgaggcgaccgttctgctgccggcgtgaaatcgtactgggacggaagagaacgaggtcgtcgaccagccgtggatgtggaggctctctgagcaaggttaggactggttcgcttcttttttcctcgcccaaacatgatattaaggagagatctagatgagacagaggttcaaatcgatgaaatcgaagaagaagaagagatttaagagaaaaacgaagaggaaagattgatttggtagggtttcaaagaggaaatcgaagagagagattgaagaagaagaagactgcagatgtttggtagagagattaagaggaaaatcgaagaggaagagagaaatttgctagggtttcgcagaggaaatcgaagaggaagagagaaatcgaagaagaaggctgcggatgtttcgaagagaaagagatggaacttagggttttgacattgaaagggattgggcctaatgggtttgggcctaaaaagttctcgaaatttaaacattagtcgctatattgtcacatattagtcaccaattttgggcctcgaaatttttggcccaataatttttatgtagtcgctaaattgtcacaaattagtcgccatatttgggcctcgagttattttggcccaatagaatggttatagtcgctaaattgtcacaaattagtcaccctatttgggcctcgagttattttggcccaatacaatggttagtcgctaaattgtcacaaattagtcgctttatttaatttttaataattgggtttgggccttgtgtttttttgggccatagatattcaaaaatagtaattatctataataaaaatataaataaacataacatacttaatcaaatatagtttttcaaaataatttaaaaatgtttgcatagtatttcaaaataacttaagtacatatcataattactagaaataacttaagtacatatcataaacacaaaactaatattgttcttcgtcttgttgttcttcatcatcagaagacgataaattacatcgaaattcatcttctggatcagcatctccagcatctaaatcgaggtttatggggttgcgattgattgtcaaattgtcgagtataagatcttctattgttgttattaaaacagcatcatcattttctgtttgcaataaactcgggtctttattttcatattcttctaatatgtttccccttagatttacttttaaaacattgagccactcccgctttggttttttcgtgtatggataggaataaagcacacttgttccgcttgagatgctgtttgtaaatgcaccatatttagagaattagatatttgtatatgaactagaaaaactaaatgaccatatatatataccatacgtacctaaaataaagggttcgtatttgttatatttcctcgatgaaagaacgtcgacaacaccactattgctcctccgagtacctcttccgagcttagggtcataccacgaacatttaaaaagtgtgattttcaaactgaccaccccctcatactcaagttctatgatatcagttaagttgccgtaaaaatctgctgcgtcagatgcatccgtataattttcacctttcacacatacaccatagttacaagtcttacgtcctgctccatgactctgcgtatgaaaaaaaatagcctcttgtaaaatacattggccatgttttgactttgtgcaaaggtccattgactatctcttgaacccaagttggaaaaggattactagagttccaatatgtaacctgtatgcaaatttagaaataaacatcattatagagataagaataacaataaataaatgcaaatcatatatattataaactatttagacatatataatctttcacccacacatgatattcctcgtttcttttcacgaagagttctttttcgttcaatcctggatatttaatagaaagaaaatcttcgaacatactatataaagacaaaaacaacatataagggttagtaaacaaacatttatataattaacttaaaatgggagtatgactttgttatatacctctcaattacttgaaaataatcacaattccgtataacatatccatgtgcgcattgatagtcttcctctgatagccatacttcacgtatttctccacttggacgaccaacagaactaaatatagtaggtactccaggaacatgatatacaggaacttcaccctcattgaatcttgttaacctgatccaaaagaggtaattcatggttatttttgcgcattgaaaacttgcatcacatcgataattcatggttaccttgattttgtttgtatatcatcggcaaagtagtgctctgagaaataagaaatctcgtcattgatatatgactcaacaattgatccggctgcatatcttttattttttgcttttcctttcaactttttgaaaaacctctcaaaaggatacatccacctatattggacaggaccgcccaattctgcttcgtaggggagatgtataggcaggtgctccataacatcaaaaaatgatggtgggaagatcttctctaagttgcatatgatcaaaacaatgttctgcttaagaatttgaacgtgacttttctgcaaagttctcgaacataagtccctaaaaaatgcgccaacccctggaaaaaaaaaatcatcatctcaagtgcatatatgatataaagagtaaattatattcttattttacctgataatgcaaggtgaacgttccggtcgaggagttctgcaaagataaatggaagtaatcgctccataaaaacatggcaatcatgactcttcatacctgataacttcccattctccatatcaacacaactactcaaatcagacgaataaccatcagggaatttgattgcatgtttaacacattgcaataaactcattttggcttcatttgtcaatgtataagctggaaatggagcttttctcttactatcaatatgtaagtcaggccgagaacaaaatcgttctatatccattcttgccattatgttgtcctttgatttacccttcacgctcataagagtattcattatgttatccaaaaaattcttctctgtatgcatcacatcgatacaatgtcggagattcagatccttccaatatggaagctcccataatatgctttccttgtgccaattatgttccttcccatagcctggcatcttcttttcgtgaccgttgccaccaacatccttggttcttggtggatttacaccagacaaccgctcgtaataaatttgctcaccggttaaagactcaggtggatactcggtagaagcgtcttttccttttcggaagtcttttttgttcttccgtaatggatgaccatgagaaagaaatcttcggtgacaatcaaaccagcacgtcttccttccattaggtagataaaaagagttagtactttccatgcaaattggacaagacagtttaccgtgggttgtccatcctgataacatgctgtacgccggaaagtcgcttatcgtccacagcaacactgcttttagattaaaattttgattcaaagacacatcatatgcatcgattccagtagaccataactcttttagctcctcaataagaggttggaggaagacatcgagactacctcgcgggtgatttggcccagaattcaaaattgtaagaaacaagtactctatattcatgcacatacccggtggtaaattgtatggagtcaggatcacaggccacaaagaatgatttcgcgacatgccaaatggattgaatccatcggtacataatccgagataaacgttacggggttcttcggcaaacatgggatgtagctcttgaaaatatctccactccgccgcatctgaaggatgattcatttcttcttcttttgattggtgctctgcatgccaacgcattgcagctgccgtcttgtggctctgatacattctcttcaatcggtcaccaataggtagataccgcatacgactatatggcactttggttcttcgacggtagtcatccataggcttccatctttgagcactacaaaaccgacatttatcttccttttcgtcttccttccagaaaatcatacaattgttaatacaaacatcaattgtataataaggaaggcctaaattgcacatcaatttttctgtcttgtaatgcgaatcagtagcttggtttccttctggtaaaaaatctgtcaacatttgatataccgaatccacacatctttcactcatattatgatccgccttgttctgcatgactcgagctgctaacgataattgagactggccttgtcgacaaccatcgtacaatggattttgagcaccttctaacaagtcgtagaattttttagaatggttatgtactggttcctccacattctgattagtaccgtcttgatgatagttatcatcaaaccccacgttataacgaaatgcatcgttcaccatatccacatatggatcttctacaacattacccacatccacatatggatcttctacaacattacccacactttcataattctctcttagatacgtactatcaattacataattactcgttcctacattcatgttgaaatcttccccatgcatataccaaacataataatctggcataaatccttgactaaacaaatgactactaacttttctacccgagacgatatgttttttattcttgcacacagcacaaggacaatggaatttacctcgacaactttgtactataggctggctattagcaaatgtcaagaactcctccactcctgcgacgtattctgctgacaaattccccgtcatttcatcgaacctcttgtacatccaatctcgattaaaaccaccgctactcggataattatagtttcccgccattataagactaataataaaactaaatatatttttaaacgttttttttcttcaaaaatgtttattttttttaaaggtaatattagtattgtgtttgtgttgtgaatgaatattttgtacgagaacacgactaaaacacgactaaatagtgtagtcgtttaaagtaggtacaacaacttacaaaacgaattacatgtttttttaatcgaaaattacgtctattttgcgactatatttaatgacacgccgttgtagtcatccaatagtcgctatttagaggactattacgagctgtcgtatattagtcggcaaattacgtctattttgcgactatatttaatgacacgccgcagttgtcatataatagtcgctatttaacgactattacaacgtgtcgtatattaatcgcaaaatagcgactaatttacgactacatttggcgactcattaagaagtgtcatataatagtcgccctttagcgactaccaaggcgtctcacctctacagtggtaatttggcgactaactaacgtctatgtttttgttagttgtaaattagtcgtataattgtagccaaatagtcaccaaatatagcgactatgtatgtaatcgccgggtgtagtgggtatttaacagttttcttgtagtgtgtcctgtgaccggattacatatcataggcaagttttcttgtagtgtgtcctgtgaccggattacatatcataggcactgtatccttatcatcatcttttgagaattgtataccttggaaaaagagcaaaccagatgcatagctaaatctacgactgtatcgacatatgtctccagagattttgatatgaaaatcggcagctagtatatgagacgacttctcattatacggattctgaatttcttaggctgaggcgatgagaagaagagccactcaggatattgtgcgacgattaataagagacgcggccaagcggaggacctggtcaagaacagctccgtgaaatatggatggaaaagcatgtaaccccatagcttcgacacgcaacaaaacctagcgattgactttgccggcaatctcaagaatatctcgttaatgagatcacttgggatggaatcttggccgttgataaatcaaagggcacacgcagattctcgagtgaaatatgagagatataggctaacacacgaattttgtcaatggacattcagaaaggcaaagaaaatatcatcagttttcgtttttgtaactattgaaatatttaatttcaccgcatatataactatttgtaacactcatcaacatatggaattttgataccatgcatgcatccagactttgtggaggctgtgatatgaagttttgagccttaaacctaaaaatgtagaaagttctttcatcataggcttcaaagtgtttgcaaaaattagagatatcaaatttttgctattttgtaatccagaaaagcatataaatattcttaccattaatttgtttgatatgttattaaagttctagttaaattagaagaacataatagtatgtgtaaataaagttttcataatgccaaacaaaaaccacgcttactctataatatagttcgatctacgattacaaaccaaaaccatctctaagtcctgatcatattttatgtagacgtacgatttcatttctggcacccttgagtctctctttgggcggttgcacctttttcttaatttctaccatgacctccacaaacatcaaatcggacaacttgggctagaaactggagttgtaatcattaagaatatatatgaattatagtatctaattatagtcttattattaatatgattgcattgatatgttacagatcaaaacttgattagtcttttacaatttatgttacacaatatgtaatcacgagtactattatacaagcgtgtatgtgtcaggttaattatacacatatcacatatgtaagaattatggctccttcagccttgaaagaaaggtacattgtgatcaatctcacgaggccggacgcaatctgatttcatccatccgattctccgtttcacattgtcgtacacgatcaagtgtccacgcatcgagatatctgcaataagaaaacaaaacatgtatctcataagtttcaacttaattgtgattattcagataagaaaattatgggttttacagctagaatgttatttttacctccaagaataatagtggaaccatcatgaacactgcttccatctaatatcccaagacagacatttcctttgttctgcatcaaaactcgaatatatataaagccaaatcgaaatcgaagaattgcaattgttagagcttataaaaagtgcttacgctgatgatcaagtaatcctcgggttgaatcaaaagttttcttgatatgatcaaccatttgctccctatttgcagagttattggtctgaagaacttcttaacatccgacaaggaactgcatattatcgaaacaaataactcttcagagatatgatctttctttcaccacagaaatcaatatggttttacaaaagatcaaattttctcaaattacctaaacgggaagttagttttggctcgccagcagataggcagtgtttcgtctgaatcatcgcgtgttagttctaaaccagaaacttcttgaagctttcaccaacaaaaatagtaaaacaccattgacccgaagaacttcatctaaaaaaggctgattttagtttctgaatttgaatacttactgatgtgaccaattgggagtaagcctggttagggaagtatgtataggaacttcctgtgtcaaataagactttccctactcttccgttttccccatctaagctaagcataccctgcccgtagctcatctttgtaacttgcatctgataagcatccctgaaagaacccaaaaatgtacattaccttagcatatatgcaagtgacaaagattgaagcttttgggaatatattcagataagaatccaatcaagcgattctaagctgctaggtttcgcagattaggctggttttcgttaagcacttacaagcgggaatcgtgaagcataggaacccatgtcattccgtgtgatggaaccaaatcacttcccatgaagatatatccttcaccgtttaaatcagaggcaaggcaatggccaaccacattgctgataatacctctgcttgcaagttgagaaggtaagctaattttagctctgcttagaccgagaatcccgtctgtctttagcagagtattcaacagtagtccttgctgatcatacccgcaccttaaagttcaaatcacgaaagccaaagtcacaacatgaaacactcagatattccgtaacagaatcacaaattgttaacggagaatgatatttacccgaaaactatatctgactcggctagtgatccgttatggagtttgagatgaaacttatctttggtgagaactcccatggagtagctatgatcagcatattcaatctcgtagtcacattgatgacaattttcacaatgttctgtcagttgattcctttggacttctacacaaaaggcctctgaagatctcactaagttatcttttctaggcttatatagttgatttgctccctaaaaccaaaatccagaaagttcatcactaaattcacagagagattctcctaaaatctaaaaaaacttgatctttattctttaccttagcacaactagtacaaggagcatcacattggatccaagtcaattcacttcccgtatcaatatcaagatgatagtattgtccatcttcaggctttccaacaagaatgcgtgtataatacagcctgcaacaaaagcaaaaaaagacaatctttgtttacttgtgctttaagaaacaaaccacacattcagattacagagtattagatacaatgcatacatacccatctggatacacattaccaccgacgggaaaaatcgtagtggaggagtcaatagaaccggcacttgtagataaaacatcgttgacttttacagggttgaccagctctaaatccattgattccacaaagttttcattctctaaacctaaatcttcctctaagatccgctcgtggaactctcgagctctcaatttgtgatatacagggaaaacaaacgacgccgtttcacggagattatcgtcgtcgtcacggttcctctcatcaggagaaaccctaaacatttgaacagagttgggaaaaacagaggcgtagaaagcaaccgcgagaagcgagattccgagaagacccagaactaatctcggcgaattcattgagagatccgagaacaagaggcgagattgttggtttcggtgaagtgggtcgggttgaaaactcgggtttgggttatcctcgggtgggatttcgagtgggtaatcgtggtcagtgagagtgaaagcagagattgttttgccttgtgaaggatcatcagatggtgggagagtgattatgactacgctgtggactcgttgttgttgttgctggtcatgaagatctggttccattctgtgatgtctccgatcgaattgggctggttttgatcggagagagaatggaaacaggacgagaaagaaaaatggcagactaggagtggtcaagagtcaagaggctttcgttatacgagacggaagctgcgaggaaggagagggttattttatttgaagtaaatgtttgaaaaatatgaattacacttaccaaaaaaaaaaaaaaaaaaaaatgaattttacttacacataaaattcatttttattaaaccctccctataaatgttctttttaaaaaaaaaagtatatatggaggacaataaaaatagcttttagtaaaaaactttaatagttttaacaaattttataatttcttgctttacatttatttttcctttttcctgtcaatttgatttcttttatttaactcaataaaaatatatgatacaactttaatttacatgataaaaatttagaaataaataaatatgtaatcataaaataactatacaacatacatttcaaaaacattatgtcaaacaagatatgttaggaaaaacaaaattttttacatgctatacaaaaatatatataaattagaaaagaaacataaaataaaacttgtgtgttcatgtatttattaactattgtaatgttaattttatgtgtgttaaatttctaaatataatattattgctgtataaaattgtttttaaatgtaatgtttttttattttaataatttcaattttgatgttaatgtatttaaatttatatgaatataattgaaataattgaatttaatagaattattgtgagatatatgcaagctataaggactcaatgaaaatatgtgaaagattttaagggtgttatgcaccctcaaaaataaaggttttaaggtttgttggagttaaaaaacttcaaaatttaaaagtttgaggtttgatggagatgttctaatcctctcgtttttttctcttcgatatatgaactgaaaaagtatgaggaccccgaaaaaatcttggactttctttcttgtcatataatataaacaacaacctgcattactatttactagtttgaagaatatctgagatgtagtatttatactatggggttaatgctaataaagagatggatcagtggcaagagcaaagaagcaccacccttgtagtttcaaatatttgttgagttttgctttataatttggtcatcttagtaacaaataaaattgaatatcagaattcaaaagttaagaaaaacatattaattgacgaaaataatatatatatatatatatatatatatattaattagttcgtaaagttccaaaaaataactgtaaaaacaagaaattaagaagataaagtataaaagaccgaaatgggtgcaattttagttagttttagagtttggttattggttttactattttttcagttttaatttttgttatatattaaaagcttaaataaaattaaacatatgaacacatttaaaaaaatgtaacctaaaaaataaagttaatagtattattattttttaactctaaaattaatattattagtttgctactttgcaaactttaaaataaaataaaatctacaaaaatttgattgttgtaatttgtgtgaaatggaaaacaaattgcgttcgacccgtaggattattttcccacgaacgacttggccaaaaaaacaaaggaggccgaattgaagcaactacttttctccatcatcatcaccatcggcgaaatccgccaaaaattgatctccatttggaaatccagatcatgctctagagccctagtttagatctcgaaggaagacaatgggacggatcttcgagtacttcgtcgtgtgcggacttggtccagagatgcgaaccgtggatggagatcttggattccatggaatgcaaacattctacttgcctgctcttcttgaccagttccctcctactgatcaatctccttaccctgcccctcctcctcagcttcctactgttaagtttttcacaacatcttttgtaattctcgtcgagattaggattttgattgggtttaggtccatgctggtaatttctttgttgttaaacggcgatgaaatgtggaatcagcgttgtctagttgttaggtttcttctgtatttgctaaacgaagcatttcgaagttattaactggagataaacgtgctgaattggattgatgttttctaggtacctctaattaggtctctagattagttaagttggaatattgaagttgaattgccttctaccaataaggagcttttgaaatttctctcaaagtgtggttatatttctttgcttttggtcttgtgcttgtagtttgcttttgatgctccatggtgaaatgagtcatctgtttaagagtttaacttgcttgattaggttaagccttttaagagtttgttttctttcgttagataagactagatatattaaacaagcggatttttatgattacgcttcattttcttttggacagtgtgttcttcctgctggggtggagttccattcttctggttttgtttccagtgaccctgcaagtttcccacggagctatcccatagtcttgacgggtatgtgattatccgtatattgcatactcggagttttgtatgctttgcattgtagctgctctatgtgcgatgttgtttcggttgcagtggaattattttagcgtagaagtcgtcttgcactcatttatctagtcttgtttctctgccatgttggatttaagttggtttgttttgaatacacctgctttaactgtggtgggtgatctcttactgattttatcttaataatttttgcacagagggtgatggatcaaaaatatttgtcagttgcattgcatttcgggatcgagtctgtgaggatattattgaagcttatcgcttaccgccgaatacatacgcagacaagtgtatctgtcttgtgtctcatgcccccaatttccgtgttcttcgtaattctctcgaagagatttttgttctttgcttctcttcagaaggaagctggtatataccactacgcttaaaacatcttcttcttgtctatacctaacatgaattatgccttgcgttactgttccgtatatattcagcaaacatatgtgggtggagcttgcattggttcttcatttacttttgtgttgattttaccctcttgaaaagaattgctgtataaaacaagaaaaacaacaccatttttaggtttgaactttgatgttagtgtccttcaaccttttcagtaagccattgtgggatattatcgcctatatggtatctaatgtgccattgccgactcccggaaaagacagagtcttgtttgctgtcgagaattgcctgctctcggtggaagcacctccagaggatagtcttcctcaggcagatgtatgacttgtggttttgtctccttaatctgttttgaatacctttccttggctactttttagtatcaacgttggagatttccaatttcctgacaactacaagggcgactgttccctgacttctttcaactttttccaataaacttatgtaacgtttggcatgttttactgaatgcagatatctctccagcctcttgtacaatgcttggatgtcgacaacttgattaagctgtttacatctgtactagttgaaaggaggattttgattcgatccaacaagtatgtttctctatgtagagacattatgagtttaagatacattttctaaacagttactatttcatactatctctattcaatcaccacactaattttgcctcatcgtgaatctcaataggtattcgcttttgactctggtgtctgaatccatatgtcatttgatttatccttttcgatggctggtatgtcatagaacactgatgagatctcagtttatcacttaaacaaatatgaactcatttgtaagcatgctaacccatgcatttctactgactaaaatatttcttctaatctttattatttgttttgttgtatgtttctgaagcaagtctacattccattactattttttagtggagtagactacattgatgcaccaacaccatatatgatgggtctccactctgatgtcgatacatccaatcttgctatggatggcgtgagtctaaatttacgtcatacttatcctctttaaaatttgggcaaccttatattggtctaaaaacattgccatttctaggttgtagtggtggatcttgacataaaccaaattactacttctgaagagatacctcagataccagagcctgagttcagcactttgcgaaacgatatcttgaaactactgcaccctaatgttgtagcgattgatcagttgaagggctttggtaattccgttgagcagtgccctaaaagccttagcaaaccttggggagaggatcatgaccttcaactcaggtgactttaggaaaccttgtcttgtgattgcctacaatttattatctttttccatgggaactgtttggttctcatgttatcttgttttgttatacaaaatccatttcctgtggcagggttatattcttaaagtgttttgcatctatcttgggtggctaccgcaatttcatagtatgtgatatttattctttccttattttatttattcaccccttttgtacatcttttcttacttatacggattcttttgtcaggaaaacaaagtttttagcactgatgcgtttctgaagagacggtctcgttccacaaatcagccaccagagcctatggtaagctaactgtttcatgtatggaaggcatatacctacacttactgcatttcataactcaacattactatccattgttccaattagtgtggtaaaccgtcttttcacatattactttcgagtttttactgcatatttttattcatccaaaagatgttgaataatttaagttacgttttatctgttgaataattacttttattggtactcttccaattgttttcagttggttcaattcttgggctcttttgcattcctcgattaccttgaaaggcgtctaagctctgatgagaagagtactaatctccttgagaagttacaagatgcagttggaaggggtcaagatgcaatgtcgattctgcctaaatcttctatggagcctgaaataatcacaatagccgagccagaagttgaagaatcaggtatattttgatttgttggtagaatttgttagatagcagaagctgaatgataagagattggggttgttcatttataagaaactcccgagaatgaaaatatatctaattgatggtataccatttttcataatctcatgggggttttggctggccaccagtatttggaaagagacaaaatttacaagttggtgtagtatgcataatagtagaaaaagtactaagactctttcactctgttatatttttctggggaataatcgtccgtctactgagtttgggatcatgttctgatttatctctattcttttttgtcagccaccaggtatacctatgacaggtttcctgcgagtgttcggtcagaggaacaagaagaaaagcgaaagcagatccttgcagcagcaagcggggctcttgaatccaatggaaggcaccctccaaggtacatcctgatttgcttggaacagcggtatgattcccttacttattttctactatcttccaattgtagctcaccgccagggaagaacaccaaagaagacaatttcagttcaatggagagggctgtaagtgttgcttgtaatcctgttgctattgcatggcttcaaacaaatcaatatgacatgaagaggtgccatggctctgatattgtaactactgtttgcaggcagaaagagaacgaatggtcttggatatacaagtcaagttgcaggtattttttcttctttgtgtatttaagagattccaattgcaagtttctggaatgatcaacttctccttcggaatgattttgtctattgagaattttgtgaaggaaagaacccctacagtacccaaattgaaaaacagtgaagatcaagtctaatgccactattttattggtttgttgtggtttccagggattatggctccgtcttctgaaactgggttcagatgaagatcctctttcttcattcgaatacggcacaatattgggtatgttccattttaatgggaatgtaaataaatgtagactaaaatttccgctgcaagaaattggtaaaccaaggaatgaaccaaattgttatgcttaatcagccgtatactaaccaaatggtttccattgtgattatgtttccgtctctgctgtaaaatccagagagctgatgttttctcaattgaaaattgaaccccaaattttgctcatgtagctctgattgaatctgatgctgaggggattggtgggagtggctttatcgagtgtatacgagagcatctgtattcggtaagcgtagcaactgtacggcatatatatactgagccagttttattgagctcaaccttactgtatagtggatttatttcctgcagggctggcatggtcaattgtccgaggagcagttcattgcggtcaaagaattggtaggtagatgatcgattaactagttttatctgtatactggccttcatattcccagtttctcaattgcgtgcacgagagctgtgcatatttagatttggtcagattagtcctggctgttgttgaaaggtttttagctttgggtaaccccattaatgatttttttttgggtttttgaatttggagtttaagaaatcttttaaacacttaacaatgatattcttcaacaatgattattcattgttatcagctcaaaatggctgtgggccgtgctgcttcaagaagcgatttgtcgacagtgcgggatgcacttgaagtttctgcagaaatgttcaagaaggatgccaataatgtctctgactatgttcagcgtcatctcatctccatacccatctgggaggagttgaggtatgcaatttaacatgctgccggctctatgaatttaatgaatttttcggtgctgctcagaaaatagattattcgacttattgtgaatttttttgacagattttgggaaggttacttcgagtatctcatggagcagcctgcaaatgagtgagtcttcttaaaattttgtattcatcgataatatcaattgtttgtttgtataaatgctccttatcacgttttgtgatgaaaataaaagtcgatctgtagcatacttgatatattggctctcgcaatgagctatttataatggtttccataattcttgtttgtttctctaactagatcgctgaaagaaaattttggagaaaaaaaaagagattgatcaggaatttactttgtctatgttttagatcttcagtctttaaatatttgtaatgctcgtagattgtaagtaatttccatgtcactcatcggtatcttttttcgatttgccctagaggatgcttcatcaacttttccattgttgtcaacatacttgaaattttatccctgttgagcatacatcatcttattgtctcttgcattatactgccaattaatttaatcatcatgggaattactaattcgtgtaactctttattgtattttctcagatctgtgaactatgctactttggtcacagccagactaatcatagtggcatcacatatggtgaatttcttattttgagagttgacttattctttaccttcatttcttgatatgtgatagttacagttctctttatttaatatgtcttcacattactttatgctcttttgaaggctggcttgggacttcctgatacagaagcttggaacatgatcgagacaatagcagagaaacaaaagcttggatataaattactggtaaattaggctttctgttcatatcgttctgcagttattgaaatgtcacagattttgttaactttatactccatacatttacaaacttcaagctttttaattgggcttttggaaaccataaccaactgagtccatatcttttttgttgtatcttgaattttgtttcagattaaacttagagggttcctgtcgcatgttcagcaacttcgtgtcggctattggggtgcttcttcatttaagcagcaggccatatctgctgggttgccatccccgcgtccaaaagatgtctctgtctctgatgaaacccagcaaccctcagaagcttctggaaggagttgggttcagagtatgtttagcagagatacagcatcgagagcgaactcgttcagtcgtgttcgtaagtgggtatctgataatgcatcttcaggtatacccatgattattcttctttctttgtggttgctattctggcttgttgttgctgaagtcaataacttggcaaaacagacataactgctgctgcgcagaagaaaattcagaccaatgtacgtgttctgaagggtcacggtggtgctgtcactgccttgcactctgtgacaagaagggaagtctgtgatcttgtgggcgatcgcgaggatgctgggttctttatcagcggtagtacagactgtctggtcggtataaaatgcttgattggaaaaatgtttatatggttatttttcattcatcagttttttaatcatctagttgacgttgctttgcacctataaatgttcttgatatctacattgagaacacataaagagtgttatattatattagatctaaatatctaaaggatggttgcattcactatctgttaggcctaaagatcattacttagagggtcaaagggtagttcgctcatttgctattaattcttatctagattaagtgaattattttgcttttattgttaccacagtcgtggatatagtaaattagaatatttggaagaataactttgccaaagtagaactggaacaataacccgcatgctgcttcttttcctgtgcaatgtgtcaacttcttatggagatagtcattgattgaaaagttttcacttaagagatgatgagcttgctcttaaataggatgttgtagtctttcacactttcatttcttgaaatttagatcgaggtaaaccttaatacagaatggtaatgacaatctagcatccccttttggttgcttcctgaatttgagcaggttaaaatttgggatccaagtctgcgtggttctgaacttcgagcaactttgaaaggacatactgggtatacactatttcttattcaccttgatggctctcgggagttatgtttttttttgttaatttttcatatgtggtggtttctttaacagcgcttcctttcttgttttcttttcaacttttgatgtagaaccgtgcgtgctataagctctgacagaggaaagatagtttcaggatcagatgatctatctgtgatcgtatgggacaaacagacaactcaacttctagaagaactgaaaggccatgattcacaggtttccactacattctagtgtttttctgtcattagtacacagttcatgagtgggaagtattaatggtcaacacaaaataaacatataggcgtggacataattaaataaacatataactatcagttattagaatcccatttgacagaatgttcaacgacaatttgaatttgttaagttactattgttgaccaattattaactatccgtcagtcataactcataaggcaccaaagaagaagcgatacttatggtgacttaccttttttctgactgtatgctacatccaaaactattctgcaggtaagttgtgtcaagatgctttcaggcgaacgtgtcctcactgctgcacatgatggaacagttaagatgtgggacgttcgaaccgatatgtgtgttgcaactgttggccgatgctctagtgccattctttcactagaatatgatgactccacaggaatcttggctgctgctggcagagatacgtatgtatgctatattactcataagtaacaaatggatttgctgtattgaatgtcactcacggattcaactataatgattggataattatcagggttgcaaatatatgggatattcgttcaggaaagcaaatgcataagctgaaagggcataccaaatggatacggtgagccttcccttgatcttgcacaacatgtttctttttgttgtgatcgaaaaataaatacaaagccaatatacgtatggctttttcttccgttacaagtttattttataatggactatctgcaggttgtagggttgcttcatcgtattatggcattgattgatattaaccatttatttattactttttaaattgttgtaggatattataatatctcagaatctgcaacttgtttgatcaaactgtgtcaattctgcagatcaattcgaatggtcgaagataccttgattactggaagtgatgactggacagcaagagtgtggtctgtctccagaggatcatgcgatgctgttttggcatgccatgctgggccagtacaatctgttgaatactccccgtttgacaaaggaataatcacaggtccatgctgatttcatctaccatcagttctcaaaagatttattaagtagcatctttttcacaaaataacatcaaagcttacgttagtgcgttgctgtctattttcttgcaggctcggcggatgggttgctacgcttttgggaaaatgacgaaggtgagaatctcattattaacctggatctaaacacaattatcaactattgcaccaaccattccgttaatatttttgtttccttggtttataggcggcattaaatgcgtgaaaaacataacactccatagttcttctatactatcaatcaacgctggtgaaaattggttaggcattggagcagcagataactcaatgtctcttttccatcgtccttctaacgccggaaccaaagtctcaggctggcaactttatagagtaccacaaagaacagccgccgtggtacgaccctccctcttttcatattagttggatagttgctctaaatttttctggtcatgcggtttgataagtcttatgagatcctgtaacaccctcaaagtagtatgataagaccacacagttattaatcattgtgttctacaacttcggctagtatgtgtcattctcactgaaactgaatctcggatttaatgattcaggtgagatgtgttgcgtcagatctcgagaggaaacggatatgtagcggtggccgaaatggagttctccggctgtgggatgccaccatcaacatctgattatgtcttccacaactttttctttgtgtatttttaagagtatgtgttattgttaccttgtatgtttgcttatgttctttgagatatgtggtttaagaaaattttgattttcttttatatatgttttctcagtgattcttgttttgatcaatccactaattaataaactttggcgttttaaaatgtatgaaatgagattcgattaaatgtaaggacctgtcaaaatttagaaatccagatatttgagctgatcattaataaaaagtatgttcatcttccatagacatgttacatttacttttaagtttatcttggaatggaagattccaatgctcaaataatctcttgttatacacaattttaatggttatacttattattttcttgtgagaaagagataaattgggtcttttgacgagtttatcttcttcttcttttttttctcgcaagattaggattttattcataacaacatgggttacaaaacagattacagcccataaaggcccacacaatatattgcttcaacttgaagaaagtttatcattagtttcattcccaaacaaacgtgtcaacagtggtacacgtgttggatgaaaattctaaaagctttccgacatcaccaccgccatctaagatgctgattctggtgaagaaaatcattgccgataactgaaattcgactattgattcttctgattttcaccgacaaagctggttgcaaaacgaatcaaaactccgaacaattgaaatcacggctaaaaggcatcttaaaatcgcgaaggaaatttctttcttttcttcaattttatttgcaaactatccttgaaatttcagtaatccgtatacccaacatgacgatccggagaaaagccaccaactaaaggttctaaatagatctaagtcaccataagatggttaagcttcgcttcaaatccaacaaacataaaaacacttgtataaactataaacatataagataggtgtgtcatctctcataaaactctgtaaagacagagacgaaagacaattcccctttattggaagcaaacaaacaacacctaacaaaagcgacgacataaaaacacggcaacggaaagccatgtctacggcaatgaaaaaatcatgttgacggcaagaacacggcaacggaatagccctgttaacggcgatgaaagataaaagcttctctctctagacagaaaagagagagagaggggtccttaacttattagatttttcattcacgagtttatctacaaatacagaatatatatgaaaaagataaatacataaataataataatttggaatttaaaaagaatatcaagttggttttatcacaataccctcaagatcatgatttcgttttcaaaagaaaagattgagaaaattggttctcactaatattatgataattattagaactgtagcatagtagttgatgcccactcacgaaaaacgaagcctcattgacatttatgttttggtacaaattaagaaagaaagaaaacacaaatgaatagcaagtttattaagagaaacatgttggtataaaaatagtcatcaaagtcaacccatcattcgttgacccattggaggagccatcatctcttgttgctgacccattcgctgcttttgcacgttcccaatccatcctaaatacaccaagatatgcaataagtcaaattaatcatttctaaaacccattatttagaatatttattttaaagagatctaagagcttgttggtttaccaatggaagggtcaaggccacgattcttgagttcacgatattcttggcaaagagcacaatattcacagaagcaatgagtgatccaatctggagctggagcatccggtaacccgtacttgcttcggagcttggtccggaatgtgcatgtatacacacacggtatcgcaaacaaacaacatatcaacccatacaacattccagccgtcccacaacctgcaacatacgcatatatacttaaacgtacataatatatgtttatgcatgctacattgataattattgaacctatcaaaatatatgtatacatgacagtatcaaatgcaacaattgcacatactaaaaaccgattttgtatacttttgttttcttgaattgaatgtaaaagataatgtatacttactggtcgctccttcatcgataacctctgcgatctgtccgaacgtgacgaatggaaaacagcatgtgatgagagctaatacaaaaacacaacgaatacagaagaatcattttgcaatgtaaggatggaccttcaagatagaattattcaaaattttgaattctaaccattttcgccgtcgttcatgcaatcaaatagacctgaagtccagttcgatggctgtgtatggaccggtccggccattgatactccatatggttggttaaatgttgcactttgattgatatacgtaggtggaccaggtctcatcggtacttggtttggttggttaaccactccaccgttgttgggatatatctgctcagcttgcagaacccgtttctcgtcaaccggttgttcagattgtgcatgaaagaccggattaaagttattgttcatcctcgggctcggagtttggtctggtcgacccatttttgtaaaccaaagagaagtgattagggtggtttgaaaataaaggttttaaccttttccttctcttttttttgtgtggaaaagatttagaatgaaggtttggtttatataaaggttgatgattcctgtgcaatttgaactagtttgaaaatttcgttacatcttgcatttttattttataatacaacattgccatgtcgtatattaaaaaattcgattgaattaaaattctgattcgtttatcttataaatgaaactagctctatctgtcatcatggttctttggaacatggacctatgagttgattgatatcattctcgcgaaaatgtaaatatatctaacctacattctatatgcaacaaaattgaatgcgatttaagttatatccgcaaattagttttatttacttgtatcataaaacaaaaaggatttgacttcgtaaccttgttgacttctattggtggtgggaacttttataatctataagtcggaaaaaaacataaattggtattgactatggaaaatgatacttcccatttgataatgctaaacatgattgtctatgctgcacatggctttctttgtttgcttaaaagacttttgacttatgccaatgtgttatgatccaagctaaggacttgagaaggttaatatatttaggtggtgttattcaattatggagttaaaatctattatttaaagtttagatgattgacttcctgatattggcatattgcttttaagaatatgtttgcttggatttcaaaatctctggagtatatcttggattttgattctaatgatttactcatgaaactccaaaagtgtttcatttcaaataaattaatatacaaatattttacaagtcttttagttttgaataacactgaattttaataaactatttaaaatcttaattgaataacaacaaactttaaaatctattaagcatgatttaaaaagataagctccagtaacactagattttaaagctggatttagaatcattagatgaataacagtacattattgttgaatttcaattctattaaaatccatcaatgaataactgcaagaagttaaaaagttgaatatccttagtgaaggatcaaggaacatcaaagtcgttgtagtatagtggtaagtattcccgcctgtcacgcgggtgacccgggttcgatccccggcaacggcgtttttttcccaacttttttgaagcagctgaaatcattgtgggccgtaagaggcccaaacgcgttgtttgagtttaaacttttaatcaactcaaagtaagttaatttcccttaatactcttgttggttcattgacgagggattttggcatctgttttttttcattgtctcactggagatgcatttattgaaaacaaacagtaagatgacttcgcaacactacggtcactcctcgtctggtcatatatcttgtcaagagcttgctcatgctcatgactgtatacctactacctactacatctcaagcttatccacgtcgaaaaactcgagatggccattgaagcagctttcaaaccagcgagaacgatgtgcttgcctcttggcgaccagaagagagcatcagcttccttgtcgtcaaaggtagctagctttgaaacttttccagggttttggggtgtctccatagaatagaaactgacatttggctttgattgatctccgtgaatcacggcaaacctgtgaccgctcggctcccacgcgaaagcaaggattttctcatccacttcaagagcctcggtggtaatgccttgtaccttattgaagcggaaaagctcaaacagagagcacgtatgtcgagtaacttggacagcaagatactttcctttgctctgccagtacatcttacagtcgctaacgctgagaatatccttgtgcatcagctccacatagcccggtatttgcagaaaaacaacctttttaggctggttcttgacatcccctttcaacagtgaaaggattggttcagtaggagaccaagacatgcccacaacatcatcaaaattcacagccgcgccttcttgcgtagcagtctgaaagtcttagtctcataaacagatacagtgtttttgataagtgtggcaaagtatttatcatcttttcccccagcccatctaaggaaaaaaagagaggttatgtcaatgaatgtattaagaattctattcaaaggaaattcaagaaagtacctaattataggccatgagttgtcaacaacatgaccatctactccagccattattctcccagttctcacatcaaagattcttaaccagggttcctgcaatttggatgcaaataagaatactttgcatcaaaatgagattggaagtagagaagcaacgatgatctatggaatctctcgtctgtcaccagtttggcacttgaaaagtttttaccattcttaacctcttgtaagaattttacattattgaatctttacttctcttcttatcatatttttggacttggttactttttttccctggaataagagatcaggttggcctgtgcttctacgtttttgttatgtattttgcaaacaaattgctcaattggtttcatcatgcctattttcagttacaagagatcttctctgataagtataaacttgagaccccattatctcacctcttagattataaaacttcaattttggcagctacatagtaacatgctacgctacttttagtattttttggtgaaattttctagtcaacacttggtctatgactctttaatatgttttgtttgttgtatctatgtatacttctattcaactttctctctactgtctgaatatgaaatcctcctataggcctttgtttcaagaaatatattgagaagaaaatcatagatttgaaatggaaaaacagattcctctgctgtacattattatttgccgcagtttcgctattcgatttgagaatgtacacaagttttcagtacaatatatgtcagttttaataccaactgtattgttttcagtcagtgcattgtcgacggagctggatgttgctgcggtaatggcggtaccggataagccggtacagcataaggagcaactccaagatgatggtgatggtgatgatgatgagttcccattggaggtggaagcatcacaggtgttccaacagctgaacccatatgatcaggtggtgcgatgatcggttgtcccactggcgcaccaccatacatccctaatccagccattgttgggggatgatgttgttgtggttgcggttgtggctgtggttgtggctgagctggtctatgtttaaccacttgcggttgttgtcctcctcctgtaaccgcaggagcttgattgttcacagtggtgatgtcgtgaatgctagaccgccttctatctcggttcatcgagttaagcctgatgaagtatttttgagcatgacttgcaacttgtgttggagttcttgagatcacaaagttccttgaaatgcttctccaatctcctttcccaaacttgtccaaacccaaaagaaacaaccttccaaacaaaacagagtattcaataaaggtaaagaatcttccaaatcttttttcactcttttaagtctaaataatatcaatggatagatgatggagatgaaggagaagaagaagaaaccgatgctcttcttcagtccatggaatcccttttcttctctcttgctcagctctcgagccaccacttcttcctccattggagctacttatcccggaggtgccaggatttggtttcttctcagatgatccagaggaatgagagtctctgttggcaggagaagtagctgctgctgctgcttcatctacgatgagacctttgcggtgatgataacgaggtaaaggaacttgaccattctcgattgctttgacatcttctaaaaggatttggtaatgtttctttacttcttctaaggctttgcttggtaccattgacgacattttgttccattgatcctctgttatctcttcctctacacaatgcaacgcaattgcgttctcgaatgctttctcttcttctctgctccatgttgccaccacactctccattcgattgcttcaatcttttcttctctgtttctctctctctctctcttctctttggtttaatcgtgtggtggacatgatagtgtttttgaaacgcatatgtgaatgggtcagattctttaccttttggagttttgtgaaacttttttttttgtttggtattaagttgaggtgcgcatgataagaatggacatttgtatatgcgcatgataagaatggacatttgtatatgcgcatgatagtatagaggacagtgcatatgcgcaggataagtaagaggttgattgggactttatcttattcacaaggatcaatcagttgggtttgttttctattgtgtcactcataaggaaagagtacgcataggataagattcttgtagttgacgattactcttcacttttctttgaaatttgatccttattcattctttagagactttggtcatttcgatttatattactcgaatacaatgcaaaagattagtgtagctttaccttttgatatttataaaacatttatttcaaaaaatttatattttttttttgaattttgttaagacaaatgcagtttgaaacaattgatcacattttaaaactttatattagtgagcatcattataattaatagagaatgtaaataatagagttttaaaatgtaaaagaatgtaaaacaataccgtcgccgagtttactgaattcagacatcgcgttttataatcagtcgtaaagataaatagcgaccaaaaattataatcgcaggtcgctatatccagcgacttccatacgaacaacatttggtcgcggtcgccaacgactaacaaacgaacatcacataaatagtataaatgcaaaattcggaaaaacaataaactaatcgagatttgaaaaagaattttatcaagatcaaaatattttctttttccaagatctacatacttgttaatagaacatgcatgaaaacaaactcgattaaagaaatttatttaacatagtatcgaatacataaaatgataaatcttcattcaacaacccatctataaatttctagagctagaaaaacgtttttttttttttttttacgtcatttctcatctctcttttaaataataggtggaaattaatagatgggttgttgaatgaagattttcttccaaataagctcgtatatataatggtcatctgatccagaatttgtctttggaaggtaatgggcctttcgcgataaggagcttgactgttaggcttccctgcgtatgtcaccccacccaagtcactaaggtacgatctttttttttttttctttttttttttgttaaagttcttaccatctttcacttcaataataagttttttttgaattgtgagatctcacaccatatatatatggacacttaaaagtctaaatgaatcggatactttactttctataagacaacaacaaaaaagtgtaaatgaatcaaaatatgtgaaaaaatcaacttaacgggtacttaattcattgaaaaattgctggctagctttttgtagacaaccttttatatttccagttgttaatatttgggcttttgttggagacgtttcttgaatattttagctactttctatgtcttgaggaatttgaactttctcaaggtgtgttatagcctttattggggctgggtaaaatattcgttcgatccgcttcgattcggtattcgatttgatttgattcaaaaaatccgaatatccgtaagattttggaccaaagcaaatatgaaaatgtagtattcgtaaaaaccgaatcaaatagcaaatattgtcttttttaaaatcgaatatccgctttgatccgtatcttttgatatatattagaatatatagttatatctatatgtagatatcataaatagtttgtgtattgttgctaccttatgtttttatgttaagatgtttgttttatcattttttttatgttgtgttttgatcaatgacatcaaaattaaactatcggattttagtttttggaattagtttgataacatttttgttgaccggtaataacaacaaaggttatatttggtatttataacttattttgaaagtatgttaaataaaaattttgaatatctgatatgcttatatagtttacatatttttttaatatttatacgtatcaaagtagatatccgcaaatatcacaaaaaaattcggatattcaaaattccggatatccggaaagtttcgaatcaaagcaaatcataaaatcaagtattcgattaaaacgaatcaaataacaaatatcacaatttttccggatatttgcttcgtgtccaggcctatccgcctttataggcccatagacagtatgtgttaaattataatccaatattgtacggatgattatactatatagttccgaatatatatcattgtgttacagctgggaatgaatcaaattaacgtaatgtacggaagaagaactatagaagctttgttttttgtgggcttcaaatttcaatatgtcaattatgagaataatcaagtaaatattgtaaatacatactctaataagaaaataaggcctaaagtttaggatatgagaatgttagagtgcaatttaagaaaatgtccggtgcaacgcgacatttgcgtgtttttcacatccatgcatgcgtactatatgtatccccgcaatcttagtcaaatatcaaatattcaaacgagagatttcatctaccgctgattcatttgcttcgcgtatatcactatatggatttgataattactagtatatatattgttactattgagattattacaaacgaacaaagaaaaaccatttttgccaacaaccaaaaaaggacaaagaaaataaaacaagtagtattctactgacatatatgcaatagatatttaactctctaatttcttaaacatcattcaattaatatttgatgaaatgaaatcttaaataatataaaccgaatatcaaagtcattaactaacaaaaagaaaggaaaaaaagaaggaatatcagagtcatcatcaagtcaactaccaccgtgcattatggcgacgatatcaaaacgtcggactactcaaactttatttagacagctcagttaattcgaatctaatttgtcctatttactaagtagcacaaaaactaattttgagcatttctcggcttatttcgaacccgtatatcgaaacaatctttattttatgtaacaaataagtatagtataaattgaagatgtaaggttaaaaaatgtgcccaacctccaataacagtaggtcataccaaatacattcaaaactttgactatttggcttttttttttaaaaatggtaccactccacctccattcttccttgaacgtaaagtaaccttttttactctcttctttccctcattttcatacctttttcacaaatccaatactcaaaccccatacatatgtgccaaatatgaaattagtacgtattactctatatcataatttgaaattttcattaaactactatgtactttattaattattcccacttatataaaactccgctcaagctgtaatttcttcgagattaacaaaaaagaaacacctttttaatcataaaatctcaaaccttttttctctaatcatttctctttatctctttcttgctctctctctctctctctctctctggctccatgacctctcttgcttcttcaccttcatcaaactcttctctagctacaaggccatgacgaaacaacctaagccgtgtagtttcctcttccacatctctctactctctgcgttgtttgttttccttctcatttcttttgcttttacgacttcttacaagcttaaatccggcattaatagtttaggccataagagaattctagcaagtaattttgattttactccgtttctcaagaataaagatcgcactcaacggcaacgtcaaagtccaagcctgactgtaaaagaaaacggtttctggtacaatgatgaggaacgggtggtacctagcggtccaaaccctttgcatcactagctaaaaggtttttgacttgtttcaatagatttttgttgcgtttttggattaatatttttgttacgacaacatacatgagcatggatatatcatgattaaatattgtgtaagtgtattaaattgacgttaccatcatattgttgatggtttcttgatttgaagggttcattaatatctattaatagctccgaattttgtatatatttatagatatagatctctccattatcctatacagtacttgttatgatgtttactgaacataaattatttttctcttatgttgagaaaaagtacattgttcatgttaataagataaggtacgtggcgctaattggttattttgaattaatctgtttggttaaatgtaggcatgtaaattagaaccaaagtttgtatatcggcccagtccactcttaaaaaataacggattcgaccttaaaaatataagtccaaaaaaaatcaggtttttcaggctaatccctttcggacttaaggatttttggggcttaatctgacgggattcgaagcggtccgaataacctttaattttttttgttaatattttcgtttaattgagagaattgcttatttttattttttgcaatagagttgaaaactctaaatctagttatgtaactgtgtcttattataaacctaagaaacaaatcttggctctactcccaagttgaagtcttctgcttttatattttatttggtatgagtttaaacaatttatttaaattatttatttgatttgaaattttttgtttaaatcaattggcttttgtatttatttagattttgattgactcattctatacaaattattttttcaagcgatattataaattataagtttttttctcgaaaaagccttaaaacctcggaaaaccttgtggtcatgttagagttggaccggactttaaactataggttcagaagttctacgggtcagacaggactatcctgattcacatgtttagttaactttagcgtattcgaataaagaaaaaacacacacacaagacattttctatataaaagctcatttttaaatatatatatatatatatattattgtgaaattgaaaattagcttattccatgaaaatttacttttctgatattacttgtcaatgttcttacttaatcacaaaagtctatatatacattaacttgcatattacaaacagaagaagaaaataagacactttatcgaattgattcaaaaatcgtatagttggttttttttttcctgaaatcgtatagttggtattgacaattaatctgcaacaaaaacaattatccccaaaaaatatggacctaatcccacttccaaatgtcaacaaaagagatggtgtttgttcactagccaatttattaaactatatatattatgaatacatgagatctatggaatccgtcatcatatatgaagttcgtttacatatatatctgtttatatcagatctagtgttagtttttactgcgaagttcagagccgaagttcctactctttgtggaccaagacagaacttaataaagaaatatctttttggagaacattgtccccaaaaaaaaagaaaaattgaactagaagtccaggttcagcctccatttagaaggacctaaaaattcaccattagggtatatataaactaaagaaaaaaagcttttggttttgataagtactgtatttgctatcggtaataactatatactaggatttcacccacggtttaccgcgagcaataggtttataaatataaattttttaatcaaacataactaaataatatttggaagtttttttgttgttatttagtgataagaggaatgtgtttaaattttttttagttgttatttacttatttttgttaaacggtttagattgaagggaattaattttattgaacggtttagattgaatcggatcatataaagtttagaagattgttaagaccaaattacccttaatgattttgaataacaaagaacaaaatctaaaattgaaatcaaaattgaagccaaattagacaaaatttcaattcgtatttcctttattaaaaggataaatttggttccaagaaaagacagtataattcacgcatttgacgtttcttttcatgtcacttcaggcttttcttaatgtgtggaacatgggctcaattgattaagatgattggccctctatgaccttttttaatataggtcaaatagagcccacaccatcaatactttttacaaaatgaatcagagattataaattaacggttgtgtaaaattacatgagatagaaataaataagtatgcaatgccatagatatgaatcatgagttctatggcattgcatacgattattaactacatcttaaacttaaaattatttgatgctatcggttcaactttttaactttttggggacaatggacttctagttcaacttttttttatgaggctgaacttggacttctagttcaacttttgctatcggttaaataatttggcacactttttaaaaatatcatatgatgcttaaattgttctttaattatatcttaaatttaaaatatcatatgatgttttcgttgttctgttaattatcggcacagcatcatttaaacaaaaaaaattgttacaaattaatggataaaacaaaatatttacttatatatgtcgtgaacatgggaccaacctgataaaccatggtgaacaatctccactttttcttctttgtaaattcatgatttcacgtttcttgtatcgtttttgtatttataaaggaaaatctaaaagtcatcttgtgtgttcatacttttttgtatcccataattgctcttcatacttttactaaaaagagttatgagtgaaagatgtccaaggatgtgttccaagttgcttcaagttttgccacacaataatgaaccttttgggatcacataaagttactaagggatataaataaatgcaatttagagcacacaaactattagaaaaaaatagttgacttgctacgatacgaccagtcaattaaccccctaaatggcctttcgtatatcaattagaaaaaaatattgtcatctacaatttgttacgtactcactatcaaatttgaatcggcgtaattacacgatgtcatcactagtagaaagtattactgttacacattccaaattctaatactaatacttggctaaaagagtttatatcaagatataatactttcttgattgaataaatatgatataaaagttacaatttccaacaaaaatacgtccaagtaaaatttgatttctaacttcaacggccaaaaacaattactactgaatcacatcagttgatttgtaattttgtatttataatttgattggcgaaatagctataaagatgattatttttcttcgtaacactcaaaattagaattgtcatgttaaatgttagtacatccatggatatagtttacaaaaaaaaaaaaaattggataaagtttacatactcgttgttgaagtatatatatatatatttttttgggtgcaaatatcaagttcaaaattaaaataccaaaatgttaaaagaatgacgaaccgataaagactgagtcaattcttcgaataatgaaatacaaaagtcaacatacgagggaccagctccagcaccgccgtattcaaagatcaagtcgctataaaaggccaatcaacgcgactcgacgacccaaataattacataataaaaaagtagtgtgtaaaattaaactacaataaagaatttctgaaaaacgttgtatattcttttccaaaaacatacattttcatcgaattcaaacagcaattagcgaaacctcaacactattattatataaatcacgagacaataaatcttgataaataatctgaaatttgtttcacgatcgatgagaaatggaaaactatatatcgttttgtcaatataaatcatgcatggccatcaggtgccgtttacgttcctcttaccaatcagcatgtatatcattgattctttttgtctggttatgtacgttaatccaatcaccaaaagaaacaaagagatcaattgctcaaaataccaaaaaccttttagtatttcttagtttgttcattgatattcaacgcatacaaatttacatatataatatgctactgatctaaagaaaaatggtaagaaattaacttaccatttatccaatcatttttttaattcctagcatcaagacccactccctttttctgtaatgagattttaaaggatctgtaatttatactttaatatttatgccaagatcgtttaagcataacccacgcatgctctttgaagtttcaaatattcaacataaatctaatgaaaacgaaactttcaaatttattaacaatattcaaaaactcattgtacacatatgacgatataacaagtatatgaaatcaacgcaaagacgaccgattccaccggtaacctaacacccttttcttaaatgtcatcaatatgtctatacttatatataacattaacacacacatttcggacactagagattacatcggttataattctagttcttgagtttgacttgttaaacccctaaaaatagtacctataagaggcttctttttcaacttctcattcttcatttccggcgaagttatggaccgatcaacgccggaacataactcatctccctcacacaagcgtctaagcgtgagctttctcgtctcaatgatggttctctgcgccaggcatgcgaatcggctctcgaagaaactaaagctgaagtcaaagaagcgaacttgcagcggcggagagggtggaggagaaagattccgatggaatatgataagctcgtcgatgagttctcctcggccaaaagagttgttcacgactttaagcaacaaggcgatgaccatggtccgccggaaaaacccgccggaggaaaaagcaaccgccatggaggaggagcatggcctttggcagagagagatattgatgggaggcaaatgtgagccgttggatttctcgggtgtgatatattacgactctaacggacggctattaaacgaagtgccaccgagatcaccacgtggcactccattacccagttacccgacccgttcttaagtcgggtcgcagttaaacttaatgggaacgaatgattattaagcaacttcattagatgattgaaacgtcgattaggcagcaaaacaaaattactatgtatataagaatgttatcgtgtactgtatgatccattttatcctaagttgtcttgttatatgttatacaccactgaaatttggataggctatttaaatttcagggtccaaagtttgaaaccatcatggtatactctagagatccaaatcgttgttgtaatctaatttcttttaggtagaaaagtcgaattaatttcctttattaaacaattattatactgacaacacctattcctgaatgttttcaaattaacgagtttaaaatgatttcaaaattatccgtgtccgtaaaacaggtgaacctctcgaggatagcttattcttcttctttttcttgttttgttttggggacaactattcagtctattcttcttcttcttttgtttgtttgttaatgagtagggctacatatatataataatagtctcgattcaattttggttttcatattacttttgacttgatcaaatttattaaattcatttgacttagtttagtttgattcggaacggttagttgttgaagaaaaacctaacagtaaacgatgttttcttaataacaaaaagaaaaaatcaggagtacataagcttatactctgtttcttttttcattagttttactgctcatgtgcagaacatatgaactatacatcaaacagatgtacataatttctttattcttccattaataaatttcacatttcatcaaaaaaaaaaaaaaaaaatcaggaggatttaatgccaaaactttttttatgccttaatttcgtgaggaagagaagagttcaaggtcacttaattacctttttttaaagggtaatttaatatttcaactataaatatgatctaaacatcatttgaacgaaaccataaaaactttcatctttttgttatggccagaaaatcgtatttctattatttaaaaaataaactaaaatgaaatatattattgtagaatttcagttaaaaacatatttagtttgcctctttaacaaaagtaaaacttaaaacaaaaggatgaaatatattatcaaagggtttcttctctgactccagtaactgaaactccggtaatctctccaatccaaactattgtatgtaatattattttcgcccaaactagtatatataatattattttcgtttcaaacatcacttgaaccaccctaccaaaaaaaaaacatcacttgaaccaacaaattctaaactttatctacaatctttaataattgagctaatgacacttgatctcataattatttttaattaataaaaaaacttaaataccaaaataaacacaaatcctctcctataattttttgttgatgttgctaaagtgacattcatacaaacagagaccacattcatatattgatgataccaagagagacaataaaaaaaaacacaggaaacaacacaattaagagggaaaaaaaccgtgtaatttctacatgagaccaaactatacggttaagggtcaacctttcatgcaccaggtgctgcatctttcagcgtaccatggaagtacccaccagcataatctttgacatgagccgccgtgtcatgaattcgactccgagcataatcaacctgatccgaccttaatggatgcatgcctttaaaatatcgatacaaccacgacacaacagcccctgtagccaagatgagtccagcgagggacaagaatccggttacgataaggaacaaagggatccaaatagggcttgagataatgatgagtgggagaaaagcaatgaatccaaggacgaaagcggtgacagtgattccggtgagtaaaaggagtattccaccggagatgaagaatgcgaggaagccgaagagttgaccggagtgattaggagactgcgattgtagtagctgacggagaagagatgagagggggtggttggtggtggtgttgctgcgagggacggtggttgagttatagatgggtctctgttgggtgtggctgctagggtttgttcgatcagccattttcggcgaggagagagagagatgtgtgtgaggtgtgagaggagaaagagtgaaacaaatggagacaggtcaaggaagtgaaggcgcatgcatgcaaacacgtggagtttcggtcttgtttttcactaaattgttcttttaaaaaacaatctaactgcttgtatctaactaataatattcaatttatttcatggcattcttttttcctgttccaaattggattttggttggcaaaagttaaaattagtaagtagatatatgtattcaataagataagagtgtgtagttcatggttataaaatttagacgaccgaattgtagctcatatagcactataatgtccttttaaccggttaaaccttgtgtggcttaattatcatttctctgttgatattttgtgtttgtttctctcttttctttctctatttaattatcctgaatccatctttcaagctatttgtgtctattcatcaaaataatttggggtcattgattgccaatttgccatatccatagccatagccattcatatatgatatccatcaaagttttagtatatcttttatcttgtttgattgcatcacatgaaaccaaagaaaaacagaatctatgtagctatcaaactttatataatttagatctacaccgaatttaaccttcagttgaagtttacgtgtgacgcagggacaaactttatatcaaaccatattcaaaacaaaacaaaccataaaagtttgtgtctatgagaaaggaaaacattactactcacaaagcatacagaaatgaattttgccactaatttgtcaaatactgaaaattattctggttatctaattgctagaacgataattttttgtcacaccagttgagcaaccatatgaacatcaaaagaattaattatttgcactacatataaccactaatcaaactgtaatatatatcaattaaagttcaggaactaaaatacatggtcagaggagccacaagatttcagctcgtatgtcaatggctgaatcccttgcaaataaggttctggtgtgtaccagactggccattttgactcatccatttttctaaatgtgattgatattctgtgaataaaaagaagactcatgaataagaaaacaatgtttatatgcaaaagaaacgaatcaagattataccttttcgtgggaacttcaggtacacaatgcttagctacatcagctccattcccgtttaacacaagcactgatctgtaaagaagttaagtttttttttttttttttttggtcacatatactgttttcaagttataacgagaatgtgacataaaacatttgcaagcgcatataaatatataagaactttttttatagcacaagaacttacccaacaggaagcggtaatgaatatgaaccacccgaatattcaccggtttcctcaactttaaggtttgatccgaagagaatattgcattcactaaggaaagaaacagtacagaacgggcggaggaagtcgtgatggtcgatatgaggaggtatgcaatcaccttcatcataaatattgactacacaacaatcaggaacacaagttggaggcagaacatgccatttaaccaaccttcttatgatcaccttgaaaagatgaggcaatggatcaacagtttcatgtttaagaatccccgccaggtttccagttttgctctacaagtttactcattcagttgttgtggcactcactagaactcataaatcgagaagaagattgatcaagaactagttttacttactgtacggtagttgaaacaacagccgaattgaatagttgaacgtcctttgccttgagcagtaaaagcacgctctacatagagagatatacaaattaggatttcagatcaaaactatatagaagaaagaacaaggaatcttagctgctacttacttagttctcctttttgaaccttttcttgcaattcacacactttatcaactatccttctctgttccgctgcattaaaaacttcggtatgcaattcgagtccctctagtatgttaacaagctctccattaactttctccaagcaaacaaagtctctttttctcttcacgtttatcgcccgaatatgcgttctttgcttcctcgacagtttatgattctcaagactcgaaccaaaagcctctctacttgaatctttatgatcctcttcctcactgagctcatcctccaatgtcatatgagaaaaatctacagcaacttctgttaaagatcctaatattaatatcagcgtctttcgaattacttggcgaatgaccatcatagacaatgcacatatataatcatcaaatcattttgttactggttttattttgagtctataataaccaccattgaatatgaatcaatttacttaatcctttataccagcttgattagtgctactactagctactatgccatgattcgtcataagaaactcaaatcaaacgatggataatctaaatcccaatacaaaaagcagatagttgaatcccacaatattataactggtccttttagagttctatttttccatgaagaaaatagtgtgataagagaaattataaagaaaatctctctttacactacaaattccaagttaccattaaaaaaaatattctgctgaaccaacggttaaatccttaccttgttcttgagagcggattcgtttggagagaaggttgacttttgaagcgatctcgagttccgactgccggataaaagaatagttgtccattgcacaatatatcaaacctcatgtacgatacattaatccgtcttctaccgtttgttttggcgcttatgatcaacgaatgtaatcttgacttttgttaggtcgttgaagtcatcatatatttcgtgtcttacaagcaaattgaagttttctacatagactatagttttgtgtgaataaatttatcacttatcatttgaccgagtaattcatccaagactgagttttgcaggaatttataattgatagagagactctgtttcatcctgttttaactcaagtaattgcctttttctaaaaaaaatggttgtaaagttaacaaaaatccacgtctcagattaaaataacgttttataaaccacatgtaccttgcataatatgttgtctgcttgaatttgtctttgccagtagttgaacataatgaataacaaaaagttgaaacagtcgatgttagtatgttacatatactggaattagaattcaaaacagctgattattgcaaaatgagtagataaatataggtgcttcaaaattaatagaaaacaacgagttcgaaagtaaattcttggcatgatatgtaaatgattgtgaagtgatcctttttgtgattgtgctgatgtattgtagtgtgaattgtgtctttgaatttgcgtttagatgtgtgtttgtgtgtgtgttatttttttttttatgtatgaattacgtttgagcgtgcttagtttgtcttgtgttttgtacttttacgaccttctgttccctattttgtttttgaaaatattgttgtgacaagtgtattttgtgtatttgaattggcatttagatgtgtgtgtgtttgagtatgttgtgtttttcttgcgttttatgaaaccttttttttttttttttcaaaatcgcttttaatagtactaaagaaaatttgttcagacattaatattcttattttttttataataaagtttacataaaacttaaatgatcgatttgcatttctttgggttaaatactttttgtcacgttataaaaatcttattttatctcataataatgattacttgaaaacaaggtttaggccatttagcaaatctccccaccgttttggtcaatcctttgaatctctcctaataaaaccctaaaagatcatcatcatcatcgtcgtcgtcgtcccgctcaatggatactcgtcgcggagctcttgcggttcctaaagtccgtcgagtaggtttcttcacatcaatcgagccgcctccagaatcatcattacaacgaccaaatcgaagccaatccggtccagtagatgcaaccacctcttcttctcctctctccgattcaccttccggtaacttaatttctccggtcttaattccaccgtcgcgtcaccattccgacaatttaacctctcgcgttgctgctgctgctgctgctcctgtgcccgtccctggacctgccgctttccgccgatacttaactcctgaacggactcttcttcacgttggtagttacaatcctccggattcgcttctcgggacatcatcaccctcgagtaacggagggctttctgaggattcggcttctctgtttgggttccaacggagtgattcgacgaaattatcagcaagcttacctaatggaggctttgatttgactctagctgttagagctcctcaggaatctgaaaccaaaattgcgaccacgtctgcttctcaagggaaaaagaagatcgccgaagtttctggtatgtatacgaatctatcaatctatttaagtgtctcttgaataagctctttgtatggttgagttttgtattatccaaaagagacctttgtggtgaattgtgatccccaagtaacatcggatgaggcagcctgtagtgccgtagggactgggtaggcccggatattaatatcttctttggaatactctgttacttgatctcatggagagttttagggagaccttatagcggtatttggagaatgtttaaagttgagtttggtttagaagtctggtgagcaatttctgccaatgttgatagttcgactcttgactttgaaacaaagaggcgtgttttgaagataaagcagtcagctgttgtggacctgtggtctgtgtgaaatgcatacgtttgcggaggtggtacaacatactcccaaatcaagcacgtcaaggaagctgcatctctataatgggtaggagcagttagccagttactgtttcagaggtgtttaaatgtgaaggatgaaattgactagagcttcccacccaacaacgtgtcatcattgacacttcaatctctctgagcattatgtttcttagtttcatagtacatcaaccttcgtattcttcatgttaactcatttctacaaaaggacaattcgcagacagaccgacaacaggacatcgttatcttcaaagcataactctgttctttgcttcgtcacaagctatacctttttctcaaagttagtttttaggcaagtcttcaacattgaacgaaatgcatcatcaagttttgcttccgtactggactgcctacaaaatcctcctaaactgttgttgccatcatcgtcgaggctgggaattggtcatctatctctgttttaaactggattgcctgccttggtcttctctaacaacgaaattgccttcactgcattgccggagattggttgttagactcctgaagtaccctccttgatcagaggctttgggcttctctggaggggttattaagctccctttcaaagtggactatcctttagaattagaatttaaatagctactttgtgtttagtatcaactttgaccttatgaattgctatgggtttgagtcattcaattattgccatgcacagatgtttccttctagttttgcatttcgttacttacaggaagaataaatcctgcaggaaagagtgagtctgcgaccacaaaaccccagaaggaaaaggaaccaaaagcattgaaagataaaaccactaaagcagaaagacgtgccatccaagaggcacaacgggcagcaaaagctgctgcaaaaggttcttgttttgttcattatttttgctttgttttccatattcattaaagtggaacgtaaaatcatctaagtgcttccctcttgctaatttttaggcgaaggaagcaggcgtgcagatgagtctggtagagctaatcctggcaaggctgccataaagccccaaccaaagaaagaaagacttcccgtcacgtcctctgtttctgaaaaaacagctgtagcagtagaaaaagagaagaggatggatgtccctcagacacaaatgcagtatgatgataaaagccgagtggataaagctaagaggcgagctgtggttgaacagaccgagagcaagaacaaagttgaattatttctccatcttcctcaatacgaacgcagcaatcagcttcccaatttaagctccaattttttcacactcgattccatacaccatgcagtctataaggtacacctacttgtttatatgtgactgtgaaatgttcgttacacttttgaactggaatccttaagggtttgaaaccctgtggtttatctctgtgccatagatcctcaagtgacgtatatacatgtttttgttaatcttaggtgggtttgcaacatttggctggagatatatctggggacaatgcacgatgtattgccatgctccaagcatttcaagaagctatagaagattacagtacacctcctatgaaagacctgaccatggacttgacagccaagataaacggttatgtttcattcttgatagaatgtcgtcccctctccatgagcatgggaaacgcaatcaggttcctgaagaaccaaatcagaaaactacctgtaaacctgtcagaatcagaggcaaaaagttccctctgttctgacattggccggttcatagacgagaagacaattattgcagataaggcaatcgtgcaacacgccgtaacaaaaatcagagacggagaagttcttcttacatatggattctcttgtgtggttgaaatgattctcctatacgcccatgagattgggaaaaagttccgcgtagtgattgtagactcacgccctaaccttgaagggcaaaagctactccgtagacttgtgactcgtggcctcgactgtacctacactcatataaatgccatttcctacatcatgcgtgaggctacacgtgtttttctcggtgcttcatcaatatactcgaatggaactctttacgcaagagttggcacatcctgcattgcaatggttgcaaacgcatttagtgttcctgtaattgtttgttgtgaagcttacaagttccatgaaagagtcctacttgattcaatctgctccaacgaacttggtaaatgtttcactcgctcttcttcttgtcgattattcatttacttgaatcagagtttttttgcctgtgtgaaaaatttacaggcgatcctgacgccgtagccaacataccatcatttagaaccaatgcaaagcattcaaagacaatggacaacaacaaaaaccttcagtttctgaatctaatgtaaagcgcttcataagtggttttgagaatcatcacaaagctttattcttatttctcttaagtttgttcttatttttgtgtgttccaggtatgattctactccttcagaatatatatctatgattgtttcggattatggaatggtacgtatctctcacacattttgttatgttatgagtttggtatgcagagcaatttccatttagtgtctgatacatttgtgatttgtgtatgtgtgaatagattcctccgacgagtataccagtgattgtacgtgaatacaggagagaaaacttgttgctataaaaaggtaatgtgtttagaatattagcatacaaaatacaacagatacagtttacggaggagagaaaagcaagtatttaacataaacaatcattctttatatattttctaatgatgaattttgcattttgacactcatggaaaaattgttttcatttataccttgatcgctcgaaccaaatttttggacgagggtttgaaaaactgttcattgtttaagaataatgtgattggaatgactttctttttagtatcgagtaaaatttgtttatttgaaggtaaagttttggtgggtttgtctcaaaagcaaatatcgtagactatgaaccgacaccgtattggtctttggatctcctccggggccttgttctccatagtatggcatgaggactcggacataatctgtatggcactttagttggtgtcggaatctcaggaaccctgtttcaatcaaagtttcattttttttaatcagcactatgaaatgtttctatccaaaatatcaaactaaaaaaaaaaaactatttcaccaaatcacgtagttttaattaaaaatagacttgataacaaaagaggttaggaatcttactgtaatccagaaatttcaatttgtgaaaagtcaaaattagttaaacaatctgaagtcgctgtcgccgtcgccttagaggtcttgtgtcccttaaccttcaccggaggcgaaagttccggtgaaggctgctttatagccatcactttgcaattgaaatttctcgctacatcgatcccacttattgcccatctacacatcacaaagacacacaaagtcacaaacattactcattcgtctatgtagggttcaaaatctttaataatgaccccgtatcgatcaaaatagttcctacctgtaaagaaagctgttctgatggagaccaacgagaagcatcgaagcaccaatctctttgacaacttgagcaatcattcttccatcatcatctccttctctcacaatgatctcagtattcgtctgtcaaaattacgatcacaaaggaaaaacaaacctaaccatcaataaaatctagtaatctttccgatcaagattcatttccactcacgttgaagaaagagtcgcagatttcacggaaagagagagcaagattgtatccgtgacggcggaggagacgcgccgccgtggatttcttcttacgcggtggaggagagtacacgtggaggagtactatgacgtcaccttgacggaggaggttgtgaagtgcccattgtaacgccgtcctcgccgcttgtttatcttctacgaccaccacaatcctccgtacatcttccatttatttattctctctttctctttctttttctcgagaattgggtttaggtttagtgtcgtaattcttgtgactcactctctctctctctctcaatatgtgttgtatttgtaaataatagtataaaatggaatttctttgtagttggaaataaattaaaagtgggtcaaatgtgaagttgagtatgaaatcatggaccgtgtttttttgttattaggataaagtggtgaatatgtatgtattgcattgcatcttacactgttaggcaataacttgattttagtcttttaccatttatatttgaacatgggtttcttactatcaccttaggaatcattgttctgattaataatttgctttatgaaatagtacttgaaaaggtcattatgacggttttttaagaaaaatattgtcattgcaattgcaagtttttttagttcatgttagtattacactattaataatggaaaccataatcagtagatagagatacattaaatgcaatttgaaaaaccgaacatgaatattattggtcgtgttggtgctaaacccgcgtctattaaagtatgattcattacaatcacatctagtcatctagaaaacaatcaaaatcgttaataaattgacactttttattattagataggtgtaattggtacggtagatgaagaaaaaatcttaataacaattaagcactgtgtgagaacagtttctacttgcgcgagcaattaccatgtttggtaggacacaaattttcaacacgaattagaatgtgtcaatttaggaaaagaaaaaaaaacgaatgtaagatgtaaactattattaacaaagatttcatggagatataaagaatttaaacaaaatcaaggggtcaaaacctaaacatacagaagttttaaaagtctaataatatgacaacgcgctaagatccgaacacgtgtcaagtgaaagacttggtaaactcgaaaaggtaacgcacgaaagagggcctacaaaagtccgagtcatcagctgacagaagcatatgacttccacatatatttgacacagaatgtagtaataaagtacgaatctcacttcttgtcgtaattttcgtgtttaaggttattttacgtgagattcacgctcttcatgaacttgataagctataaaaaaagttaccaaatcctaaatcatgaaaaattttaagaaccacgaatatgttaacacaatccataaacttgacttgagccatgaatcttgtgggatacgggctttgccctccatgcccaattcggcccaaacacaaatagaacaagtcaagaaagctcctaacaaggaagaacggccatcagaacaacggcccatcagaatgactgctcggcccatcacggcttggtccaacccgataaattcagaagggcaaaacagagaaatcgcaagagagactaagagaaccctagatcagctccttgcctataaataagaggagacactactaagaagagagatccagaacctatcaccactcagagaatttaagagagaattgctgtctagctctttatctcttactttctggttttccattctgtattttctggttttccgaccattaatatcggttttccgacctgtactttcggttttccgttctgtacttacggttttccgttctgttaattactgtctttccgttcgtcattaataaagaagttactccattctccccaaaccccttaatcattattgttacaacctcggtataaacaaatccggagatggtccacataattatttttatataaatactaaatagtaaagtattcatgcaattgcgattttttttttttaataaaaagtatttttaaggaaataaaatgaagatagtgggacatgacgagaggaattggttgtatctatgagatctacttgtgcttgtcttcttcatccgtattcaggaaaaatccgcacacttgagtttctagttggaagaataaaaactatacattatctttttgcaaatatacaagtaacaaatattcataaagatatataatgccaaaaaaaaacgaaagtgattgaataaacgtcaatcatcctacattatgagatggatggatttgttttaggcaatgtaatgtgttcctgccaccaaattttgtttacgagaccgatctgatcaccaagcaaagtcgagtattgttaatgtttcaaagactttgatatagttcggtacaaactcatgtgtaaacatatgattttaatctctagccatgtcaaataggtgaatgattttaagctctagcaatgtcaaatacgtcaacaacaacatagattacttttctgagggatcaacaaataacgcataacacatgattatcacagtttttcaagttccaaaatttcgatacagtgtagaccaagagggttcaagtttttttcagggacaaaatcgtctggtgtctcagcttgaagatcctccgttcagctttcgttttttcggggatggcgacttaaataggtttcgaacagatgttaacggatcatctacctgacaacatcacgtaaagaaccatcaaagacatcagaaattggacatttatgacataagaactcatataaatgtatgtggttcttgttcgttaggatttgatcatttatctcatgctcagagagtatccaaagatatcaaatcaaggaaacgtcatgcataattttaacagggacaagggcataagttgcactctcagccaaaaaaagtttaaatactattagtcatagatcctgctattactggctacaaaaggaagttactatgatcttcttgtcgagaatacatgacaatagtcgcagttgagttatatctacccatctgtaattagctttaattccattctaatactaaaagcgagtgtaaggatgcatgaaaaagagtgtagtgggatgtttaccttgaagagggaagaggatgatggtggagtctgacaagatcctttatgccgttgtaatgcagacagagtctgtcgccatccagggcctcttctacccgttgaccagatccaaggacagaaatgcctatgttgcttgattggatcaaattccatctgtttgtttgatgtcgctgatttttctttataatcacaaagaaagatatgttaagcatagttagtgcttgtaaaaatcagagaaatttgtatttgcatttatactcttagcaatttacctgcagttgaatccctaggtttgttgttttcaggaagatttgatcttactaccatcatttgtttgtctttgttttgtagtgcaatatcactctctacatcagttgagtttcttccaccatcagccttctctcctatatcattcatcacttgattgctattttgtgtaacatcaccgttgttctctgcagttctactctgttgatcctgaatagaactgacatccccgtgatcatgatctctagagtacgaagcaaatcttgacctcaggttcctcccgataataggcagcgatattgttgctttgaagttttgctttgttgctgggggtcctcctgctatggtaaacttcaagcttgaaggttgatgttgaagggtaccacccttgggatgtttctctatattgatttcggtatcaccagtgactctacacaattctagtggtctcggaacagttgagaaaacccatagaccaacacaggccccacagagcttgcagtccagtacaacagaactaggatcagagtttaatgtgtcaggaagtgttgggttctcattattccctgatatgccatttggaattggggttgattcagagatgcttagaagctcgcgggtagcagtttctggcagtaaatcaatagtctctgtacccctagccgtctcactcaatttatctttgcagtccacaatataaggaagtgcccgcggttcccagccacataaactgataagtttttgtgcctggaaataccaatgcatcagcattacaatcagatatgactcaatattataccaaaaacctctcagaaaagatgccatagtcactaaagtgatcactagttaactgtacgctagtattttatcatatggacaacatcgaatgaataaagacgaataatttggacggaccaaattaaagtctgtagatagaggaacaataaaagaaggatcatccaattctaccaaaatctacgttagttaggaataattcatatctctagttgcaggtcaaacctggtagaaaagttgagccgggctcgctccaacatgattggtaagggattcagtttgagaactttctgctgctgtgtcactacatgcaggtgcaataggtcgtttgagaaattcctccagatctgagctcctcatgtactcaatggctgatggtgaaataacaggaagggccaaaagttgaagtaaagcttctgaccgttcttcgtgtctatcgactaaatcctgcggtgccattaacggaaactcagaaagcgtttcttcacatgaattctctatccatggacaaagtaatttgtgtccactctctaactttaagctgaagactgatgccgctttttccactgtcagatatcaaagagaagatatccaattttagtgaggacacaccatataactgtttatcagagtatcagttacatagagatgattctacgaaaaataaaattttaaccataccttgttgcttagaccaagaagatggggctgaaaagtaaagatgagctccacaagattcacaagctatagaatctgcgtcatcattcacccaccctctcctcgcacaatttacagcactaataacctaccagcacacacacaaaaaatagaatgagctaagaattttatagctaggaacatacaacaacgagatagaaatgacttaaattctaacggaaggaaaattgtggtttaaaggtcacaagaagcaaacctgtggcttggcaaaccaagtcatggacttgaaagtagcaagcctcctcataagatctcctctatcccacggcctgcaaagaccagaaggcgatgttccagcaggaaccttcaaagctgaagacctatcaatggtagctaatacaatctttggctcaaccaatgctaacgcagatgaaggattttgacgcttcttgcctcttgattgttgctctacagaagaactacacaaaccaaaggatatatacataagctgacgcagaatcataacatgaacacaagctctgatgcaaatatcacaaaatcaactaacatctgaaatcaatccaaagagcaatgtatatgaacacaaatacaaaatcatctctgagattaagcaatttatccacacttcaatcagcgaaacaatggaactcagataatggagatgaatcgatgcacagtgtaaaacagtaaccagcaagaagagactgacctggtggaggaagaaggaagctgagatttcgatggggtaaagagtttatccatgatttggtggaatctcttctctgaatcttgtgccattgtttatcttccagaaaaatcgcagcttcctctagctcgtctttctgatttcgtcctcctataatcgtataaaccctaatctaatagattcgcttccaccttcttcgccgcggctcaggtgaaggagtggtgtttagatggcggtgacggaacaacacgaaaacgacgggatctgctgtcgtttagtcctcttcatatttattccgcaaatcggaagtctcgaatattttatctattttacgaatagatccctttattctcacttcatcccatgtatcacccaaacatttcaaatatgtaaaaagaatccaaaaacacaaaaaaaaatcatcaaattatttaacgctttatgatattagtcaaaattaatacgaaaaatactcacaaaaacagattttcctcaactagtcgtatttctttgaaaacaaaaattcaaatttcaaagtagcaaataataagtcaaaacaatatctattagatatccctcaagttgtggacaagcaaagccaaactagtaacaaacctagctgcactctcacactacttaaattcaaaccttaagcaccacaaagcagaaaaactaaacattttcttcgagaacaatccctcgatatcagaaattaaacaaaagaggattcaaatgggtggacaaaagattgttctgctttcgatcttcgtatgtttttacgtgttttcacttgtgtcatgtactgaatttgaagctggaggagaaaatggttggatcattccacaatctagtaaccaaagtgacatctttaaccaatgggcttccaagaaccggtttaaagttggcgacactatccgtaagtttttcttttgcttctattatgaatttatgatcatcgtaatgcatatattgagttttgttttgatttggtggaaaggtttcaagtacaagaaagactctgttttggtggtaacagaagacgaatacaagaaatgtcagacgaccaaaccggaactttactccaaccacgatgatacggttttcaaattggaccgtcccggtttgttttatttcattagtggtgtctcaggccactgtgaacaaggtcagaaaatgattattaaagtcatggaggtggaatctacgccgcaatctcctccaccttcctcgtctctacccgcttcagctcacaagaaaaaccacgccgtgaggaaaacgagtcggttcttaggtgccggtttagttacaatttcgattctggttattacggtttttagtcttgtgtagtatggaaaacaataccactcggttatggcggttcagccgtcgagttttattccggtttaggttttgttgcttagtttatttaaggtttttttattcatttgataggttgatttgattttggtttttggtcacttcagagctttaaaataattgaactcatgtcttattttataagtttagtatccattttaattctattaaattctaggtttattgaaatacaatgttttttacctttatctaattataaacaaacaactttcaattttctataacaaaacaaaatcaaatattttgacaaattttctaaatatacactttttagaaacatctaatattttttttagaaattcaataaccctactcaaagaatcaaatccaataatggaacacgaaattattttgttatataaatttttataacaaattatgaaatttataactcattcaaccgagattgggtcaaccctataaccttataaaatttccaattagcattttgctctagctataaaaacattgtcaaaacatgatcaagtgatgcatcaaaatacatagtttgtagtccggtctaatcgcccgaacctagtttacctatacatggactttctgttaaaataaaccgacaaaagaaaactataagttatggtcttatggacatatcagaacacaaatcaatcgagcgacaaatgaattttttttgcaagaagtggataccacgaatggattacttgtccgttcacaccttatcaaaaatcaaccaaatattattctttgtaccatttttaaaattttaaaacaagatacattcatctgtttctatcaaatgcattagtcaataacgcttccatccaacggcgaataagaggtatacacgtggtgaggcatagttgattcagcttttatacacaaaagtctcgaggaacaacgtgagaagctctaacaaaacgtgaaggccacaactattatcaaaggcacataaaacacacgaacacaaaaaaagacaaagacaatgattattcagacaagtttcgtacctatttgattctctacattcctctctctcacacaccaaactcacatacacaatctctctctctttctcaacatgtctatataaatacacccacgtctatactaactcacatcatagattcacaattttgaacaaagaaaatttctttggagagaaaacttagaacttagattgacatagagaaatgaggaagtttggtggatcattgttcggcgtaagcctattgctgtccgttcttctagcggcagcaaccgcggcagcggagtactataactacggaagtgctcttgataagaccttcttgttctttgaggctcaacgatcagggaagttgccagctgctcaacgtgtcaaatggcgtggcccttctggtctcaaggatggtcttgctcaaggagtaagtccatatacacacaatgcttgcagtatagttggttaatacaatggatctcttaatacattccaaaattgatacttcctgataaataccatcgtatgaattgcaaaactagtaccaaaattaccacttcttcaactagaacatgttggctagtgtggtttgtattggttctgttcttgtatcaccatctataggttcaaacagaaaacttgttgtttggaaaaaataacacttactggcatacaatatttttttaaaaccttaaatctacaaggtattgttgtcacttgtcatcagtacaaagatttaatttgtatgaaaccttgacgtactaattccaataaagaaaatatatgaagtaataaaatgatattgaggtttgtgtatgtatgaatgaataggtgagcctggagggaggatattatgatgctggagaccatgtgaaattcggtttaccaatggctttcgcagtgacgatgctatcgtgggcagcggttgataaccggaaagagctatccagttcgaaccagatgcaacagacattatggtcaatcagatggggtactgattacttcatcaaggctcatcctcaaccaaatgttctatggggtcaagttggagatggagaatcagaccattactgttgggaacgtcccgaggacatgaccacttcaagaacagcttataagcttgacccgtaccaccctggctcggacctagccggtgaaaccgctgctgctttagccgctgcttccttggctttcaagccatttaactcctcttactctgctcttctcttatctcatgccaaagaggttcgtttgttttttgttcaactcctcttactttggtttatgaatccggttcggtttagattctcaacatttttgaaactttgtttttgtatattttagctcttctcatttgctgacaagtacagaggactatacacaaattctatcccaaatgcaaaagctttctacatgtcatctggttactcggtatatatattctctcaacactttcattctctaatccttccattgaatcttgttccactactaaaatgtctctcttgtgtatttctttgaaggatgagcttctttgggctgcagcttggctacaccgcgccaccggggatcagtattacttgaagtatgctatggacaattccggttacatgggaggaactggctggggggtgaaagagttctcttgggataacaaatacgccggtgttcaaatccttctctccaaggtaaactatagttttgttaaagaatgttcttcacggtttcaaaaatactactaatcatggtacttgtttgatttgtgtgtgtatagatcttgttagaagggaaaggcggtatatatacttcgacattgaagcaatatcaaaccaaagctgactacttcgcttgtgcttgcctcaagaagaatggtggctacaacattcaaacaactcctggtggtttaatgtatgttagagagtggaacaatctgcaatatgcatccgcggctgcgtatcttctcgcggtttattcagattatctctctgcagcaaatgctaaactcaactgccctgatggtttggtgcaacctcaggggcttcttgactttgctagatctcaggtaatgatcaaatcctcccaagaaaccgaaaatttttctcgttcttttcaatccggtaaccgaggttttcctttgcaggctgattacattcttggaaagaaccgtcaaggaatgagttatgtagttggatatggaccgaaatatccaatccgtgttcatcatagaggctcttcaatcccttcaatatttgctcaacgttcttctgtgagttgtgtacaaggatttgactcttggtatagaaggtctcagggtgatcctaatgttatttatggagctcttgttggtggacctgacgagaatgataactattccgatgaccgctcaaattacgagcaatcagaaccaacattgtcaggaacagctccacttgttggcctattcgctaaactctatggaggaagtttaggtaactaaacaataaaccttgagctcaaagtctttagctttacccttatggaatcataaagtaatgtaatgaacattttgtaggatcttatggaggaggatcatataaaccttatgaaactacaaaaccagcaggtttgatcttttttacttgcagcttccaatgcaactttttctacagtgtctgattctcatttcctctaaaactgtcacagcttcatcttacaaagcaacaccaacaacatacagtccaaagcaatcaggtgcacaaatcgagtttcttcattccataactagcaactggatagccgggaacacaagatactataggcacaaagtgatcatcaaaaacaattctcaaaaaccaatatcagatctcaagcttaagattgaagatctctcaggacctatctggggtttaaacccaacgggacagaagtatacttaccagcttcctcaatggcaaaagactttgagagcaggacaagcttatgattttgtctatgtacaaggtggccctcaagctaaagtctcagttttgagttacaactagtgagaaaacaacactttcttcaatctttttgtttatgcttattatgagtgaaagatgtgaacatagccaaccaagttgagcctaaatatgagaaatgtaaatttgtgacccttggtagagaatgcttttttgtctacctattcatatggcccatacttaggtaaaataagtaatgatagacgaagataacaatgattgaacacccaaagcactcaaaattgagcttaacttaacattcagacaaaaatttaaggttctgacagaaacttaactagaacaaaaaagaaacgaaacaataaaaggatgcgaagtatcataagttaacaacataagaagagacttttcttctacagacgcttctactcgtcaccgaaggtagtcttcttacctgcaacatatattgcaaagccaacataaacccaagaattagtgacatgttaacttgttataaagaagctagaaaacatgaatcaagaacaatttatctaaccttggggagtaaaactaggtcttccacgaccacgatcacttcccctgccaccaccactaccaaaacgaccacgacctccatctcttcctctgccaccaccactaccaaaacgaccacgacctccatctcttcctctgccaccaccactaccgaaacgaccattgccccttccaaatccaccaccaccactgctatctcctctcggtctaggctcatcgactacaagatagaatcctcctcccatatcacttccatttagttccaacgccttctctttgccttctgaaaactcaaggtaagcaattctgaggagaaaaaaaacattaatttagttagcacttaactttcaatagagaaaattcacaaactaatgacaactaagagagagtaataatcactaaccctttggagttaccagtgtcacggtcaattggaacagatacatttttgatctctccacatgaactgaaatgttccctcaaagtgttcttgatatcatcctcagaaagtgaagcgtcaaatcccttaacgaaaattttcttttcatcaccaccatcaccaccacttctgaagttgctgcaataatttaaataagagaatattatcaacatatggaactattttacaagaaacaaaaactccaaatcatggaagactaacatacccgctttgtggagtgaatgcgggtctctcgcctctctcacctctctcctgagcaatatcaagacgaatctcacgaccgagcaatggcctaccatggaattc

SEQ ID NO: 1006 - DNA, 104679 bp, Arabidopsis thaliana
gaattccttagattctcttctggtcgagatccacggttaatcaacgacttcgaatgcgtcggtaatttaaatctctattgtttttttttaattcttgtgaaaattgtgtgatggttctgaaaaaaaattgaaattttgcagattctaagtttgatgttttccctggattttggacgatgggattcggtagggacaacgttaatgggagctataaaatagtgagaatgttgtttgatcgtcatttcgagaaccgctattgccagattctagatgttaatattggggaatggcgaaaacaaagacagcctccttactttgtgggatatagagagaagtccgcttgtgtgaatgggtccatctactggtcacaagcactcattcgttgcaaattactagcttttgatctttactcggaagaatttcgtgatgtcccaacaccgcctcgatccgaaatatgcgaaaggtcatgccaaatagtgaatcttgaagaccgtctagtcttagccgtaacctatactacgagtcttcattggaatgttaagatatggagcatggatgcacacgatggaacacggagcattacttactccatacgtttattctctaaagatatgaactctagtattatgaaccatttccaattgtggttttggactaggccactggcggtttctaagcgagggaatcttttcttccatgataatgagaagaggttatagaaatattatacaaagactgacgaggttcgtatcctcgagagagacatatgtgttatttctccttttattgagaatttgctcccacttcgacgtccagattctgttaccaagataaggacatacggatttcagtttcttgatcacgcgccgagatcccggatatccaattttctaaaacgactcgaaaaccaaaataatttgcttaccaccgctgctgctgctgtggctcttgcgactcttgtatattttatacattaggatttcggtatctagatctcacttggcgagctagttcttgatattactagtttattgggacaatacttcaaaatttattgttcgtttacggattgaccaagtaaaaatattgctttgcttgttgtgtataactgtgtagctgtaggttggtgcaaaacttggagtgatgttatgaatatcaaaggtaatccttatcttaatcaaccgttgtgctccgctttgtagtggaacatactaggaagagtagtagaatagtaatcgacaaatcaggagaggttctgatcatttggagcacaagaacatcttcaaagagaagtgtttgttttacatcttcaagatgaatctggtcaagagagtagtttctcttgaaaatgagatgttgatatatgatcatgggactcacattgagagcatttgctgatggtagtgaaagaatcaagagtgactatctgtttggtggaagatgatatttggccaagttatgagaatactaatccacagaggagaggttctggtcattccgagtagattctcttggtgatatttggccaatggactcacagtaatagtatgaagaaataaaagatcacataaatccactaaacttggttatcaattatcactcagtttataaaacaaactcactgaaatcaagaccacaattcaagcttcaaaagctcataattaaatttctcttgcatggtaatgctcatagttttttttttccgttttaattcctctggattaataagctggtttctgcataggagcttgggtacttgtcgataataagggtcaccttcaagctcgatatgttccaccattttataatcgttttgcaacagaattacaatgtctcttacggtaattggttactgatgttgagtcctcgtacccatttttccgtcttaaacgtgtttattggcgagaaaatcaatcttctatctctatcactccaaagaggtaaagtgagattccgaagaatagacgatggcggagtctaccacgaacactctcctaaggatcgtgagacaatcatcaacatgtttatcaaggcggctgttttatggattgatgagataacgaaagattttgtggtttgttggatataccaccgatcagtacttgttctcttacaagaaaggagatgattcttgatggcatcttgaagacataaagtgtttagctatggcttacaaaagaaaaaagctttgtgtttatacatggtttcattacatcaagattcttgatatattatttctctgatgatttcccgaatgagatcatctaagaaaacccgtatctgaatcatatagaacatttaactttaaaactattaaatgtaatttatcaacataaaatctaataaaagtgatgaaaaaaaaatatatatataataaaagaaaatgtaaaaaaaaatttgatttgtagaatagaattgttgaatactaagaaaacaaatctttggaatagggaaaatatctaatcatcattaattgtgttacatgaatgttcatagatttcgcataatctaaagaatttttatcttaattgttaaaaaaagaagaagattctttcttaatttattcaaccatattattatacaagtccaataagaaattacattttcttcattttaccattttattatataagtttctagtcaaagtcaatttctaaaatatttcattatgccaatttatttaaaaaaggaaagaaaatattttgttttctataatatcaaaatttaaaccactaagagctttatcataaaatagaatatagtaaaataaaggggtaaaaatctgaaaacatctattagtgaaaaatatacttttaaatatattttattttcctttttctgaactttgaatctatcatataagaaaatggaataactctcaaatttcaccatcacttcaacttttgcattctggtcatcttcaattcatttctccaaatccatacaattagtttatttactctcaaacccattattcaaatctttaatctctaccgactttgtgctttagacctcttttggtgatgtcaacatttggatatggatagatttttttgatatgagtcagttgagtatcttcaaatcaactgattcataccaaaaaaaatctgaccatgtccaaaatttgatatcgcaaaaagaaagtccaatcctgttagctagaatatttgatatcgagcgtgtggcaatataaattccaaacaatatgtaatttgtagttatctcagcgtttattttctcttcacataatccagttattgaaatatatgccctattatatgtggtaatagttagctggcagtgtaaatagatttggaccatttcgaaatctgctctaatctcttaagaaaagggttttagacttttaggttaaatcaaattagttcctctcacattggtacgccaaaagctgtctgatcatctcgagtgtgttttaaatttaatatagcttttgacccgaatttcttttcgccaaaacaaattaaacgacagctaaccttttctcgtgctgcatgaattaactaattatcttagcctttatttgatcccattttattatatttgagttataaattacaagataaacatgcatgcacaaacgtcgtcgtcttgtttccagtttccatcttatcacataaaaactcacaaaaaaaaccccaatattaaaacaaaagagaccctggaaactgatccgacagtggcagtaattgttagggattttgggaataattcatattttatttgagaatatttatttttatgtttttgtgagaaaatataaataactaaaataagaggcacaacaaaagaaggatgagctgggaagcacgtgtgaaggagagagaagcacgtgcaacaaagacagtgcagggttgaccggagaccgtagggtcgcgagaagtgggagacgcactgtcccctacacacgccttctgcgacaccgttttgcctttaataaaatgaaacctaaaaatattttgttttgattttagattattatttgaaatgaatgaataagtccaacagctagaagagtcatgccaaataataaaaattaatatattaaaatacaaaacaactcgtatcataaatactagtatgtgatttagagtcgactaaaaaagatagagcaaaatcaattacataataaaagaaaatgtgtatattaataatggaccaacctcttttgtaattgtttaacacttggaccaagctggacccaatcttaaacactcatgtcctcactgttcattaagattctctgaccttttgactcatccaattttttttggctgtaataagtcttcattttatattggcgaggtccgccattaatttaaaatcgtatttgtgatggttgggtatataattgagtacataaatttgtaaatcaaataaaaaaattaacttggtatacaaaacctagacatatggtcgtgggagttcgactaatcttagtgcttctcctccccaattattcgtttggtgtatagtgtgtagtttttcgtgaattgattggtcaattgacgtttgattgtattgtaaacagatttgcttattatttttctttgaataaccaattctttggttgtaagttatagccatcaccggttaatgaattttaacagaaaatgttatggaaatagtcaccattattgatttaatgcaaccaataacataattttaaaatattgtctcttatttttctacgggaagatgggtggacaaaggcaagagacaataatcacaaacttctttattgttcccataaggtcaagccaatgacaggcggattttgttcttctcgtcttctctccttctctcaatttaattaggtaaatcaatactattcaaaacaaaaggaaaataaaaagaacaaaacaaaagaaatagaaagaaaacagacaataatacggtccaagtccatggatcttatccctgctcccgaatttatatgattttgatataattgtcttagaatatttgtcttcattcgatgatttatttatctcaaataattctgtaaattcttgtactttcccgacattacatttgtaaattctagcatcaaatttaaactccaacaaagttacagtctggattctttttcttttcgtttaaattatttaccatgcacattgtaccaaccaatcataattgttccaatgagacatatatctatctttataatccatgcaagtctttgattagcttctaattaattagttgttattaggctattggttattttaccatgatgcaatggcaagttttatttcaatcgagaaaaagatgttatgtgatgtcaatatagtcaaagtcgagacaaagttaactttgaagatttgatcataattagcaactaaacaataaacattgacctattcgaggattgaccgttaaaaaaggtgaaaacaggataaaaaaaagagtaatttctatcagcgacgtaaatttgaaaacagtcaaaagttattctataaaagacaaaacagtcaaactattttaattggtcttgttatgatctattttggtaatgtgattataggcttgatgtaacacaagtgagtgggagctgtcttgtgggtcctaatttcgttcccagtctttcgcatttttgtttgaccaaatttattgattttataaattttatactacacacgattgatataatcaatataatttttttatataaataggtaataataaatctggtggttgtatacgttcctgtatacaactggtgatatgaattctcaataggaatataaattttgttaacaaataatagatatgaaagcatataatatatatttcattgtttgtgatatcagtttatcaaaaccgaaaatcatatatacttgaatatagatgccttaagcttcacttctaagattagatattttgtttccaacaaaaaaagtttgttttctgacccaaaggaaaaaaattgtgacttttctcaaccatgcgcatggaaataaagagtttgggacatactagtaacctatgattaatgcaaccggaataagtacaaatacaattagttttaattacgaacgaatcgaacaaaacaaaacatgtgaatatgacctaatacacttttttttttttttttttttttgcggggttctaaaccaaaacaaaattgtgacaccaatatctctacgcatgaactaaaaattaaacaaagcaaaacttagattccatttcaatatttcatatacaccctattttattttccaatacatatattcattctgttttatgaagagtttcttaaaaactttcacacattatatatattttttttaaaagcataattgatcatttttcatttgtttttcttatagtttttgcttgatttaacacaatctgtttactctctcaaaattaattcagatcatatagtattattttgaatttaatttgaactaagcaacaaagttataaaagccacacgtgtggcgcatagcctgcacagataaggtccatcgtcttccttccttctctctcaattccaaattcttcaaagctcagaacaaaaaattcctccaaaaaaaaaaatgccggggaatttagagccgttggatctcggaatccaaataccataccatttcagatgcccaatctcacttgacctaatgtctgatcccgtaaccatctccaccggccaaacttacgaccgaaccagcatcgactcatggatcgctatgggcaacaccacttgtccagtcacacgtgtcgctctctccgacttcactctcatccctaaccacactctccgccgtcttatccaagaatggtgcgtcgctaaccgctctaacggcgtcgaacggattcctacacctaaacaaccggcggatccaatctccgttaggtcacttctcagtcaagcatccgcaattaccggaactcacgtctctgttcgttcacgcgccgccgctattcgtcgtttgagaggattagctagagatagtgagaagaatcgcgttttgatcgctggtcataacgcgagggagattttggtgaggattttgttcgccgatattgaaacgacgtcgttgtcttcggagcttgtttctgagtcgcttgctcttttggttttattgcatatgacggagacggagtgtgaagctgttgcgtcggatcctagtcgggtcgggtttatgacccgattgttgtttgattcttcgattgaaattagggttaacgccgccgcgttgattgagatggtgttgaccggagcgaaatccatggatctgaaattgatcatttccggatctgattcgatattcgaaggcgttctcgatcttctcaagaatccgatttcatcgcggcgagctttgaagatcggaatcaaagcgattttcgctctctgtctcgtgaaacaaacgagacatctagcgatctccgccggagctccggggattttaatcgaccgtctcgcggcggatttcgataggtgtgatacggagcgaggtttagcgacagtggagcttctttgccgattaccagaaggatgtgctgcgtttggtgagcatgctttgacggtgccgctaatggtgaagacgatattaagagtttcagatagagcgacggagtacgcggcgggagcgttgttggctttatgtacggcggaggaacggtgtagagatgaagctgcggcggcgggattggtgacgcagttgttgcttctggtgcagagtgattgtacggagagagcgaagagaaaagctcagatgcttttgaagcttctcagagactcttggcctgacgattctaccgttcattccgacgatttcaatcgtagcgaagtggcgccgttttgagtttttttttttttttttggtttaacaagttatttattctttcttagaaaatttagagtagtcttaattgtgtaattaatttttaaaacaacaaaaattcatgagtctttttcttcgtaattgtttgtgagcctttctttgatctaattttcgagaaaatttggggtaaaagaacttgaacatatatttgtccagaactaaagtttgcctaaatctcttctaagtgagattcaaactagggttcttacttcttagctattgacccaaaaaaaaaaaaaaaaactactgacatcaaatactccattctaatatgtatgttatcagaaaaagactctacgcgaccgaaagctagacaaaaaccgataagattacaaatatcagtaatcaaatttgttatttttgtttgtgagtatgcttagttccgtgtaattttcttgtgtatttgggttgaaaatagatgtaagtttttctacaatcattgttttgtttcttagtttttgaaggagttgaatttgtaaataaaatacatatcagctggtaggtatgcacatattatttattcattgatgcacacttaaggtatgtattgaaatggttaggtagccattttttcttttttttttaataaaaaaattcattccatattttttctttaacatcaggtacagtagtttgctttcattatgatttccaaaacatagatgttgatttatgatatttgcccaaaaaaaaaaaaaaaaaatgttgatttatgattttcagtttgatcatgggcttgatgtttgttgcgaagcccaagtccattcatatatgagttgcgtttaacaaattaaacatccttcaacttacaacaaaaacaattagtcgtctggtggttaccgtgacaattgatccccattgaaagccgggttcgacacgggggacgcgaggctgtgaggaaacttgcgcttaaatgatggatttgggttcatcaccatcgtctgaaatattgacgagttagtgcgcatctgagcttcttttttttttcctgattttttggcttgtttattttctaaactaaaagatatatatttatgtaataatggaaatgtaccagaagtggataacgtttctagctgaaaattcatcatcttctagtggtttctttgtttccctttttatatattgaattctggtcttcaattaaaatatcctcatcaagaagtttgatgataaatatcaaggctaaaacggatgaagagtatgaaaagaaagatattggattagaattggatgatccaatattggattagttagatcttcatttgctctagcgtttagtaattgtttaaacttgggtctaacagtataacaaattttccatactcaaaaactaattgacagtaagtatattggttagtgttatgttttttttttcttacacttcaaaagcgacatctttataacatctctatcggttgaaaaacttaaaataatatctcatcaatataatatcaataattttaatataatttagttatataattaaaatttaatttaaaatgaaaattgaaccactaaaaagacaagtgtctcaagagtctctttagagtttatcaaatgagaattgattatctctctttttgtttttgtttttgttttttcccttttaatggacaaaaaccattgatgaaaatgttttacgtgcctccaaattgatggtttttattggcccatttcgaaacgaatcccatgtaggactgacaataaactctactttgatcacttaacttctgatttgtaaactgctcatagatttattttctcctaaaatgatgagtctagctagtaatagaaaaaacaaacataaatgtacatgaacatgaacatgattaaaaaaaagtcgatagattaaaaaaattggatggataatatatatcataacacaaagcatcaaatatatagttgaaagatcatatgaagtttttagttttgaactacgttcatattaataaatctgatcttatcgtcaatatactgaattcaaaatcatgtttcagttaattgaaaatttattcatgcataagaaaaaaaaagtttagtataaggtgttgggaaaaatatttgttcactcccaaaaatgaaaaatgagaagccagaaactagatataggtatttgtttgagtaaaaatataaatgcttatagagttctagtccttgttgaaaagaaaagaaaaacatcttaagcttcaaagaaatggtgaacttaaatatctcatttgataacatttgccaatacattgataaagaagataaaattaaaattgcgaaaaaaacaatgtccgaagaagctatatatcttctcttattcctttttttttctttctttccttctgatgatggggtttaaagtgaaaagtccaagctaatctctctgcataagccttgggacttcgcaaagaaaacaaaccctgaaaatacttaaaactcaaaccgaagcagccagttatgatttatagagatgaaaaatataacaccagttcttgagaaacttgcttgaaaacgtctacaactccaagaccatttcccagtaactgattctcacaactcggatttacctgtttcatcacataaaaaaaaagaaccatggtaaataatagatgtcaccacatatcatatgataaaaatggttatatgtataagatacctgtgcttggatcacgtaggtgctccagaaaacattagaggagacattagcaaacaaaacctccatgttgtacttctcaaacaagtaacaaacagaagtgaaaacccctggtttgtgtttagggacacacaaattgaagaaagcttcattcccacagatagtcagcaccacgttacgtgaggaccaagtatcgaaattcacgatcggatcattacaagggtaaggcaggttcgcagcagcggcactggaagaagatacctgatcggccaagaaagctgcgcgagggtaagaatctgttgcggtggcgtctatgggatggtttgatattggtgtgaggagagctgttggagaagaggatgatgatggagcataagcaaaagttgtagtaggagttgtgtttgttgaggcagaagaatactgaagcttctcaagcttttgcatttcaagtttttgcaaagtttgttcaagggatttgattgaactcactgcttcatctacaattgttgatttgtctgcctgtcgatcatatcatacataaaatattagaatatatgattctatataacgtaagaaatccgacacataaatgtacatatcagttcatatattatttattatatgtagtgctttaaaaccggagcctttttaccatgtgtaatcggtggattcaaataggactcctgttttttttataaattagatgtattagctaagatctatattagatctatatcctataatcctataagaaaattatcaaatatacatttcataaaaatttactaagttaactataatatatacataactgataacacccacaagaaaaaattatgaaaagaggaagaagaaatgtgagaaagacaagcaagtaaagagaaatcgaaagcatggcgaccttgccaaatcacaccaaatttaagtgacatagttatattaattaaaagcgcaaagatgtgaaacaaaacctgaaaaggaacaagcgtaagcatgatatcttaaaacatgtcaatcggcaaaagaatgaaacataagagaatcttatgctaacttaacatatataaaaactatgttataaaattgttctgattggtaataaacagaatgacggtataaaaaatagaagaagaaatctacagatctaaataaaattgatgagtttataacctgtcgtttcaccaaaaataagtcattcttttgcatttggataagcctagaccattctctgaatgcaaatgttattttcaggatgaaattggattttttttagttatatgtatatgcatatctgtaattttatatgattggtaattcatacagataatcgtgttataaacacacaattttcgcatataaattaccggttaaaaacgatggtaattaatatatgaatttcatgctaaataagaaaaaatccttcaattaaagcatacactcttattattgaatcataccttaggaggaagttggggaagcaaagcatgtaatttagaaaacatgtccctcatcttctttctcctttctctttcggtccatatatgtatttcatgatcaggtgattcttcttcatggtttttatcatttcttttcgttctcttttttccctttttaaccgtcgtagtctggatctctggcgacggatgagacggatgtgatggaagcggttctttctcgattcttttgcaaccacctccggaatcatcagaattggatatgccccacataaaaccctcttgccccaactcttgagcattagtcatattgaattgaatgctcattttaccctttttgctttgttgtgtttattgtgattttatgaatgacttatataaagagagagagagagagaaagaaaagatggtgaaaaagaaataggagaagatagagatttataaagagctaagtaagctcacagcaaaaccccaaaatacaatcataagacaaggccgttactaagacatcaaaatcaaaaagggtatttggttacttttctttctttctttcatgaagttcttaggggatttttttcttcttaaatataatatttaagaattgtttataagaccaaaatttcattgttgataagtaattaaacgagtggtcgtaaattcatacgcgttttctctattttcatttaaatatctcttttaaataggtaaataattaagataattagtctctaatttaatgcgatcttatctttctatgaaaattcaactttatataatgtatattattgaaaataggtaggtaagtaattcactatatagtaaatataaccataataagtcaaaataaaattgtactacttcataattatagaatgtactaatattctctaaaacgtgataaactcgttattttcttctgtcaaactttctgcattattatatttccattcgtagttaatagggtgttattcaattatggatttaaagtgagtttctaagttttataatcaataagatttgaaatttaatattatttttaagaatttattgtgtgaatttcaaaactctttattataccttagattaaaatgaattcatatcttttcatataacatcatgaaatttccaccaataacctgtaaatgttttaatgaatttttttcttcgttatttcaattttaagaccattgtgaattcaacaaatttagacctgatatcatttttcaaaatgactctttttaaacaaaattgatgattaattttcataattaaaacatatttttctcaccaaattttacaagatgcaaaatgattttcttaaaatatatataaaggtctcaaaggatttttaaaatgtgataatactacatctgaacatcgttaaaaatcatgttgaacgggtaactataaatcatgtagtttaaagatatactcgtgagtaaatctagtttttatgtatattattcagttttgtagtgatacattcatgtaagaattcttacttaacaaactaattaatatctgtaatttaattattcgagtgttgaataagtgtaatttgaactttttgttaagatatgatttgtagtaccaaaccattccgtctactaccgatctatcaacagtactactcttggtaatggaaggtttgttgttttagaaagctaatcaactttgtcaaagtgtactacaattttttttgttttttataaaaatttcgttgttactctctataatacacttaactgtgaaattcatgagagctctcaaaaattaagtgtattaacgtccaagagaactattttgaaaaaaaaaaataacgtacaaatacttcttacgcatataaacaaaattgaacctaattgattaagattttcgtattatgccaccacaccctgatttgtctctagcgtatttagttctcaacgttcgaatcatttatgtaacacagtaaaaaacaaaaaagaatattgaacagtttaggcaattagaataacagttgtattattcaacttttatatatgaattgtttctttacaaaaaaacgtttaaaaaatatatattgcatatattactaatttttttgttaaccctattaatatttattttcatcggaaaaaacggtttttactgaaatctgtatataacatttaaattcaatgaaatctgtatgtctttttttttcttttcgaaaatatgtatgtgtcttataataagaaatatgtatgtatcttataaaaagaactctgtatctgaaatgaagaataatttaaaaacaaagaatattccaaattttaaaattcgttacaacgtaacacaaattttagtatctttactaattaatattttatgtgatctctcgtttgaacaatataagttctttatcagagaagttgttactccaattttaaaaagaacaaaagttgtaattatgacccttaattaacttgtgattatcttaactgtctaataagtatagggtggtaaaagtgagcgttatctttatggttttcagtgcatgtaatcattgatcgccagagatttgaagtgtctctttcttctttctttttctcgtaaaaacaaacttttaaaattaaattaaattgtctgaatccgttcatattcaattacgagtttttgaacttattccttacctaatgaaagactggatttttaatattttattacatacataagacaaaactgggaattttagagttgggtaacgtggcaatcattcacacaccacaattgagtctaattttggattttagcaatggaaatggggaaaaaatccatgaagattaagttttgctaaattgtaaaaattaaaagctattataagtaatttccccatttcttttttccattagagccttccatgttctttttatgttgaggaaatatgcatgtatgtattttataaagatacaatatttatttatattattttataaatacatatattatgtataaagatattaagagaaaatagaataaataacaccttaacgaaaaaaaaaggaacatcatcaattttgctgattttttttatttgtacaaccactgttgctcagttttcttctaagattttgaagacaatgttttttacttgtaataatatttatctttttatttatcaactgatgttaccatttaccaaaaataaatctatagtacaaaaacattaaaatatttgaacaaaactatatgcatcatataattagtttgggaaaaaaattttgttctaaacgttacttgtttctttgaaaaaaaaaaagaaaaaaaaaatttgctcgtttctaaatactggtagcagaatgtcaaaatgataatgatattaattgggacgatcagttcatatatacaaaggttttgttttgccatacatgacttcaactgctcttctgctaaaatggataacatgaaaagcatttaggcccgtataagtaataagatgatatcatatacagtaaaaactccataaattaataacgttggaataattcatctgttaatttatagaaatatttacgcaaaatataatattatattatttcttaattttttttttacttcaatttttttatactttgttgtttgcatatttcattatgttaaaaaaaaaattatttttctttagattttgagaatcacattcaagaatttgaagttatgattaacaattttggttatcgaaatagaattgatatcaatatcctactcgattattcgggtgaaaataaagcatgtttagaagtttatagtttaaaagaaattatagcttttgtttgtaatgttggtaaagaagttgaagacgataatgtagaatttttggaaatagtgacacgtaaggaagcaattatcgcatctacaatttttcacaatttttggatgtagatcgagaagacaacaccaagagtttttgatgtaataagaaaattagagatgaacttcaacgagattcgaacttttagaaaagacaaacaacattagacttattttatattagattattttagaatgtatgcttaagatttatgatattattgagaccatatttttacatagagatttaaaaatatatatatatatatatattttatgattttagttaatttttatattggtccaatttaggactggcaaaattaattagtttaaagagtttattaatttatcgaatttctagtgtatgttagacaattgcaattctaactcaattcaaatcaatagaggaaaggagatgttaatagtttcgactatacggctgtttccaacgattcccaagatgcaaaggagattgatcctctgccaccaggtttggtcttcttgaatgtaggagacaacgaaagcttttttacaaacaatttgaagatagcgagggttttgatgtgaactaggatagttttaactacgtgttatctgttgttaactttgactggaaaccatctatagatgataaacagagcaatgaagagctgctcaaattctcatagaaacagccatcaaagaacacgatgaagaatatggaacaaaactcgagtatgtcaattgtcaagtatgtgaatgcaaatattactacatgcatgggtcttatgaattatgtaacactttcggctagagaccttatctcatcaaaaccaagagcttaaactttaccaagcaaaggccaagtttcgtgatgagatataggttgttatggtcaggccaaggccaattcagtaactaagtcgataaggttattccaaggcccgtttgatttctcccagtctgttttcggaagcaagaataatttcctagaaaagccctgtaaacttattgttacattgatcattcgaagcttttaaaccaaattttatacccaaaagtcgaaactctagacaaaagccaaacaataccctatcaaatgagcagtgtaggtaaaaaaaggtgagagtaacgatacaaaacttcccaaagtattaagaaaatcaaaaacacagaaggaaaatgttaaaactctcgcccaaaacaaaaactcaaaaatccaaaactttcaagaacaactctgtttctgattctccaaaagaacaaaataaacacttttacagtgtatataaactgagctctttcagatataacttagaactctcaaggtacgatgttgtctccaagagacagagaagctaactgatcagctgcaccacccgcttgctgctgtgctacactcctcagaacatccattgcttctgtaactttagctttaagtgcctctggtgattccagcaagtgaagtacttcggtttggtccatttcaagaagcattcccgtgactttagctgcggattctggctccagctgctccacaagcgggtatagattctcaccaagcatctgtataacgaagaaacataacaggtttaagaaagacacatttttcttagttgtttccgagctgttagaaacaaatcatttgactttaccgttctctgttgctctggagctgcattcgcaagccgtgtagccaaagctacaataggaacaggttgagaagtaggcgagtcacgatgatgcacaccaccaccacttgagacgtcatatggaacagaaagcatgttttgagtaggaccaggcattgtgtttacatctcgctgaggataccgatacattcgacctcttggatgcatctgtagagaaacagattgatgcaaaatgtaagcatgctatcgattttaaacatgtggagaaagtcttgggcctaaagcaaaacttaacctgctgctgcatcataggagaaggttgttgtggttgtggaagagctcctcttctaccaccaccaggtcgctgctgctgctgttgctgctgttgctgttgctggccttgttgcatcataggcatgaagaagtttggcattggagacccaccaggtctcatacccggtacaagctgttgttgatatccgaatccaggctgttcgatacccagttggagaagaaagttataaagattggtctcaaatgttttatgcttaaagctttgagctttacctgaggaatcatagcaggaggcccttgaccatagaagagttgctgacccattggtggaccacctggtggatacatttgcatcctaggaccaaccgcaggtggcatattgaccggcctcatctgtgaaaattgagcctaaaatgccagagaggtcaaattaagcacgataagcatgggattaggataatccttttcaaggataacaacatgggtaaattaaccagacctgtaacctagctttgcggtcttctttccgctgcgcaagagcaacatatagaggtttggtaacgatcatttttccattcatctctgtaatctgaaacattgaaaagaagacagtgttaagcatcaagatccttccagagaataggagatcaccaaaatttgacatgtcttctttatattctagtcacttacagctctagttgcttcctcaggagttgaaaatgcgacaaatccagatcctctactcactccactggggtcacgcatcacctgtcacgttcaaatgtaatacattttaatgcaaatctgctgaagatagtaacaagcagcgctttttattgtatcagtcacggaccttgcatgatgtaatagttccaaagggagcaaaatgttctctgagcttatcatctgtgacgctctcatccaagttcttaacatataagttcgacccctgagacttgtctgcagcctccttcaaactttgctcaaacttttgtttgagttcagtttccctctcggacttcttttgggccttcccaacaaaccactccttgtcgtcaaaggtctttccatttagagcgtcaacagctctggctgcatcatcagaattctcaaaattgacaaatccaaagcctttagactttccttcaccatctctcatgataacacaactagtagtcactccgaactctccaaaaactttgttaagctcttcatcactcaaggactcggagagatttttgacataaacattagtgaacttaactttctcacccgaaggatctctctgcagcttgtgaacaaagggtccaacataaacttgcttatcgttaagaagcattccattcagtttatcaatggctccctgagctgcttcatcagtgtcgtactgcacaaacccatagcctttcgactgaccagagggatcaacggccactttgcaagatagaatgggaccaaaggctgaaaatgtctcgtgaagtgctttgtgatcaattgatttgtcaagattctgagacacagataataaaccatgtcaataaacaaacaaactttgagataggatattaaacaagccaaggtttctttccatctctgcatagaagttcaaacttggacaataggaaaaagagatttaatatatgtaccttaataaatatattaccaactccgctcttacggagacttggatcacgaacagaatacataactcttatagcccttccattaagagccatgaaattcagctcattcagtgccctggaagctgtcaccaatcagaaatattaacatcaacataactcaaatcattcatttctgtaagaagaataacattgagtctactcataacattgaggtcataactctaactctatgacctcaaaagaaaactatcctccctaacagccaaataccctgaaagcccacaatgttaccaaatgtaaccactttccaaattaacctgaaagctttcaccttttttatagaaagctcccaaatttagattagcatttgatataacacatcagtccataccccaaattcagatgagctacaacgactaagttaccaaatcagataagccttaagaaagttaccatcttgaggagttgcatagttaacgtagccatagcctagagatctccgagtcgtcatgtctctgcagacacggacagaaaccacctgacccgcttgggtaaacgcctcaaacagctgtgaatccgtcacggtcgcatccagatcaccgacatataaagacgtcgtcccttgctgcgcagctccggcagccgccgccgcagctccagccgcagccgccgcagcttcagccgcagcagcaccgggaacagctacaccaccattggcattttgaccctgatgctgaatctgagccatttttcgagatatcaatccgaattacctatctatctatcttcttctcctctccaaatcagctcaaatcaaaagataaagcagagatttttaggagatgaatcctcaacgccggagaataaaaattgagtctttgaatcggaagaaggaaggaaaatggggaagtaaccgacggcgagagttgcagcgttgagcttagataaaagggtcagaggaagtgaccttatcagagagaagctcaaatgaaaaaaaactgcaaagaggaaagacaacttggaggtttcagtgtttatatatggaaggtttcaccaaaccctaaaagctttgatggtaatttgagaaatctcagccgttggatttacactgtagtgtgtcttgttgtgggtcacacacttgtataaaatatgcgttgggaaatatcttaccattttattttattttattgggcaaaagtatttgtgctcaaaaatatataaccgtattcagactaatgaggagtaattactaatgagattagaaaaacaagaatcagtgtaagtgtagtgatgttttatttaagaaaatttgttaaaattattagtatgtactgtagtaaattttctgcaaggtaaattagaaagtgaagtgatttttgtataaaaaggataaaatatgaaatagctgtagtaactgtcaaaaaaaaatatgttcgttcagacatatttaattattattagtaaataccattgaatgaccatgcaaatttatgaaaatagctaagaagttgtaaagtttttgattaatttgcaaaaaatataaaatggtgctctttttctaaaagaacacataaaattttaaataacatgcagttatctaacaatttggttatctatctctccacatacatgtgaatatgtgatgtaatgcatgaaactaaaaacatgggggactttttaaaaaaccttttctagcttgcgttatgagaaaagttttaagaagtttcgaaatcgttatgttgcaacttcatacctcagtcaaggataatagaggctaaagatagtagataattaaaaatgggccaacaaatcttgtgaaccagtttcttgatgtcttggaaaattatggaccgaaattctagcctgtattgggcccaatcttgcataatttaaaattagtcgatcgaacataactctttttgcctttctaactgtttttagtatctcttcagcgtgaaatgtgtaataacaatatcatctcttctattttcagtcagaagaaattgaaacatggtataccgaaatcagtttatgctaattcagaaggtaaatttttttaacagattggtaacgaccgttatttttggctttagaaggtttgactttaaaaatttgaggtacaaagaatttagctgtaaagactttggctgttaaaatcagattggtaaaacaaagttgtagaagctgtgactgttattttttattagtaacaataaaactttattactgatttttaaaaatatatattattcattcatttttaaaagaccaaacattgcattatttatatttattgtttcatgcacttaatatccaaacacttaatatccaaacacattaataattaaaatactcatcttgaatgattcttatggctaaatttttttctcaaaactgttttgaatgatttttttgacttatcataaaatcaacaaatttattaatgataatgaaatgacatctaactttattagtgttgatgataaaaaataaaattattattagtgaaatggatcttaaaaaaaaattagtaacttgataataattattaatcaaaaacgttttgaaaaaagaaatatgtaatttgtagagaacttttaattatgtttagagaagaaaacgaaaagcttttaatttgttttaaaagcctcatttacgtgactttcaaaaagaaaaataaaggaaaaagaaaaaaaaaagctttaaaaacttccaaaaaaaataaagtgaaaaaagtctgattggcaaaaaaaatactacaaaggctttaaaatccatttgaagccgtgaaagcagtgaagccgtgaccctatgaggttatgtcaatgttgtgataatgttgcctattttctttctctataaagggatagttatcattagttgaagaatgctaggatgttatgtaaataagaaagttaagcaatgttttcagtaaatttcttttagcacaaatttactatttttaagtgatgtctaatccaatttctttccaagttcaattttctttctctgcccatatctttacaaaccattatttttcggggtgaaactagttttgagaacaagttcgaacaaatggttgaaacttgagttgctttacggtatagtcaaatcatttgaaaaaaccatgttattaatttggaattccgactttctagtcatacaaaaaaaacaataaatgaaatacgagaaaagtagtgagtgagaaaagtgaaaatataatattcatacctcttgtttcatataacgttctaccaatcctcttgttcctgcatattaaaagtaactcatatcagaggagacatgttgtatcaaacaacaagcaacaacagataaacatttatctttttttttagtttctttttttaaaaccaagttgactatgttttagagcatcttcaatggtgagtttttaatattaattaatcaaaaataataatagaaaaggcaagagaataagaatggttcttattttaaagtatataaaatcttatttaaaatcccaaataccacatatcttagtataatgtcttaatatgatttgttcatttttatttatcacttaaaatttagttaaataacaaaattatatttaaataatattataatattgataagagacacttggtgaatatttcaccattagagatgctctttcttgtttgttgttacaaaataatacacccatccccaactatccttgaaaaatcactgatgttctctaatgaacgttctcacaaaaaggtaaatcatccgtaaatggccaaaaactccacactgataatcattattgataaacttttgctccgttcaattctcttttctaaatatgttatattatatattagtatttatttattaggaggttttgtcggcaacaaaaaaatagacaactctcgtaaataacaaaaataagttttcttatcaaatttagcacacaatcttcaaacttccaaaaataacatgaaattaatattaaaaagactaatataagcatttgattgataattcacacgatttgtgatttaaaatcataattaattttatatatttagataaaaataaattagttattatgtaaaattactaatgctaattttggaaatttgtgaagtttgtgttataattgtccataataaattttttcatgttattttaaagtatttctctataaaaagtaaaggttgggccaggtaaatgtacttattggactcaataaacaactcaaagatgattaaattcatatattttactatgaaatatgttttactataaaaaacagctcaaaatgctacatttcattattcctttctccatttcatttttaaaattcatactactcataaaagttcatagtatgactataagtttatgactagtttaactttcaactatctagctttcatatgattccctagttcaaagttatactactcataaatttagatactcatactatgaaatttttatatagcaaaaaaaaaattacatctcagtttgatatcaataactaaacatacctatgtaaaaacttacatagtctactacccaaaatatcaataattattgtagctcccactacccaaaagacaatgtccattgacttcacaagcttcttagtcttctctatttctatgctctaaaatctccttatatacatagtccccatacttatcctcaaaactcaccacaaaatctcatcaactcaatggcttcaattctctcaattcttcttctcattctttcactttcaaatctccacttcacttcaaccaccggaaacaaccacattaacgacagaaaatccttagaaatcattatcggtggtggtaacgacaacaatcctccaccgtcaccttcaccggaaccagaaccagaacctgcagattgccctcctccccctcctcctcctccatgccctcctccaccttctccccctccatgccctcctccaccctctcctcctccaagccctcctcctccacagcttccacctcctccacagcttccgccgcctgcaccgcctaaaccccagccatcgccgccaacacctgatctaccgtttgcgagctcattattaaagaaagtctatccagttctccaaagatttaaggatctagtcgcagatgataaacttaagtcttgggaaggccccgacatttgcaacaaatacctcggactcaaatgcgccattttcccgaaaacaaagcatctcgcactcgcgagcgtccagtttaatgggttaaacttgagaggcaagataggcaagatcctcaagttagataacttcctcgacaagttagaagaagtcaccatcttccacgcaaactccaacggtttcacaggctctgtgcctgatttcagcaatttgaaattcttatacgagctcgatctaagcaacaacaaactcacaggagatttcccaactagtgtcttgaaaggaaacaatctcacgtttcttgatctcaggttcaattctttctcaggctctgttcctcctcaggtctttaatctcgacctcgacgtcttgttcatcaacaacaacaatcttgttcagaagcttccactcaatcttggatccatcactgctctttacctcaccttcgccaacaacaggttagtttctcaactagttgatctagtcagaggtgcaagaatagagagagtgtggttgaatgtgtgattattgagtagctagattattatttttaatatttgttgtgatgtgacttaggttcacgggtccaattcccgaaagcataggcaacatcaagtacctacaagaagtccttttcctgaataacaagttaaccggatgcttaccgtaccaaatcggaaacctaacccgagccactgttttcgatgttgggttcaaccaattaaccggtccaataccgtactctttcggttgcttagaaacgatggaacaactcaatttagccggaaacaagttctatggaaccataccggagattgtatgcgagattgcttgtctccaaaacgtttctctctcgaataattacttcactcaggttggtccgaaatgtagaaaactcatcaagagaaaaattatggacgttagtatgaattgtatacttgatcttccaaaccagaaaacgccatcggagtgtgctaagttcttcatgcggaaacagacttgtcctaattccaagtctttgtttactgtcccttgtgataagaatccaaaccggggtaaaccggatcaagaacgattggaggaggaaaaagctcaagtttctcatccggtaacttacaacacacttaacccggaccggcttcggaatctataaccttggccgttttttcttatcaagtaacgatatatatatatatatatatatagccaaagccaagttgtttataatttgaggtgtctaatgcaatataagtgaataaatgtattgtagttgtgtactttcggatcatcactatatgtattttcattgatgtataatccatccttctgttttttctttgtacatcttgctttgtgtgaatcactgtaaaattgttcatccaatggtggatatcatcgatcagatcatcgatcagaatgtatccactcttgcacgcaccattgactaatccaaaggtttggtatggcataaaataaacatcttctttttaaaaaaacttttaaaagcaatggacgacaatttcacccaatactctaaatttagaatttacaaacttggttaatatatacacagtagtccagccaaaaaaaaaaagggtgggagtgtaagtggagctaagcaaaaatagacatgacattaccaattgtcacaaaccatcaacatctaacatgaagctgtgtttttataatatgttttggagcttcttaaatggatctactcaagttatgtggttccttttgtgaccttgggtttgcaatgttgttatctctaatatttggcaactagtgtaaaaagaaatatggaaccatgtgtattattgtaaataaagggcacaacacttgacatcatttttcttttcatttgttcttttgtcattaaatacactttgttatttagagaaacaacaactaagtttatagttagtgtctataaaacaaaaaaaaacatataagtgtatagcattccgacttaccgttcgtttaattactctgaataaggagtctccttctccagcttgcacttcatagtgctctctactatatttggaaaagaagaaatgcgcggcgcaaattgatctgaatccgcctctcggagatcgtctgccataacaaatcgctaatatatatgttggttttgtactcgacggtgaaagagagagccatgacaatgtctcttcttctgttgtcatcctattattctccataccttcctaatcttttctaaattctaaaacaaggcaattgtagcaagtttttattggataattctacattccagaaaacagtactagaggaaacatggatatagtagaaacaagaaagagagtgggaaagaaggaaaaagaaaaatttgtattctccagtgagggtgagtgaaatatataaatgacttaatgtaacttttccagttgatttagtggactgactcttaaaagaagactatattacatgttttggtcctccacttgagctaatgaattaaattttagatgacacaaattctatcgcgtttaaatccgatggtgacatcggtacttacaaactatactacaaattttgtggtcaaataacataccatgtccctaatttagatttttagctattaaataactttgtgtttaacatttttagtcaccagtgttttcagtatatatagattattcggtgactagttcatatatgattaggaaatttagagtaatgaaactaaccagtacagtactaatctctaaataatctaaaacaaaaactaaccgttactacactagctaaaactttatggaaaagatgacacaaaggtgacaacaaacgcagaaagcctttggttatgggagttgcttctggtggctcagtctttcttactatccacatttgccgtcagcctgcagattatattgaaaattttaacaaactatatcgaaatttacataacgacttcaaattcaaaacaggtaaagaaaacgaccttgcacgctgcaaagttatcgcaaccgcatatcaaattgccattcgcaacatcaaccgcttgcggagctcctccaccatcgcttctctgaactcacacacacacacacaaaaattcaataagacaagatccagacaatcttcaaaaactagaaatatagatgtaccttgtagaaatcgactgctatgaagttaggccatcgctgtcccgcggcttggtaacatgtctttatggattcaagaagagaagctgagttttgcttacatgctactatcacatccgcagcatcagggaaatggttcacaagaacaagagattttgatttatcgctcattggcgctgattgagctctatttggacacactcctaccttcaaccctccatttccatctgcaatttttttcattcattaacaaaaaaataagatatgcatatatacaaatgtaaagataaaatggtttgcatcatatataggactcacattgattctcaaccatatacttccattgataggcgatcccttcggttgcttctttatgtgaatcggatgtaaaaactagcaaccgttggttttttcgcaccatgtcatcaagccttggccagtcccctccatttttgggcattctagatactggaaacatgaactttcgtaagccagccgcatcaaacacttttgtgagacctttaggcgatttcacataatcttcgatgataatcgttacaacttcctctttgttcttctctagaaacacttgaaactcccttaaaatgttaatagccggttgctaccacattgcacacaaaaacaaaaaaaaatcttcaacatttttggcggtggaccgaccttaatatacctcatacttacaacaaacatatattgtatcaaaacttacaaaagcggtgaaattgaaacatgttccatcgaaagaatggcaaagccagatatcgttttggaagtcatacatgtcgagcataaaccctcttacaccattctgcaataatccaacaaaaacattcaaacttatgaaaaaaatgttaaaagggtttactaaaaatttgaaactttgtttacattgagttggcttgtgattgaatcttgctggttagtaggagccaaaatagcagaaccggtccgtgatacttcccccaaacgagcaaaagagttgtgtgtggttaaccatgaatacttgttaaaaggcaacccctttgccttggtgatggggttgatgggttgggttctggagcatctaggtctaaaatcagtgttggctatacatgtttcgcagtgtaatccagcgtcacagttgctgtttgttatacatgtttttccttcctacgatccaaaaccaaataataaggaaagataggatattttaaatttcccaagaaacagaggatcttgattaaaacaagatttttagactaccaatttctatagtactcgatgattaattgtatgtttctgcaaaactaataaagatcctctgtcttttggtcggaacagaggacagacacaaatgtaaatgttgtaagatttgatgagatttggttaccttgagagcagaggaaatctctaaaaggaaagaagattggagcagaagagcaatgagaaggaagagtaataatctttgaaacatggctgtcttcaccaaaaagtaaaaaccccaaaatttaagaagaagaagaagaagaagcaagtagctacttcatcatcatgctagaatatagatttgttggtggtttgcatttgcgtgaaaaagattctaagaaacaaataaaataaagtaaatacaatgagaggattttaaggataaaaatagagtgaacggaagtgcgcgtgagtcggtgaagacatgatgataataaatgctgcaaaattagtgggtttgttgttgttttggtcgccacttttgtttttcatggtctctttttcaaaactcttattttttttggttttaatgctaagacctttttctgcctggaactttcttacacaacaacaattataagggaaagacatatcaacaacaataataaaatgtgagttatcttgtaattgttttttacataagaaaaaaaaaagacttaaacaaatatacagaattttatttttctttcattttactaatacagaaagatgaaacggctttgaagcttagacgatgttaaggcaaatatggcatgatagcaatagcccaaacacttagaaaagtttgcacgcaattgcataccttctttcctaacatagcttctcacgtcaatttttccatttaactagtttcacattccttctacaaaccattgatgatccattcagccggcccaatcatagcccactttgccaacaatatccttaaaccagttcacacatagtttgggtctgggataggtctgaaccaactcgaagttataaattacaaatcatggaaaattggcacaaggacgagaatttcaagaagtttttctttttcaaaatcttgtttttattgggtaggtagggacccaaatcgtcagctctaattcacactcacatttgtaaccactcgtgaaacattttttacatcccttcttatttgattcttttgccttttatgaatttgcaaactcaataacttgtgtaaccttttcgactatcatacaatctacacaatcattcatctagaaccagcttaagattagtaacaattacctaattattagtcattccttaattacaaaacggatcacaaatattgctttttataagatatctattccgtatccaacccctacatacagaaaaaaggttcgggccgaccctgcctacataagaccgaccatataaacgttttgtatatggcatggcattactggaatgttgtaggaaaaaattgcatacaataaatctaaacctttacaaaaatattgcagttgaggggtctgagatatgacagggtgttgcacatgtgagtgaccctaccaacgttatgtagaccatttccatttgggttcacattgctacttccatctcattttctcgtttttgaattcggtctagaatttatatccaaaactaaaactgggatgatttaggatcaatcccaaagcactcgagccattttatccttatgtcgctttcgcttcaccaaacacttcataaatgcttgtttgtttattttttaacaagcaatatatacctttcttcttctccaagataaagacaaaggtataattattcgttttatcacaaagtagaatatttgcttagaaactaattatgaattaacaattgttgttacaaattacaatcatacaacggttgtgtgtttttataatcttaaaaaaacgaataaaaacaaacaaaagttaataattaacgaaatggcatgagacatcatgatacaaacatgcgacctccattttaatttgttttcagttttaatcctactactaatcatgtatttttgttgtgttggtccaaatcatttcacaggaaagaaactaatctaatacaaatttctgaatatcaaatttttttatgtttccttcaacattcacaagtttagtgttggtatgttatgcataaaagaaacttgtaggttagaaaggagatgaaatgagaaagttaggggcttttctacaattgtcttcgtttatgatcacgaattgaatagttgacaagtctaaaatttgtctctttccttgtcacttgtcagtgagtatacaaaacaatacacagagcctcgcatgtcatattcacacagggaccttccgttaaactccttttttataatctcgttctctcttctctctttctctctctggttgctcttggccatggttgtgaatagtcaagctttcttgttggcattaattgcattacttgctacccaattgccttcactaatggctgcaggtttctctttatcgattttcctctgtttctttctcttttaaagcttcattatttaatcctgttcttgcctaaatcaggataagattatgaatgttggattttgagcttctggattttgcaaattttgttgctttctttgactagatttgagtttcgatggaaattcgcataattttggttcattagttgcttacatgcaaaaatactctctttttaaattgaaatcagatcttgagaaaccataaaaattcaaactttgtttgttcttttcaagctattgtggttagaaagttaaaagcttgaaacttgcggaccaatctttataggttaccagacactaatgctgcattgtcatgtgtgtttgcagattgtccattagatttcagtggatcaaatttcactctagtagctactgtgtgctccaacataaccaacagaggcaaatgttgccgctacatgaacgcttttgttgcggtgtccgtggctcgttacgcgaacttgtcaactaatcttggagtcacatcagatttatctgaaacctgcattgcttccatctctagagccatggagggctacggagtctcgagaaacgccactagtttctgcggtttgggaaccaagatccttgttaagtatgactgtgacggtcgaaccactgttacacaaatgcatcagtctccgggatttggacatgtttcaagaaactgcagactcccattttcgccgggacaccaatgcagaaagtgtttgaactctggcatcacttaccttcgtaatctcataggtgcagagactaataacattactctgtgtacttgtcgtgatgcgacttatgctacattagcaagccgaatagacgatacatcagctcttgaactccttagttgtttctttcaagtgacagagcttaacattccttcaggttagactcatgactgcaattttcttagtatctcatcagtttctttagtaactcattgtgtatcgacagagtcattttcaccagtggcaagtccagaaccttctccaagcacggttggtggtattagcccaagcaacagtgattctcaaatgactacaagtagaagcaccaatccatatcacttaacaatggttccaaccattgggattgttgttacagctgttgctcttacgatgcttgtagtcttggtaattcttatccgtagaaagaaccgggaactggatgaatctgagagcttggatagaaagtcaacaaaatcagttccttcttcccttcctgtattcaagattcatgaaggtgtgaaaatagagagttgagttctttgttttataatataagatacctaagaaatgacttgaaaacgcttttttctgcagatgattcttcctcagctttcagaaagttcagctacaaggaaatgacaaatgcaacaaatgatttcaacacggttatcggtcagggaggttttggtactgtttacaaagccgagttcaacgatggtctgattgcagcggtaaaaaagatgaacaaagtctctgaacaagctgaacaagatttttgtagagagatagggcttttagctaagctgcatcaccgtaacctcgttgctttgaaaggcttttgcatcaacaagaaagaaaggtgaagaaccatacattgctttttcgccttctgcatttatctaaaccataagtgttctcattttatattgtttcaatcattcaggttcttggtctacgactatatgaaaaatggcagcttaaaagatcacttacatggtatgtatatgcttcttctaccataagtgtacgagtcctgagtgttgaatacttttcttgtttcaattttttcctttgcagccattggaaagcctccacctagttggggaacaagaatgaaaattgcaattgatgtggcaaatgctttggtaaatattccaaagtctttcatctacattttctctgtaaactgatttgataatatatcttttacagtttttggttcttggctgcacgttgttctctcctccaggaatatcttcatttctactgtgatcctcctctctgtcatagagatattaaatcaagcaatatattactcgatgagaacttcgtcgctaaggtatgtagtactgcacatcttctgtgttagagaaccctttggtatttggataactaataatgttttcttggtgcagctttcagattttggccttgcacattcgtctagagatggctctgtttgctttgagcctgtgaataccgatatccgtggaactccaggtttgggagagatactgaacagaataacttgactacttttgatggaagctgagttttaaaaacttgaagttttttcaggttatgtagatccggaatatgtagtaacgcaagagttgacagagaagagtgatgtgtacagctacggagttgtgttgctggagctcataaccgggagaagagcagttgatgaaggtaggaaccttgtggaaatgtctcagcggtttttgttggcgaaatcaaaacacctcgagttggtagacccgagaatcaaagactctattaatgatgctggaggaaaacaacttgatgcagttgtgacggttgtgagattgtgtaccgagaaagaaggccggtctaggccatcaattaagcaagtcttgaggctgttgtgtgaaagctgtgatccggtgcatagcgcatttgctaaagcggttgaagaagagataggctgggatagtaggaagagaagcaatttgagaattcaaagaggtgattcccggatctttggtccatcgtctagtactacttccaggtcacattacagccggagtttacctcactctccaattaacggattttctttctgagttagtcacatcttctctatagctaaatctgaaagttttacatatgtttatgaaaattatgaattcatattgaaagctctcatactctacacagactgcactcttagttaaattcagctcaaaagatttctacattgtaagcgtctctgtaatttctcctgtacagtagcactatcttctattacatattactctcccagtgtcttccttttgagtggtcctgtattacattagcaggttcttcttgctttgacttcaccttcttaccacggaccggtaagggttcttctcaagcattgtcttttggccagcaatggaggctgcttcgaaaattcctttagctgcaaattcaagtactagtatcagtgaactgtgtgtcatcaaaatgacaatagagctacatttagacagacacaaaatgtctggtaatgtagagacaatgatggtgtatacatgaaatatacataagtagaggaaaaacgttattacctcactattatgggttttcattatttcagcctgcaacatagagagaccgcagttaaataactgagccagctagactctctatggagaagcaataaaaatggtagaagaaaaaaacctgtttcttctgcaaatcttgattcactagcttgagactttcaatctcagcttccagttccaaggtataagcctgaggtttagccaaaacatcaaaatgatttcaaagttcttgaaaagaaaacggtaatggcagtttggttagatgatattgatatcaaagtttttgagaacaaaacggtaactttacctgttttcgagcccttgatctagcagcggattcccgattcttgatcattctcttttgccttctctcaacaaccttctccaggcccgtattgcttcttcttccccgaccaaacacgtaaggaactggtgatgaccaagtattgttttctgcactgctcgtcccaggagaagtagctgtaacagtaccccctgctcctcccatattactgttggctggaccatctgcgctagtctcaaataaacccctgttgaccatatttacaggcgccgcaaatgttacattcgcttgttttggaaagatagttggaggcagtctctgatgtggctgctgcaactgctgctgatgtggctgctgctgctgctgcatggttccaccaactttgaggcctaaaccaggtgcttgattcatgatcatagaactattgttcccgttgaacgatatgctgttttgattcggctgaccaaatccaaactccaaaccagcagcaccgttgttagcataaaacccgctactactgttttcgttctgctgagtattatcttctttaacaacgccagcacggagtaagaaatcttccagagtcatttcccctaaagtctgttgcctctcaagcgcatccgttccagtattcccattactaccttctttcgaattcaggtatttccagacttcatcgacagtcttctgactaagcgttctaggcaaggtcaaggagccttgcctctgtaaaccatttcctcccggaacaaaaccactaggtcccggggctgcaaccgaagatgtagtagtcataaaggcttgagtatcctcagcagtccatatgttcttgagtaactcatccatattcatagacccaaaatctttccccggctcacctaatgtgctctgaagctcatcaaacgttaaggaatataacgaagactgcctcgccaatggctttgactcattccctctagaagtatcgccgcctaagttgttgatatcaatgtgagtacccatacttcttttctgtttcacaacggaatcacttccttccaaattcttcagtgaaaaaacaaacgaatcagacccttttagctttacctaagagagaacaagaccagaaaattgaaactggtttaggagtataacacaccacacaactatgtgtcacatagtgcttttaagtatacttgcataagagcaagcaaagaagaccaaaagcaaaaggcaggaacgttcatataaatgtcaaaactttataaagttttagccagaagcaatcaatcacaaacatatacatagaagtgtgtgatacagagagtataaattggatccttggattcagagagaaatataagattggatcaaaatccataactttgaccattcttgaatgtatctaaaagatagatctataaaagattctggagtaaaagcaagatcacacaaaccctcaagaagaaaaacaaaaaagtcttatcctttaatttctttaggaatagttacttcattactactactacttgatttagaacatagaaccaaaaaaaagacaaaacagatattatgaatcggacccaaaaaaaaaaaaagtataacacttcaggggatgtgataagacaaagacagattcgagaagaaaagaaaacgaaaacggataaacaaaaagaaggaagctttacctaatattataggcgattgctgaaaatagagaagagctgcgagagagagaagagacgacaagtgtgtttgtagtagcttcgacacgaactgccattttaaggggttaagctttttcctcttatggttttttattttatttattgtttagatattttgctttcattttttggtaataaactaataaatatcccgttttaatgattattaaacatagtcacttaatttagctgacaaccacgttcatttttaaccaataagaagctgtaacgtgtgagagctttagtcgctgattgtgtcctttgccttgtttgttttctttaaaaatgggattagatctgatacaaatatccatattaaccttgccatttagacattatttctgatcttaattaactaaccgaagaaagtttggataattatagtatttcaattttaattcgccaacagaaattttttaaatatcgaattctgtgttgtaaactgcacaattttacttcaattcgactccaagaaaattactaaaaaggaaattgattttttttttacttatgaaccgcagtaaatttttgtttgatttttagttggctaattttttttcaaaaccaaaattctaaaaaatcaaatcctaactcatctgaagtttatgaatgtctagtcatatattgttggtgtttaccgcgatcaaagagaaaatcaaaccacaacaatgttcgtagatggtggtaatctatgcacatgacaaaatactctatatacaatcgaacaaactactagactagaggtttttggttaaaattttattttgcatttaaataattttctatgcatataaaaaaataagaaatgaaatgggaataaaattatagtatagtatcatgtcggtcggaacaccaaatgattaaattatgtgccaaattaattttaatatcatattgttgttactcatgtaagatattttgtgtgcttgataaactgtgattattatacatgaatgatgttgaaacaacggcagaagtgggtagtgattctttttgggtcccatcatcccaatggtgtgcgaattttgacatcaagcaataatcattatatccaagcaacccaaaagaagaagacttttaagaagatttgcgtcgagtttaatacaattcacttccaaatttggaaattttgccctctcctcacttggtaaatggtatgttgatgatttctacttctttataatttgataacttatttaaaagaattgtctactttcgtgtcaccgttgggccagcgtatagaatgagcatcaaaccatgatagagttctccttcattctttctttttgtcatatatgtgatcattggtatttttttttttgtcaatattaatttagattcatacgagctaattccgggaaatattgtttacatatgtaatcattggtattgtaatgctaattttgtttctttttttttaaaaacttccgctttcttgtggagcaaaacatatcaattacccattcaacaactttctagtctctactaacaaacctcacgactttgttaatcaaaaaagaaaaattacctctactactagaagtaaaaataaatgaaaaggaagagttttctaatgggtaaaaatccaaaaaaaaaccttaactaatttttatttaaacgtttaatacccaattgttttttctaagaagaaaaatacatgaaaaatacatgaaataataaaactgtgcaatttaaatattcaaacaattaaatattgttattttcatactcacgatctgacaacaaaaataaaattttaattttacccttatcatctcaattaactattaattttttagattatatgacattaattttctaattttggataaaataattttattaacatattagtttatggtgtctaaaaatttcaaattttcatttttattataattattttattttaaaattatttagagaaaataaaatattttttaaagtgggcggaacaatctccgctcgaatttaaatctttcacgaataaaactatttttgaaaaaatctgaacccgaatctcatcgtttttctcaagatttttgacaaaactatttttgagattcgggttgtgttttttttcaaaaaaagtttatccataaactaaaatcctaatatttttctccatcaaaatcatagagtcaattcatcaacaatggcaagatacaaactaagtattgtaataatactattaatgtgaacgttttgaagtaattcgaaacataaattgtttttgtaattttgtcatattacttgatgttggttttttatgaaccaaatgcatgaaataataagcatttaactgataaatttatttgttttgaataattgtgtaaacttttatatggtttttattataaattatatttatattattttattttatcataataatataaaattttaatcaaatatgaaatatatatatatatatatattatatattcttttctataaatatgtttacaagtaaaagattcatatacttttctataaaaaaaaagatatataaaatgaaatatatattttactataatacgaattaatttatcatatatatatacgttctataatatatttacaagtaagagtatcatatactcttctatacataaaagatttataaaatcaaacagatctcctttctataaatccgtatgtgcaatgcatgacacacctctataaatctcctttctgtagtctcttaatttttcacgtttatctatattcactattcagtatacgagtaactaaatttaagagaaaagaaaagaaagaaaaaaaaatggccaaggcaacttcttcacttgtcgtccccatcatctttcttgtgatatttgctttaggtatgcatttatctttaatatattcatacagtaataagttggcatatgtatccaatattgtagacttgtcattcacgtaactctactgtcatttttagtttcggctacattcattggcaatatatcatatagtatatatcttagttcagtgtattgataactcctaaatcttaatatagcttttgttatctgagacgaaattaattaattttgtttgatatagttgagcagaatacgggatgtttcgattatgatgtttaccaaccgtgcgatcattgtcgagaaagatgcctcaaatattatccagttacaagaaaagccatttgtcggaaaaatcattgtgtttgcattggcccttgtccgaatgataaagcgattccaaatgttaaactcttcaaaaatgtaaaagaacaaatcctaagttgaatgtcaaaatcataatatatctaaaaaactattttcaattgaagctttgattataataaaatttatagaacacaaattttccagaaatatgtttgttattgatgtggcgagcccacattttttctctacatcatttatttatttaattctactactgtctgtattcttaatattctaaaataataaccaaacagagaattaaatcgactaatcataaatatatatttcaaaattttaaatattgtcttatatataaagaagtttatgtataaatgcattgaattcatctattggaatattggtctgtcatcaactagataaaaaagctaaaatttataaaatatatgacttacgcaatttatttaatctttctcctataagtgttctaaaaagcggtttagatgctcggtgctcaagctacacataaaaaaatatctattagtgtattatcccaatttttaaatatgttttattttcatagacatagttataaacatttatttatatttttaatataaattaagtaaatgatttctttagttttggtttacaattttatattgtaatttctaatcgatattttatgtattttttaaaaataaaaaattacaaaaaaatttagacattttagtttatagtgtgtaaaatgttcaaagtatcaattgtatgtatacttgttttattttgaaatttaaaatagaaattacagagaacaaaaaatattttaaaatggccggtaaaaaatctccgttcgaatttaaatgtttcacgaataaaactatttttgaaaaaaacaacaacccgaatctcaaaaatagttttgtcaaaaatcttgagataaacgataagaatcgggtttagaatttgtcaaaaatagttttattcgtgaaagattttaattcgaacggagattgtttaccggccattttaaaatattttttattttctctaaataattttaaaataaaataattataataaaattgaaattttgaaatttttagacaccataaactaaaatgttaatacaattattttttatccaaaattagaaacttaatgtcatataatctaaaaaattaatagttaattgagatgataagagtaaaattggaattttatttttgttgtgagtatgaaaataacaacatttaattgtttgagtatttaaattgtacagttttattatttcatgtatttttcttccaacaaaaaataattagctattaaacgtccaaataaaaattagttgaggtattttttgggtttttacccgttttctaatgttaacaaaaaaaagtttggccgctcattgtttatctttacaaagagttagaacttagaaacatagggaaaaaaaacggaggtaaaatattataataagaaataatacttataaatctttactcaattttgtacgaaaacataaaataaaaagaaataagttgaataacaattttcaaatttcaaatgagttgttaccatagtaacactagtttttgaaaaaaagacatataatccttttgaaactaaaaaataattaaaatgccatttagatttcctaccaaaaatataaaaataaattacaaatataatctaagagaattctcaatatctcagattcacaataattttttatgatcccttttttttgttttttcttttctttgatcatcagaaattacaaaacccttaactatcatcaatatctaccatttgtcgcttttctagattgcctctctagccacatgtatttatttttatgaccacaactgttcatcttgaataaaaaatattcatattttcatattacaaactttttaccaatctcgagtcttcatctatttcatcctacacaatgtattttttcttcgagggagttctttccatacatgattaattatattttaattaatttccaaaaaaaaactttttctaggtctttcactttaaaaataacaatttttctctcatagcaaaaaactttttctttaacctattttcagccgtttttttatccgtccttttctgatcggagattgacggtcagtgtcttccatagcaccaacgtcgatcatcttttagtcttaattttcatgtttacttcgttttttattatgaatttgttgcaagtttcttcttcaaagttttatcgatgattctctcaaccttcaaccaatcgaccaaactaccatcaacaatcgttcttgtagttggtgttacggtaaaggcggcttcttttaagcttcctccattctaatcaacatacatatatgggtgaggtctattgtttttttattccttcaaacttgatgcaatcgatttaatatcgccatcatcggcccaagcacttttcggcagttgcaattccctctataatttggtttcgtcttgtcattcttatgtagctcaagatctttcattttcgaagtctccaaaaaataagtgaagactataaaaccgaaagtttagatgatgtccgttttcggagatgcatgaaatagcttctgattttagaaaaaattggttaactgaagaagaaagaagcaagtgataataattgtagttttgatgtcatttgtaacctgattatttggataatcattttctgttaattagttttgattatttgtcatctcgagcaataccggctttgtgtaatttctgttttcagttataccattaaataaaaaggtcttccactttttaaacactcatactatgggggttcgaacttaagcggaagtgacatactaacataagagtattttaaaacctctagaccatcaacccaactataaatatacgtggccaattcatgggctccgtcgatgaccataaaataacttgtgcattgactttgaagctaagccttaaaaaatcaaaacatatgtgtacattattcacattcctaatctcttacctaaacttaataaagcctcgtactgagagatcaaaacaaaacaaaacaaaacccaaacacttaccaaatcaatcaattatcgagaatcttccttcctttaatcctcaaaaaaaacaaaaacctttcttcacctcctttccttgattcatcctctaggttaatgggtgttttctcgaatcttcgaggacccagagccggagctacccacgatgaatttccggcgaccaatggctctccttcgtcttcttcttctccatcttcatcaatcaagcgaaaattatcgaatttgttaccactctgcgttgctctggtagttatcgctgagatcgggtttctgggtcggctcgataaagtcgctttggttgatacgttgactgatttcttcacccagtctccgtcactctcgcagtctccaccggcgagatccgatcggaagaagatcggattatttactgataggagctgcgaggagtggttgatgagagaagattcagttacttactctagagattttactaaagatccaatttttatctctggtggtgaaaaggtaaaacattttgtgttctgtggaagatggttttgatcattccttttttgggctagatatagtagagtgattgattagtcagtagaataaaagaataatgatttcatttgcgttcacaattggttaggactttcaatggtgttctgtggattgtacatttggagatagttcagggaaaacaccagatgctgcgtttggattaggtcagaaacctggaactcttagtataatacgttccatggaatcagcacagtattatccagaaaatgatcttgcacaggcacgacggtgggtaagcacaatctcaacagttgctttaaacgtatttcacgacgtgtcttttggtggaatgtatatgaagtgtaatgtgttttcttgttcatcaggagaggttatgatatagtgatgaccactagtctatcatcagatgttcctgttggatatttttcgtgggcggagtatgatattatgtctccggtacagccaaaaactgagagagctattgcagctgcttttatttctaattgtggtgctcggaattttcgtctacaagcacttgaggcattgatgaaaactaacattaagattgattcttatggtggttgtcatcgaaaccgggatgggaaaggtaacataagtaaatcaggcaaattatacattggtagatcaacgagctgtctttttgatgtgatttgtttttattaatattcatgtagttgacaaggttgaagctcttaagcgatacaaattcagtttggcttttgagaatactaacgaggaagattatgtcaccgagaagttctttcaatccttagttgctggtatgttttagatttcatctgtctttgtgagcatatcttacaagttcttgtactttgttgtcagaagtatttcattaaaagtttatataaagctatgcaatttttcaacatatgatctcagggtccgtccccgtggtagttggtcctccaaatatagaagaatttgcgcctgcttcggactcattccttcacattaagactatggaagatgtagagccagttgcaaagagaatgaagtatctcgcagctaaccctgctgcttataatcagacactaaggtctgattttttatttccataaatgattataaatatgtgcgataacttcttcttgaaagcttcatgcttctgttttggttttagatggaaatacgagggtccttcagattctttcaaggcacttgttgatatggctgctgtacactcttcttgccgtctctgcattttcctggccacgagggtccgagaacaagaagaggaaagccctaatttcaagaaacgaccgtgcaaatgtagcaggggaggatcagacacagtttatcatgtttttgttagagaaagaggccggtttgaaatggaatcagtctttttgaggtaagaaagcttatcatttggttcaccactgaatcaaaacaatgattagtattgatttaaccggaatatcgtttcttgtccaatccaggggtaaaagtgtgactcaggaagctctagaatctgcagttctcgccaagttcaagtctttaaaacatgaggcagtgtggaagaaggaaaggcctggaaacttaaaaggagacaaagagcttaaaatacatcggatttacccgcttggcctaacgcaacgacaggctttgtacaacttcaaattcgagggaaattcgagtctaagtagtcacattcaaaacaacccttgtgctaaatttgaggttgtcttcgtctagtttcattcctctggatctgtcacaggtatcatctcagctaagaagacatttctctgtgctagaatcgcaaagtgctaaacaaaccgattagatgaaacaaaaggttaatagtcatgagattggtgaactcattttgtttaggcagtgtatctgtaaatcgttctgacattgcagacgatgtgttcttgatagctggatgcataaatgtttgaagatttagagcaatttgatagttttgaatctcttgagagtgtgttaattaatctttaaatttttcttgggttgttgatgcgtaaacacaattagtctcacaagaagattatcaagttctcttaataatattaccaacgaacaaaaatattacacagaatttgtttttttaaagatatgtaattaatttgtaaactttttaatagttcgttactttagaataaatacggttagagaattagatattcccaaaaaaatagatgacctatattcagccactacactaagacaatataatcgtaaggttgtgaaaaaatattttttatatatatgcgacaactatgggttaaattttaaccacagttagtgttttcgttagtaaagataataaccgttaattcggatatgtgattttatcaatttttattaaatgaaggttttaaaagcaaccaaaattaagttaagtatttttatttcaaatttaatactacaaatactaaatgtctaaattaaaaatggatgacggttctttcgggttttcccgcaaaaatattacacaaatatttttttttaaagatatgtaattaatttataaacattttaatagttcggtactttaaaataaatgcggttaagaaaaaagatattcacaaaaaaaaatctttaagattctgagaatcttttaatcgacctgaatattaaacaacagagttaaggaaactaaataataaattaaagctagctaaaattaaggaaacacgttaataaaaggttcccaactacttatttctctctcattcgcgcaatcttccgctttttaatgaaaaccctgagaccttgttcatcattattcatctgaaccaaaagctgcttcctctttttttttttgtgaaaacaatctctctttgttgagttatgagcagataccagtatattctgagaaccatagattatgtatgttagactttattcttttcccctaaaatatttaagaattcgtttctgtgttttgacttttcagaaacaataaaattcatgtgtttcaggtcaaggaaaaaatcgagaggaggtgtattcaaaagtacatgagtttggaagaaaccatgacttatatgtatgatcatgaccatattcctaaacatatcactgcaacaagtaagtaaaagaaaatcaatttgatttcggattgagaaacatataaactagaaaagcttttcttttatttttttttgttttcagtttgggaacatcttcaaagagagaacccaaatttctttaaagaatacaacaaacgatgcgaattggttcgtcaaatagttacactcaacgacttgcttgctcagcaaatagatctgatgcaaagacttagccaacttgatgttggtactactgcaccaggtacttaattagagataaacccttttgtgtatccttaagattattattactttaaatcagtttatgaagaagacattgtttttttgaatttatgtattgtgtagtaacaaagttgcaagaacctaatgatcatcatcatgatgaagtccaaactcttgaacagtggttggagactaatggttttgctaatatagaagatacattcctttgtttaagcgatctggttgatgcaccaggtacgtcgttaaagaaaaccactctctttctagttaagattagtctttaaaatgagaagatctcttcttttaattctgtttttttttttttgtagtaacagaggtgcagaaacctaaggataaagatcaaagttgtgatcagtggattaatgggtctaatgatttagcttctatagaagaaacagtttcttctttgatcaatccatcaccatttgctgaaacaccacaatcagaacctcctggtctacgatacgataccgattgtggtgactcgaatcttgaacaattcgctagagatttagaagatcaacaacaaaggatgcaacaaaaattccagagaggacaacaacctcaacatttaattaatcaaaagtgtacttgaagatcttttcacccaatgttttggtttcgtttctcagttcgatgaaatgttttggattcttcttcttctttttctcaatcttatatatttcattttgcttccaatgcaatttcagagatatgttactggcgtttgtgtaaacaataataaaaaagaatagccaataagatattttagataaatttcttgattgttttaaaaagtttgctaacaaaaatattagaagtgaaaaagcatcatgtattagagacactaaagtcccacatcggaaggaacaaacttttctctactctatatataagttcagcttgcattaccgcaacgtcgaacctagtaacgtgggtttatgatccgagtggagacaacaaggtgatggtacattgggtcggatctcaatgggccgggttcggcttgggctctttactggcctgcccattccaagtcgggagttgagatatcttctgagcgaaggttcggagccaatatctctttagagcggaggagaccgcgtgaggctggtttcacagagcagcgtccaccttccgttctcgacggtggaaggataacgggcccgttgtcttccgagcccactatgacccattaggccgactccaactgagccatcacttttttttggatcatcagggctacaaggtacacaatttacttactcttaagaggaaaaaatctataactcttgtatttacatattcgttttttcagcttggaagtcggaactactaggttatttggatatgaaatcagttaaagactcattgatgtactacgccttcaatacattgttaataatgctattagttttcacatatattggtggctcatttgtacgacaatcataagagagcttcaaaacagaggagaagtgggagaagagataagatcaggtaccaattttctttcaattgttgtttttaagattgaaagttttgcttataagggatcaatggttgctagaatctgttacataaacattgaactatcacgcatacgaatcgttaagtaacttgacttatgttatgtctttgagtgattcctttttataatttacatcaatggcagattcggaggatgatgactagggtttgctagaggtcatggtgaaaaatggttttcagatacctcagaattaatgacactttaagcattgctattactcagatatgtcttctcttttgctctaggttaatgagtaatatatagcaaagaaatctatttttattgtaaatgaaaattaaaccccttttgtatgggtaatgggttaatgtaatttagttgagagtccctgaaaaagaagattgtcttctgtgtgcgtgtgtgtgtttaaactcttttgtactttgagaagaagattaaccaaagtctgagtggattgatcaaaaaccatcaaaccacaataaaaaatcgattaaaccaaattgttgcttgagttgagagttacttttatagtgtctcacatatggcaaatctgaaaatggaaaaaaaaaaaaaaaaacaaagaaacgcgccaggtaggggtcgaacctacgaccttctgcttaggaaacagacgctctatccactgagctacaggcgcttttttgaacaatagttattgttgataatatttaatcgtatgcgactttaggcgcagttgagaaaataaagacataatgtgtgtcacacattcttttacactgtaaccaaattagtacaaagaaacgtattctgtagacaaaaaaaatggcgtggtgcgatattcttgtagtttttagtttgaccgtatcttacaagttcatgtagttttagactttaaaattaaggtaataataatttcattagttaaataacagcctagaaaaagaagataatcaaaaaacaaaaagaagaaaagaatcttctattagattttgggttggctgattttcgagtcataaattatttcgattctcagctttcacccccggacttttgggcccttaaatttccaccatcaattttcatattcctcaaaattacatcatctactttcgaattcatgcttaaacatacatttccaattgaaccattcatttaaccgggattaaccacaaatccgcgtttactgtaccgcgattgtgattaacccgactaatacccagacccgttaagaaaacgacgtcgttttcatttcgtttaactcatcaaaaagagaaagaaaacgacgtcgttttcattcttcttctttaactctcaaatcgatttggtagtcctcttcttttgactttcatctctgtctccatcgtcttctagattgacgtctccatcagacgctatgtcaccatcgtcttctctattctcctctccatcagaagctctgtctccatctatcccgacgtcgtctccctcgattctggtggcttcgtcctcctcgactccgctatcaccactatcacttccatcgtcggcttcaatgtcactctctggaggttcgaaatcggggtcatctggatcgctttggtaaatcaatccttcctcccaccaattcttcatttctccctattcgaaacccaaatcgagacccaaaaattcgaaccgaagaagaaaaccccaaatctccttttgtctttctctctcaagaaccctaatttcacagtgtcgagattaaagaagaacgactaaatcgatttgagagttaaagaagaagaatgaaaacgacgtcgttttctttctctttttgatgagttaaacgaaatgaaacgacgtcgttttcttaacgggtctgggtattagtcgggttaatcgcaatcgcggtacagtaaacgcggatttgtggttaatcccggttaaatgaatggttcaattggaaatgtatgtttaagcatgaatccgaaagtagatgatgtaattttgggaatatgaaagttgatggtggaaatttaagggcccaaaagtccgggggtgaaagctgagaatcgaaatagtttatggctcgaaaatcagccaacccttagattttatgtcgtaataaaagcattatttgaagaaaaaaatcatatcttttggtttttaaaccccttatatagttattagtatgcttctaaggtaagaattgattttttcctatccatcctagagtaagagttgatttcttgttcaatagctagccgttccgttaaaaacaatggaatgaccggtttgggtaaggactaaccgggtttggcaaaccaaatgccgtaattattgcagacgtgtcacaatggaacactcagtggcttcttgattatatttttcgagtttcgaggatcaaacaattcaatcatcatcttctacctctgctccaatttctctgaaaacaagaaaaccttaatcaatcgaaatctcagtgtaactaatcaatggagatcaagcctggtttatccgctctcgtcactggcggcgcctctgggatcggtaaaaaaaattcattttcaacaattcattttctgtttgttattcatgaaatctgctgctgggttattttcgtgtttagtaaattggattatttttccttagatttacgtatgaaactggtgtgtgtctgtttcttctttacccaaatttggatgatgtcatgatcttaaaattggtgaagctttttttaccatgatgaaagaagctcagtactttttgtttgggtattgaaaagcacgtcagtactattgtcactctctctttactaagtaatacaatgtgatatttttggtgatgagatggttcaattatgtgtaggtcgagctctctgcttagctcttgcagagaaaggagtttttgtaacagtcgctgatttttcggaggagaaaggacaagagactacttcgcttgttcgagaagcgaatgccaagtttcatcagggcttaagctttccttctgctatctttgtgaaatgtgatgtgactaatagaggttagttagtgtgttagtttagctttcatgatgaaacagaaaactttgtcttattgactgttgttattaatcctctggtttatggaaacaggagatctcctcgctgctttcgataagcatttagccacatttggaacacttgacatctgtatcaacaatgctgggattagcactcctttaagatttgataaagatgacactgatggatctaaatcatggaaacacaccattaatgtcgatctgattgcagtagttgaaggcacacaacttgcggtaagtctcgtattccttggcttgtaaagctctgatttttgttatctcggttttatctgattatttatgattttcaacttttgtgtagatcaaagctatgaaagcaaaacaaaagcctggagttatcattaacatgggatcagctgcgggtctttatccaatgcccgttgatcctatctatgctgcctctaaaggttttatgttacttgtgtcttattgtttctttcatttgttcattgaattatataaagatgtttaattctttttgcttatcccatatgttacatttctgcagccggtgtcgtattattcactagatcattagcatattacaggcgccaggggattcgcatcaatgtgctttgccctgaagtaagacaaatatctgaatattcaaaatgtttattaatgctctattgggggttttgagtggtacagtatgtttgataaataattggtagccactgacatgaaacttaaggtgtcatgcgtgaggcatatgggtttagattttcgttttcctctcatcaaaaatacttgttactttaaaaaaagctctgttatggttgtgtttgttacaattaaaatactttttagctgagtgttgtttaattttttgcttctgcacttttgatgtgcagtttatcaagacagacttagctgaagctattgatgcttcaatactagagtcaataggcggttacatgtctatggacatgttgattaaaggtgtgtatgcggattatatacttggagtcttgaacttggatgatatcttagggatcggctgacatatgtctgccggacatgttcaggctttctatttacgttttcatatcaaggaaataatattgttttacgttttttcgacatggctgattagtttagtagaatgttgagaattagtccgtgcagaaagatttggaacacatgaatgttcttacgttttcaactgtatatatctctgttgtatggattggtaaatgttctcacctctaacttctattgaaaagcattgcaagttgttccaaaatatgtgatcaaaccatttcgttcatgtgtttgccatatttttgctttaggtgcttttgagcttataaccgatgagaaaaaggcgggggcatgtctatggattaccaaacgcaggggtttggagtattggccaactccaatggaagagacaaagtacttggtgggttcaagttccaggaaaagaccttcttttaaagtttctacaaaaatagaatttcctcaaagcttcgagaaaatgtaagtttatatgggactatgtgtgacaatttttataggcatttgaattttgtatttctgtctcctcttaaactttacatactgctggcttattctctccttcaggattgtacacaccttgtctcacaaattccgcagtgctacccgcatagtccgtgcaccactacaattacccattggaccacaccaagttctcctgaaaatcatctatgctggtgttaacgcaagtgatgtaagatcatattatcgtctattgtgtgcaaaacgttttgttgtctcgcttatcgttgtacatttaactgtttttagattccctatcattatcagttattaggtaatacacccttgttgtgaaatgtactttttaattgatccttattttgtaccatgaacaggtaaacttcagctcaggtcgttactttactggtggctccccgaagcttccctttgatgctggatttgaggtatattttgttcaatttcaacttcaacagcttttgttcaattctaaatcgcttcaatgttttccagggagttggactaattgcagcagtgggagaatctgttaagaatttggaagttgggactccagctgctgttatgacgtttggagcatattctgaatacatgatagtatgagaactactaaaccatatgagcaacaagttgacatttttcaaggcttcagtgatcatgtgaacctgtctgttttggatttaggtatcttctaagcatgttcttcctgttccaagaccagatccagaagttgttgccatgcttacctcgggattaactgcattaatcgcccttgaaaaggtcgtgctaacgagtgtcattaactgtctgttttcatcgtttttcatttcagactctcaaattcctcatttttgtatgtattaatagctgtatgatattcttaagttgctagttcaattatctctgacattttctttatcttatgggaattcacaggcaggacaaatgaaatcaggtgaaactgtacttgtgactgctgctgcaggagggactggacaatttgcagtccaggtatatgtcctgaagttgtttaaagtattatccataggatacatatttctgtttcatttgtggaagtatttatgccagttgaaaatagattttaagagattctctatgcagcttgcaaagttatcaggaaataaagtgattgctacttgcgggggatcagagaaggccaagctattgaaagagcttggggtcgatcgagtcatagactacaaatccgagaatataaagacggtaggtcttgtgtagaaacttttattagtatatgtggctaagtgacaattattcatactggtctaatcttcataggtcttgaaaaaggagtttccgaagggtgtaaatatcatctatgaatctgtaggtggtcaaatgtttgacatgtgcttgaatgctcttgctgtttacggacgactcatcgtgattggaatgatctctcaggttccctatcatatcactctcgatacgtcttttatttgataaattaagtccattcacctgttctgttgtatttagcttttgaaactgctagacgtctgattccttttttacagtatcaaggagagaagggatgggaacctgcaaaatatccagggctctgcgagaaaattttagcaaaaagccaaaccgtggtatggggtctacttgacaatgttttttcaactcaaaaccgctaaatctaaaatgttgatctaggaaacgcatattccttaagttgattcaaactaaacaaacaccaatttgtttcaggctggtttctttctggtgcaatatagtcaactgtggaaacaaaatcttgacaagttgttcaatctttacgctctcggaaagctcaaggtaatgcatccttatcgttattttgaatttacgtgcttacattcagttttgttcaccaaattgtttcttcactaactattccaaacaccactttactttctatttttctcactttggcaggttgggattgatcagaaaaagtttataggtctaaatgctgtagcagatgctgttgaatatctgcattcgggtaaaagcaccggaaaggttagaaatagttttcttactaatcgaaaagtttgaataagaaccacgctcatttcctttggaacattaggactagaatctgtaattcttttacgtggagcgtataaaattggatgctatctgattcttgacgtgttaaagtgtgtacatttacagcttggtgttaaccagaatctattgtttattcaaaatttgtttttgcgtaggttgtcgtttgcattgatcccgcatttgagcagaaaacgtcgagactgtaaacaaaacatccacaaagcaaaatccagtttgggagtctatacatgagtggagcttttcctttcttcttcttcttcttctttggaggcaaaaaagggcttagtaagtagagagttctttaagcttatgtttacaataaacagaggagaaagttttctaaaatctaaagttaaacgtcaaagtaacatttacaccatcacaaaaataaaagaaacaactgaataataggttgcatcgtttaagcatcaaatattattgtgtatttctttgacaattaactaactaataacgcattatatgattttaatgtggaaaatgggtttttctttttattatttgtttattgttgccataaatttctgaagtcaggtataaaacaataacatgtaattttgtttacataaaaaaataaaaacaagtaaagtatataataaaagggtagtgtgatgtattaagagtttattgcaaataaggcatttgtcttagatatatattttattttaggcagatttaggcacttctttcctggggaaagtcgtttttacccttacagagagatgatgttgctctttctttgttgatgaacttttacgttttacattagaaatcaaaaatacttgcgaccaacaccaacaactttggagtcattgattacagagtgatgtcagcgacgattagaaattcagacgactaacaattggtcctcatgagatgtgaatgcgatctagatttttaacatcccacattttgagatctggaaaaaaaaaacaagaaacaaaaaagtcccacgatttggtattacgatttgcacgtttttttgttcagtgatttttgtgcaggttaaggaactcaagaagtgattgatactttgttgattgctcaattgatgttcataatcatgtctacaagtacattgatttttgttcatgttaatggtgtttgatgataatgaggatggttgtagtgttgtgttattgtgtgtatgtaagaattgtagactgtatatttgacggtttgggtttacaagtctaattctagggtatagcgtttaccattgacgccgttcgttacccctcgccgtcaaagccgtgaaccaccaccaaatctttgtgctaccgtcaaagcttcacgcctaccgtcaaagctgcaagtccactatctaagccatatatctctgaatgtcaaaagaaacttaaaattgaatcagagatggagatgcattttttagaagataaacgcattcttttcacctcattctcaactccagctcatagtttaagggcaaaaatgtccgtaacaataaaaattggagttattatatgcttttactgtttagagtgcctgttttgaaagaaatgttttcaaaatgcttgtttggaatataagctcatgtattaaactctatataaatgtttgaatgatgtactattggaaagaatttttcaaatgtgtttttccttgaaatagaatcctaaactagaagaatatttgatactctaaaaaggactagacaaaaaagatttggtcctttgaactttgaagataagttgtcaatatctgcccatattagctgttgtaacttgcaagtaatcaaaaccttacctaaagcatccatttgcttttctttttgtcattattcctttaattttacataccaaacaaaaaataaattaaaaaggaaaaaaaaaaaaaaaaaaccagaaaaaagctacgtggccactcttattgctacgcgtcgatgcaaagaacaattattttcatttaaatagcaattcactactaataattaaaaaggctcactccaactccaactccaactccaactaacaacactcttcttcattcttcttcaatcaatggaatctgaaatcgcctccgagtttcttcctttctgccggatttacaaagacggtcgtgtagaacgactcatcggcaccgataccatcccggcctctctagatccaacatacgacgtcgtttcaaaagacgttatatactcaccggagaataacctctccgttcgtctcttcctccctcacaaatcaacaaaactcaccgccggtaacaagctccctctacttatctacatccacggcggagcttggatcatcgagtcacctttctccccactctaccacaattacctcactgaagtagtcaaatccgctaactgcctcgctgtctctgttcagtatcgccgtgcaccggaagatcctgttccggcggcttatgaagatgtatggtccgcgattcagtggatttttgctcattctaatggatctggtcctgtagattggattaacaaacacgccgatttcggtaaagttttcctcggcggagatagcgcaggcggtaacatatcgcatcacatggcgatgaaagctggtaaagagaagaagctagatctcaaaatcaaaggtattgctgttgttcatccagctttctggggaacagatccggttgatgaatacgatgtgcaagataaagaaacgagaagcggaatcgcggaaatttgggagaagattgcgagtccgaatagtgttaatgggacggatgatccgttgtttaatgtaaacggatccgggtcggatttttctgggttgggatgtgataaggttttggttgcggtagctgggaaagatgtgtttgttaggcaaggattggcttatgcggcgaagctggagaagtgtgagtgggaaggtactgttgaggtggttgaggaagaaggtgaggaccatgtgtttcatttgcagaatcctaaatctgataaggctttgaaattcttgaagaagtttgtcgagtttattattggttgaaacttgaaagaatgttttttgtgtaaatgttcttcatgatcatgtaatcttgtttttaagaaataaaatacatgaatttcagactgtgtgagagttatatgaacctgttaaatgtgtgttattattttcttcaacatgagaaaaaaatatgtgtaaaatattaatttgtttttttttgtattcaaattcttattagatttttatcttgtcggtcggtttatctatcttcataaaaatccttatccaaaaaagtgcaacctctttcgccgtagaaaatattccgggaaccatgctccgaagaatcacttgttcttcttcacttgcttcaccctctctcttcctccgcttctttcgccaactccctcgctcttactcctcaccgaccaccatcgccgtctcaggccgcaacattcgccgactatcaactccaaccactcttcgttgcatttgttcacactcttcatctgaaatcatctccgagcatcctccgttcgtcagggtttacaaagacggtcgtatcgaacgtctttccggcaccgaaacagtcccggcttctctaaacccacgaaacgacgtcgtttcaaaagacgttgtctactcaccggggcataacctctccgttcgtctctttctccctcacaaatcaacacaactcgccgccggtaacaaactccctctacttatctacttccacggcggagcttggataaacgaatcccctttctccccaatctaccacaatttcctcacggaggtagttaaatccgctaactgcctcgccgtctcggttcaataccgccgtgcaccggaagatccggttccggctgcctatgaagatacatggtctgctattcaatggattttctcacattcctgtggatctggtgaagaagattggattaacaaatacgctgatttcgaaagagtttttctcgccggagatagtgccggtggtaatatatctcatcacatggctatgagagctggtaaagagaagcttaagcctagaatcaaagggactgtgattgtgcatccagcgatttgggggaaagatccggtcgatgagcacgatgtgcaagatagagagatcagagacggagttgcagaagtttgggagaaaattgtgagtccgaatagtgttgatggagcggatgatccgtggtttaatgtggttggatccgggtcgaatttttccgggatgggatgtgacaaggttttggttgaggtggctgggaaagatgtgttttggcggcaaggattagcttacgcggcgaagctaaagaagagtgggtggaaaggagaggtggaggtgattgaggaagaagatgaagagcattgcttccatctcttaaatccaagttctgaaaatgctcccagcttcatgaagagatttgtggagtttatcactggttaacattgttctttgtgtgacacgaataaattttgatgtaacctttgaatttgatttggttctctatataattatggttaaggaattaaatacaggaatgactcggttgtgactatatgagatttgtggtctaatattttattttattttttgttgctgacaaatagtaacacaatttagtttcaaatacgttttatgcatatacatgtatcataacaaacctcaaattgtcattgaattgggttcaaaggaatagatgtacagtttgacaaaaaaaaaaagaaaaggaatagatgtacaatgttattgatctaatttgtggctattagttattacaggctcagaatcaagaaggtaacgactggtgcatgcatatgtatacaagtactcacaagatggattgaggtcgggttattgtctggatacatttgtaataagagtttttggttatacaccatcgggtccacctctagtctgattaatatccaaatatggaaagcaatattggttaagcaacttgtgattttatcattttgctaaaaataactaatgatttgttagcaaaagtaacttatgatcatatcaaatttaaccaaaccagttcatatcaagctgtgtacttgtcagggtttgattggatgaatcagtgtatactcatacatatagtaaactcacatacatattactctgtttctgttcttcactctcttttccaaagaagatggaatctgatctaaccacagagcatcatctaccattcatccgaattcataagaacggccgagtcgagcggcttagcggcaacgacatcaaaccaacgtctttaaacccacaaaacgatgtcgtttcgaaagacgtcatgtactcatcggaccacaacctctccgtccgtatgtttctccccaacaaatctagaaaactcgacaccgccggtaacaaaatacctctactcatctactttcacggcggagcttacatcatacaatctcctttctctccggtttaccataactacctcacggaggttgttataaccgctaactgcctagccgtgtcggttcagtaccgtcttgcgccagagcatccggttccggcggcttacgacgattcatggtctgcgattcagtggatcttttctcattctgatgattggattaatgaatacgctgatttcgacagagtttttatcgccggagatagtgccggagccaatatatcgcatcacatgggaataagagctggtaaggagaagcttagccctacaatcaaagggattgttatggtgcatccaggtttttgggggaaagaaccgatcgacgaacacgatgtacaagacggagaagtcagaaacaagatcgcatatatttgggaaaatatcgttagcccgaatagtgttgatggagtgaatgatccgtggtttaatgttgttggatccggatcggatgtttccgagatgggatgtgaaaaggttttggttgcggttgccggaaaagatgtgttttggcggcaaggattggcttatgcggcgaagctggagaagagtcagtggaaaggaagtgttgaggtgattgaggaagaagaggaaggacactgcttccatctccataaccataattctcaaaatgcttcgaaattgatgcagaagtttttggagtttatcataagttgaatcttgatgctcaagtatggtattagatgacataatccttttatataatcatattgttaactttaataataatttatgattttaatcgtcaaatttcggagagttgaacatacaaataacttatgattttaatctctaattgctgtgaatttgtgtatcaaactcctgtatattcgataaatcattcgtataagattgttcggccatatcaataaccggttaggtccatacacatagatttcgaaatttgcacctccggtttaaattttcgaaccgaaccgctttaaaactcctcgcggtcggattaaactattcgcatccttaagcacagtctttgccggagaaaatattccggtagccatgctccggtcattaacttgttcctcgaccattacttcgacctctctcttcttccgctctttccgccagctccctcgctcttacttgtctccctcatcgtcaacgaccgtcgtcggtgcctccggccgcaacattcgccggctttctactctagaagctgctgggagacggctatttctacgacgaggcttgaaactactctccgccgcgagtcgtggtctcaatggacagttctctcgcttatctattcgcgccgtcgctacacaatccgcaccttcttcttatcccggtgagataatcaaactctttagctggaattgaatctgtactctttctctgtaaaatttcaaatgtttctattttccgagtagtttctagattcagagtgtttctcgttggtgaaatttgtgtttagttgatgttactttactccacaaacactctcttatagagaaatttccttgggcttttgatcaaattgacactatacctgcgttaggataaaatggaacattttcttctcatatttgatttatgtttttggttaaatagtgttctgatgagagtcaaatgtaggtcaagatgaggctgagaagcttggatttgagaaagtctctgaagagtttatctcagagtgtaaatctaaggctgttctcttcaaacacaagaaaactggttgcgaggtgatgtctgtttctaacgatgatgagaacaaggtgtttggcattgttttcaggactcctccgtaagtgtgttctagaacacatgaatctgtcctactagtttatctttagtataggtgacttggaaatttatgttcatctcggtgatttcttaacggtttgtaagaaatttgtggtatatgaggcttcgttcttggattatagtcgagtgagtgaaattgtagcatatcaaggtcaaaaattagccaatgttgaatagttttgcactttcagttggaataggtaccacgagctagcgaaaattgtaagtggaagtggttgacagtggtttgataaaagtttggttcttgatgcaggaaggattccactggcattcctcacatactggaacatagcgtattatgtgggtcaagaaagtacccgatgaaagaaccatttgtcgaattattaaagggaagtttgcatactttcctaaacgcattcacatatcctgataggacttgttacccagttgcttccacaaataaaaaggtaataatatataaatactcttttcttccccaaccactgtcatatattcaagtttggtctgatcacatttcatcactatctatgctaggatttctacaatcttgtcgatgtatacttggacgctgtattcttccccaagtgtgtggatgatgttcacacttttcagcaggagggttggcattatgagcttaacgatccttcagaggacatatcttacaaaggttctatttattacatatgcctagtttaaaagcttgtttgtttttatctttccgtttgttgaacctctaatctattaacttactctccctgtctcttttttgatgtttcacatatcaggcgttgtttttaatgagatgaaaggtgtctattcacagcctgataatatactagggcgggttactcaacaggcaagttttgattgttccttaattttcttgaattattcgtccacaatctatttctaagaatgaatttctgtaaatgttttgagtggatgtgcagtgtctaaaaatttagctttgttaatttttgatgttttatagcttatctgattaaatgtgtgtgtgtgtgtgtgtgtgtatagagatatttatctttgcatgtacgcgtctgcatttaatagtttgttggtttcgtattaataattgaagtttctcacaaaacaatacttcaacatctgctcctgaagtctttgttagataatctgctttcattattctttggtacagtgtggtgcttatggaacacacttgttttctcttctattttcttttaataggcattatgtccagaaaatacatacggtgttgacagtggaggtgatccaaaagatatccccaagcttacgttcgagaaatttaaggtttgttaagtacgtcatgtgatataattaaacgttgaaataatatgatattatcttgcgacaaaagcgtaatactctgtatgttatgatctccgatgcatatttattgttcttcatgtgaaaaattccaggagttccaccgtcagtattatcaccctagcaatgccaggatatggttctatggagatgacgatccagttcaccgccttcgcgtcttgagtggtaaagagccatatcttaaattgtactttctgttggggcatttccttttcttgatctatgttcgccattatgttattgttttacagattttgtctctattttactaatttgtgcagaatacttggacatgtttgatgcaagtccagctcgagatagttcaaaggttgaaccacaaaagcttttctctagacctcgtaggattgttgaaaaataccctgctggtgaagatggtgaccttaagaagaagcatatggtgtgccttaactggcttctctctgacaagccactggacttacaaactcaactcgcacttgggtttttggatcatctaatgcttgggactcctgcctccccattgagaaaaatcttattggaaagcggtttaggagaagctcttgttaatagtgggatggaagatgaacttctccagccccaattcagtataggtttgaaaggtgtttccgatgataatgtccaaaaagttgaagagttggtcatgaatactctgagaaagttggcagatgaggggtttgacactgatgctgttgaagcatccatgaataccattgagttttctctgagagaaaacaatacagggtcgtcccctcgtggtttatcacttatgcttcaatcaattgtgagtttatctgcctttttctttggtttgtcttatctaatatatttgtatagtttcttattttagtgttggatgtttaggcgaaatggatatacgacatggatccttttgagccattaaagtatgaggaaccattgaagtccctgaaagctagaatagctgagaaaggatccaagtctgtcttttctccgctgatagaggagtatattttgaacaaccctcattgtgttactatagagatgcaggtattttttgtctccgagtttctcattgctgtctaatgtttctataatcttatgcccaaaacacgtttgtcagcctgatccagaaaaagcttctctagaggaagcggaggagaaaagtattctagaaaaagttaaagcaagtatgacagaagaggatcttacagaactagcgcgtgccacagaggagttgagattgaagcaagagactcctgaccctcctgacgcactgaaatgcgttccaagtttaaatttgagtgacattccaaaagaacctatatatgttcccactgaggtgatgattatattagctctctgctgttgttggattccttttaatttctcagcttgatgctgatatggtgctttataggttggagatattaatggcgtgaaggtgttgcggaatgatctctttacaaataatatactctacactgaagtagtctttgatatgggctcagtaaagcatgagcttcttcaactgatacccctcttctggtaacttgttgacttctacatctgatgatttaaccgtaagactttatattctgcttttggttattcacctaatttttccagaaatgcaaatggtgaaaatatttaatgaagaatactgctacaaaaaaattccaagcattccctgttctcctgattgaatctctaaccaaatcacaatttcggatgtctgacgtagttttaagcatttagaataacatatagcttggtttttgtccgagggagtgtccatgtctattttactattcttgacttttacttaagtgttctcaacaacactcagttgaaatgctatgtcaaaaggcagctttcaagcctcctgctatagtgtcatgatctgttatactatttcttagttgcattttagttatagcagtatcaaggtcgatttccagttacatactcttactaacatttgcttccaatttcactgtcaattttcttagtagcttcattacacttttctcttgtctcacactagacattcgcatgctatgttcttaatcttccgtagatttgaccaacgattgtttccagttggggtttattactgagtatcctattcataatcttttccgtcagtataagccagtgggataccctatgctaaattcgttttaacttttaactcctatataatttctgttttgacagtcaatcattactagagatgggcacgcaagatttgacttttgtacaacttaatcagttaattggaagaaagacaggagggatatcagtttatccccttacatcctctgtgtatggtagggatgatccatgtagcaaaatcattgtgcgtggaaaatccatggttggacgcgctgaagaccttttcaatttggtaatttgctttaacttatcacatttagctggagataacatacgttgggatagttaatttagagttttctagctgacagatcaggttctgccttggttctcaagatgtagagtgcaagtttaaactttttgcctcatgtcctctaactatagccttgtggatagctcttctgtccatcggtttatcagaaagcaaaacctgtttctttcatttgtgtctgcgtctatgaagtatctcttctgtctcctgatctcttccctcttaacgcagaaatgctcactttttacctctccctatgctcatgtcatttgctgagcagtatcttatactatatttgtgtgttcaagttagagtacagaggtacactagccaatcgttcgctatttgaaaactgattctgttaattttagagctgaattttagtatgagcatattcaagaaataatcctaactttcgagtttaaagtacaaaaaatggagacatagaaattagctgtagtttgagattcttaaaattctagttaatttcctatagaagttgtagtttgattcttatgtttcattcacttttgccttgctgcagatgaactgtgtgctgcaagaggttcgatttaccgatcaacagcggtttaaacaattcgtttctcagagtagagcacgaatggaggtatgcagttccttcttccttttgcattcttaatagaaaacggtggtagtaatataacaccaactcgtattcattttagaaccgattgaggggaagtggtcaaggaattgctgctgcgaggatggatgcaatgttgaacgttgctggatggatgtctgaacagatgggtggtctcaggttggaacttgatcactctttctttcattgttagtttttaccatttgttttgacctcttgatttgattgcatctgtgggagaagaaacttaattcatattcttagtttgatcttatacttatagagcctaatagagttttgctttgatctttgttgtagttaccttgaatttctacacactcttgaacagaaggtggatcaagactgggaaggaatttcatcctcacttgaggaaatcagaagatctttcctttccaggaatggttgcatagttaatatgactgctgatgggaagtccctcacaaacacggaaaaatatgttggaaaatttcttgatttactccctgaaaatccgtctggtgaactcgtcacttgggatgctcgacttcctttgagaaatgaagctatagtaataccaacccaggtaaataaaatgaaaacccttctatatattttgtgtcctttggcgtgtatttctcttcacccgtcttctacttactccacaattctattcttgcctttttgacaggtgaactatgtgggaaaagcgggaaatatatacagcagtggctacaaacttgatgggagttcatatgttatatcaaagcatattagtaacacatggttatgggatcgtgttcgtgtaagtggtggtgcatatggaggttcctgtgattttgattcacattcgggtaaactgtttttcttttccattttgattttgatctgacagagtcttccccaagttgcaaattctgcgtcagacctgacctttggattttctcttgcacaggagtattttcgttcttatcttaccgtgatcccaacctattaaagactctagacatatatgatggaactggggatttcttacgtggcctcgatgtcgatgaagacacccttaccaaagcaattattgggacaattggcgatgtcgattcataccaactccctgatgccaaaggttataccaggtatgatgtttatttatgggttcttctctggtctttgttggctttttttcaaggaatgtaatgaatttcaatctaatttcccatctctatcaacagtttgttgaggcatttacttaatgtaaccgacgaagagaggcaaataaggcgtgaagagatattatctacaaggttaacagcattctctcatttttgctttagcgtatatacaaatcaatttatacaactttttcactttccacataatggtatgccgcggatatcctgtggggatttatgaaatccttggggacaatgttgtgatctgagttttgtagtgttaggagtttaacgacttctttgaatattaccaaatagccagttgcaattcttcgacatagttattatcaaacagataagaaaagtaacttccattttatcctttttcagtttgaaggacttcaaggaattcgcagaggcaatagactctgttagtgataaaggcgttgcagtggccgtggcatcacaagaagacattgatgcagcaaacagagaacgctcaaattttttcgaggtgaagaaagcagctctctgagtctgagaccctcttagaaagtagcttgtcacaatgaggaatgactcttcttaggttcacggtacgacgcatcaaatctctaagctcgtacttatttgtgttttacttcactgtgttttgtatagttatatatgccaacatcatgacttatcacagttgaaatttagcatttttacctgaaaacacaggctttagctactgttgcatttgagttgttacttttttggacaatttttctttcgttttagcctttgctctttaagaactaagaatcctagttctatttatattccattatcgtatcaagataagctctcgaggattttcctgtaccttttaggttataaaaccagtttcgtttgattcacattttgttgaaaatgatgagtcaaaatagacattatattcatcattggctgggatcggatcgaacagtgcctgttcttgttaaaacaaatggctctcagtcatacaaaagatgcatctattattcatcatgtgtcgtgatcttgttattgtcatactatctaatgtgactactcatgcttcatttgtttttgtttgtgtttttgaagtaggtcgtaggtcttaaacatttccaagtgaaattgaaacgcttattcttttaggacattggcatcaagatctctatgttacttttataagtgaattagtctttaaagttactttttattaacattgattcataaagataacttttgtaaattagcccataaacaaagatacttgtattgatgaatcttcttcgtctcatccttttaccattatccttgaaaattctgattacatcattattatggatgaaaattaacgaagagtcttcttttttttcttgtgataaattttaaaattattgaagaagcagaatcggacaattgaagcctagattattttttatttattttttgcaaaatgaagcctagattctaatatttcatattttcgatattgtacatgtgtaactttaaaaaaaaaaaaaaaaaaatcccaagtaaatgcttgttagcacaattattatgtaacggtcaattattgctcattatttcactgccaaaaaataacgaaaatggtcccattttattagaaggaaataaacatgttgtatgtgtaaaattcttaacccatttttggacatgtacagattccatgtaaaagctggattttaagttggttttttgttgttgtcatttaataagtactatttaattgattgtatttatagttctgtctccatgtgaagctgctcataagaaagtgaatgctttagactctaatctatgtgcctagttatatccttaagaagttgatatttagagcttatgatagaaattatgaatcagcaaccatcagaattattttttttgttttgacaaatgtatttacgtgtaaaagaatataagtttaagaaatctatagtagaaagtagattaattaacaaaaattactgtcacaactcacatttctacagcttataggacgacgttttagttttgggttgctttaaaaggaagctaaaaacggcaaaaaagacgcgtcgtttagaatcccgacggcgtctacgctccgtaacgacgccgttacctgcttccccgtgaacgggactcagtttaaaggaccccactcaaaaccggcacaacaacggcccatccgctataggcaaggcccaataattaaatctcagccgttgaattaatcaacggctctagatccttcatcttcctctcccccaaatacccaaaacccttcctctgtttttattaaccagagaaaccccaactttttcataaactctctccagagaaaactataatgagcttgagagaaatgagcgaaacaaaacccaagagagattctgagtacgaaggatcaaacatcaagaggatgagactcgatgatgatgatgacgttttacgctcaccgacgagaactctttcttcttcttcctcttcttctctggcttactcggtttcagattccggaggtttctgctccgtcgcgttatctgaagaagaagacgatcatctaagctcaagcatcagctctggttgttccagcagcgaaactaacgaaatcgctactcgtcttccattttcagatctggaggtgaaatttcgaaactcgagattacaaattttgaaatttctctgtttcacaataaatgctctctgagcaagatctgattacgtttttttggattaattaattttgtttccgttttcaggctcatgaaatctccgaaaccgaaatctcaacgttactcaccaacaatttcaggttaattactaaaaaagacgtttcaaagatttttcaatttcttcattgtttcgtctataaattcataatttttggaatttcacaggaaacagggaatttcatcaagcgagaatctgggagaaacagcagaaatggactcggcgacgacggagatgagagatcagagaaagacggagaagaagaagaagatggaaaaatcaccgacgcaggcagagcttgatgactttttctcggcggcggagagatacgaacagaaacgattcacagaaaagtgagtcttttttagacccacacacacgcgcatgatagcagagatccttaacttgcagttgtttaaaacatgtataggtacaactacgacatcgtcaatgatacgccgcttgaaggtcggtaccagtgggttagtctgaaaccttagaagccatggaagaacaaaaaaaaaaagaaaaagaagaagagacagtgctaaagttacacgtcctagtactgtgatttttgtcacagacagaagaatttttagagacatttcattgtacagtttttatctaattttaatttcatcattatcttcatctgttcttcgtaccaagagtttttttttttaactagaagtgttaacatatatttgagtttaattctctctgtctcggtgatattgttggattgttcaacaaaaaaagtggggttacaacaattaaaaattggaattattgtgtcagtaaagtttcactaatttttgtcagttttgttgtagtgaatttggtgttgtgcacattattagtattttcatgaaattgggaggatttacgtatttatgaatttggaaaactatttattgttttgattctcaccttggatgtttatagaaattgtttttttctcttctttttgttgcttgtactttatatgctattttataacttttttatttttcttgtttcgacaattgttttagtgaaacaataatggtaataggaagaagaaaataaatatagattttaaggaaaatgggtaaaattagaaaaccataacggtatatatatatcatacacttggtatgtactttctctatagttcgaatgaatattcctctaatttccttgaaataatttattttattattttatcaagaaaactttatgaacaaagttgaatgtttatttatcaaaaaaaaagaagcaaatttgaaagctttctcgatgattgacgtttttttttctttctgaaatttaattttcaaattataaatgagctttacggcaaaaaattaaaactttaaatggcaagaatacaaaaaaggaagagagagaagagaatagagaggatctcatcattacctgattccgttgggattatattccctttttttaattttcttttcttattttaatttcctacagcaggcaaaggcgcgtgactccacgtgctttctgttattttagtttttcttttcatttattcttttttcctttcccttatttatgtactttttttgcgaactgactgttattatattttacttaacaacacgaatttaaatttgaaaagaattgaagaaaataaaaatagtgcgattaaggaaaaaaactaaataataatgtacgtcataattaggttacctcttccaacaagccacgtgacgagggaagggtattttaggcattgtactcacaaagtagtgaaacatataatgttgtgacttggtgaccaggcaaatgtaagttttgctttctattctaactgttcctatcctgccaggtcaaatttttcacaatttttgtttaaaaaataacgaagaacaataaaactctagtgaatatatatatattagttagcaagtattatttcattaaaaacggatgttatttttattagttcgaatccttttccatattctactttcatgtctattttttcttttttcaaaaacattttaacttcagaaaaagtcatctttaacattatctctttggtcagcggaagtaatatgggatgtagaggaaagaatgggtaaaagatgaccgagtctttagttatgtaaaaattatgatttttgttttttgttgaagagagagcttctttatttgtgatcatcatttatcatttttaaaaagtttaagaacaaatggatatatatatatatatataagtactatatattgtgcttactctatatttcattgggtggtatagtatttgttttgtttcgagtaaggattgagaaaatgtacacaaagttcaaaatgggtgaaaacaaattactagcaataaatatgagaagtaaaagtgggggttaatattacaagactcactgcatgcacatgacttggatcttgtgaaactttctttcccatttcataaacatcagatccaatgcctacctataggctatagaatgttgaacctttcccactcacacaagttacccctacctacacgtgtgactggttggttatttatcgagttcattggcaatgttgtaaattatgctgagttatttacctggcttattttttattcttcaaatagcgtagcatttagtgtgttttaaataagtagtgtgttattttactcataaaacattgttaaaaataatattagctatttaaagtatacattatttaaatcaaaagtttggttgacaaaaagaaagaaggagaaagtacaagtacactatcagtatcagaattaaccaattatctaaatttgcaataaaaaaacataaatttagtaaaaggccgaaaactgtgagatatatgaacccaatacgaaggagaataactgtattgggtttagaggatttaatgggcttttataaatgcagtaataactgtattgggttttaatgggcttttataaacgcagtaatggggcatgattttataactcaaaaacctatctcataaacaccattacgatggcgctcgacggcgagaacagagacggtggctccgcctccgtgagagtcctcaagcattgcctcgaagatgtagactcaataagctctttgcctgatgtgatcctccaagaaaacctctccttaattccgaccaaattcgccataagaacatcggtcttgtccaaacgatggaggcatgtttggtccgaaacaccttccctcgacttcgatgattgctataaactagatgttgattttatagacaaaaccctagctctctacagggctcgcaagattatgacttttgacctctggatcaccaacggaatcaatcttccttacattgatggatggatcaagttcgccatgtcccgaaacgtggagaatctgtttctgagtttcgattttcggttatatgatgttcctgattacttgtacatcaattcctctgtcaagcaactcgtccttgggacagaatcttctgaattgaatcccagatgctctgtttcttggagttccctcacgaagctttctttatttctctgatgagtccattgctaagattctttctggttgtccgattatcgaaagcttaacattgcatttttgtgatcaactgatggttcttgatctcaccaaatcaccgagtttgaaaatattggaaatccatggtagcatttggggttcggggccaaagcacattgtggcaccgcatatccattctctcacattgaaaacctctcaattctttatctacttttgttgatatctcgtctttaaccgaagctaaagtagacatttgcttttgctcacttaaagagataaaggctaatttccttctcgacacggtgctcaagtgtctttacaagttgcagaatgtagacaagcttacctttggggcaaactttcttaaggtatgtttttcatgttttcaagtgtcatttttcttattgagatttgtttcaaaaaaaaactaattgtctgtactatttgtaagattttatctctggccgagggccgcggtcttccttttccgatgttcaaggctaaagctttgactctcgagacaacgatctctaaatacgttattcctggtatattaagagtgctacaaaattcacctgaactaaagaagctaaccctacacacaatggatcgcgaggctagaactatgtcctttcactttgagtttgtagaatctgagatattgacaatctgtttttacattaacgaaattcttttttgttctagtacagggtgagtatgatcccacgtacttgcgttgcatgaagctggatcattgctcgatctttgcaaagatttcccgtcggaatgtagagtcaaagcatgtggcttcgttcatggaacttatgattaaaaccacaaagaaattagagaagatggtcgtaaggttggaaagttatcttgatggaagaggtttcgaagaattgcttgagatggttccaatgctttctcaaaacaacaatgtctccattgtgcttagctcaaccaagccgagacagagtctttagtcttgaattttattggatattttacataatctcattttaaaacaatagtaggtaaaaacattcaggacatttcttggaaaaactttttttgtttgaattattttcttaaagttaattttaaacttaatatgaggaagaggtagttaagtaatattctagttattaatcctaatccatcaaatattaattcataaggtttgttttcaagtttcaacagatagtttgatatagcattaattatcgcttaacaatgaatgccattacaatatttttgataatcttattttgagtaagagtgtctctcaaattttatttgtttaatattctatctcattcttcaccttagttcctcaagacatgaaacttttcatagattttatgaaatatcaatgatattattttttacttaaaatctaacatttacctccggtgtaaatggttatccattagatgaatgttatgaaaataaattggaggaaaaaatagagatgaaaatgctatagagtggatgaaaacttttcttaaatttctcttctttgttcatcttattaaagatgaaagagattaatactaacagattttaaactttcaatccaaatggtaacattttagatgagtctttttttcatccagttttttcctcgtaatatgtctacaatttcaagaaagcttatcaaacgtttagaatttggcaataatataatttaataattattcctaaacttttcataacatttcttaaatgttgtttacagccaacaaagagtaccttttaaaggtgtcttatgttcatgtttcgggtagattgtatcccaacaaagcttcaaaattgatccgacaaagatggcatcaatttgtttctagccaactctccaaactatcacaaaaatttatagttttcacatctttttaccattgattccttttgcatttaaggatcattataacaccaatcacaaattgttttaatgaaaaaaacagtttatgtcacaagttcccctcttcatagaccacaatgcattgaaacatatggattcactagctaaaagtctcatcatcatatgtctctctattggtttcaatatccatttataatcccaagaaatttatttacccgatttgggaacttaaatcattcatcaactgtcaaaagttgatgtcaacccctaaaaatacggtcgaatcagaaccgtcggatctaaaagtacataacatggcttcacttacgtaactgggccccacgttcccaccacttctctctcagacctaaaagcgaaaccaaagaacaaaaaaaaaaaaaagccttaaaccctccgaatctacacaacacaacactactctcttctctctctctccgcctccatattatcctccaaagaaaccataaaccaaatctaatcctctctctctcggtctcctccattacctaaacaaaccctttccaacacatacatatcgagagagagagagaccgaagtttccgagtctcgtaaccagatcggatccgaaagttccatactttaaaaagatgcagacaccaaacaacaacggttcaacagattcagtgttaccaccaacatcagccggaacaacaccaccaccaccgttgcagcaatcaacaccaccaccgcagcagcaacaacaacaacagtggcaacaacaacaacaatggatggctgcgatgcagcaataccctgcagctgctatggctatgatgcaacaacaacagatgatgatgtatcctcaccctcaatacgctccttacaatcaagctgcttatcaacagcatcctcagtttcaatacgctgcttatcaacagcagcagcagcaacatcaccagagtcagcagcagccacgcggtggatctggtggtgatgatgtcaagactctttgggttggtgatcttcttcattggatggatgagacttatctccatacctgtttctctcacaccaatgaggtatctctttcttcttaattttttcttattgttgtattgattcttgatttgatgatatttgtaattcagatctttacttgttgttgtttcaattaagatgtttttagtgagtggaatcttttgttttttgtgttctgacatggaaagtgattgatgtatcactagtgtatagatccgtgacttttttttggttattggaaaagattcgttactgtgaattcaatgtaaatttggcaagttttgaactttttgattgggtttgagatctaaattgtgtagaagccaaaatgtttgacatttagggtaatggagaactatgttgacctgaaaaaggacatacttttaaagttcatttcataaggcaagaaaagtacattgccacgtttagagaacctttctggttataggaacaaaaagaactccaaacattgtcacaagatctgttctgttttatcataaatttgtgtttttattttcccttttagcttattctttcttgttttgttgttttgtgatgtgtaggtttcttctgtgaaagttatacgcaacaagcaaacttgtcaatctgaaggatatgggtttgttgagtttctttcacgttcagcagctgaggaagctcttcagagctttagcggtgttacaatgccgaacgcggaacagcctttccgtttaaactgggcatctttcagtactggtgagaaaagagcatcagagaatggtcctgacctatccatatttgttggagatttggctccagatgtgagtgatgctgtcttgcttgagacttttgctggtagatatccatctgtcaaaggtgctaaagttgtgattgattccaacactgggcgttccaaaggttacgggtttgttaggtttggtgatgagaatgagcgatcaagagctatgacagaaatgaatggtgctttctgttcaagcaggcaaatgcgtgttggtatcgcaaccccgaaaagggctgctgcttacggccaacaaaatggttcacaaggtaagtgatgagataatctttgtgacttaatgtagcattagtttcagtttattatcatttattatgtttttatttccatgttttctctctgttcagtgaatgcaagtggttttattttctgtttatgtcacttttagtaactatgaatatgaattttaaggtttaataacttgtcttgatgcgttaaacatagcatctgaagtgaattgtaatgttttcattggattagctcttacacttgctggtggacatggagggaatggttcaatgtctgatggagaatcaaataactcaacagtgagttctcttttagctattcctctgctaataacagtatacctcactgctcactgtcttttattacattgcagatatttgttggcggtcttgatgctgatgttactgaagaagacctcatgcaacctttttccgattttggggaggttgtttcagtgaagatcccagtagggaaaggatgtggctttgtccaatttgctaacaggtactaaacctgttctgtgcttgtcagctttgtcatccggtactgtggtgcttgttcaatatgatgagcgaatccgtaggggattattttaacagtgaagatgggtaaggtagttgcaatgtgtgacgtgcccttggttttgacaggcaaagtgctgaggaagccatcgggaacttgaacgggacagtcattgggaagaacactgtccgcctttcatggggaagaagccccaacaaacaggtacaagaaaattttagttggatttgtgtttttaaacattatatgcatttctattggtatggtcctatggtccaggtcaaacttagctttagagttcttttgggtctttatatttctgtcttcatggggtggataaagttatagaaatccttaaagccaaagtcagtggttgacaatggatagtagtaggtgtattgcgggccataaagacctagtggaatttaccaccttcccacggttttcgttgactatatctattggcaaatctaatgcatatcaccttggcccacttatcatctccctgaattatccaatctctgaaataatagtaatggttctgtgtttcttaggattgagaaaatttacagctattaagattcatgagctagttgaagcatgtactgatgttatcgtttatctttagaggttgtcgaagtttcaatgtttcatgtttgtcttaattctctattagtagttgtaatcagtggacaagctaaagtaatctctacaagaataaccaacttggtagtttttatccgtgatgttctattgaatgttttaatccatttactaatcttgttcaacttttaaatctaaaaatgacagtggagaagtgactctggcaaccaatggaatggaggatattcaagaggtcaaggatacaacaatggatatgccaatcaggactcaaacatgtacgctactgcagcggctgcagtcccgggagcttcttgaaagtgttggtatgtctctatcatcagaaaccctgtgagtcctggacttacgggtattgggataaaaacaaaccgttgggtgatcaaagtgatccatccgatgatagttgttggttcagaggttagctcgcaccatcgaaactaaaacctctagtgtccaaagagggttttgtatcctggatttgaatcttgcttatcttgctgtctcagtctctgtcaaaattttggggtcgtctgatacttgaattttttattttcagttttttttttgagttaatttgtctttgttactgagacttcctcaaagtcagagcttggtccacaataagtaatttcctaaatcgtttggatcatttattagtgtgcactttgcagtgctttgatagttttacttctttagagtagtgtttggtttcgatttattcccatcttaacaagtttatgcataatttcagaaactgattcatgaaagtcaaccaataaactttagaagaatagaccaaaaagaacttaattttctaaactttttttaagacgaacacaaaaaaaaagttgtgcaaagacctcgtaacttcatcaaaatgggtaaaatgtggacttccatcattctgactataaaattgaataggtgtgtacaacaaagaggaaactgatatgactggaacaacagttagaagaacacaagaccaatgctcccagaaataccagagagttttggaataaactgtcatgtaggaataactgaaataaccgccacaatgagatcaatcatcactcttctctgcttagcctctcccttttgcatataggatcaagccaatgatgcatcaaaagggtctattgtaaagaccaagcaatggtttttctctatcttcaactcgtttcctagcagcttctcttgccttcaatgcagctttctcttctgcagatactttcttcggtttctcatcttgcctctttctcttgttgttgccaagatcaacagatgaagccgctcctttcacagctcttttaggatttaaagaagctgtgacaagacggccaggtggtttccccacacttggtccagctcctgaagaagatacaggctttttcacgagaggtactttggttcctgatgatgttttaaccgcagcgtaggcctcgtcttgtgtcacccaatgtcctgtttcattacccgtgtaagcatacacacgacgaaattgtatacaatcatgtttgcaaggaaacaaataaaaaaaactcgatatatattacatacctattgagtcactgtaatagaatccagactgtgaatcatagtgcagaccattggtctggttgtaataatagcctgaagcactgtcgagcatccaatctgccataacaatatggttactacatggtatatgtataaatgaaaaaggctaagaaaaatggcaatcaaaatgatgaaagaacctgagagtgactcaaaagaagcaaccgtttcgctctttcgtgatgattctctatagggttataggcattaaaacttataagtcatttgcaaagatgtgtaatatgacaatcgaagaatcagacgctgcttggtttgttcatacttttggtcaatgaaagcaattcacaaatccaattcacacatactctacgacctcagtaatgttaagtctataacaaacagatccaaagctaagcaacaaccctgaatatagcagctataagtcgaagaacaaatactaatgacatcatagagagagatacttaccggatgtaccatcctctggtgcaccgtttgctttagctacttgctgagcagttgcaatatctttctgatagctacgagttgctttctgaaacaagttgagatataaacaatggaatcagaaataaatacgttagaataagtatcactggcaaaagaaacaagaatgattactcacagcttcgatctgttgaagcagtttttcgtttttcttgagctctttgtctttggctgcactcctctcacgcatatcagtgagcttcttatcaacacattctcggtgacgcttaccaaggtcatggtttctaatacttgttggattgttctgtatccatatcttacagaattcacaccatttgttcccttgacttacccaatactgaaataacacaaaaaacaaactcaagatcaatttcaattacgaaacaagacagaggtttcgtaattcaaagagatttggagagaaaagatgcgaattttgatttacctcagtcatggctgtggatcaaggagatgaagattgaatcgaaaattaaacccagaaaacgaagttaccggaactataagatcaacttttaatcagaatcaagaactaagtgaagaaaaatctcgagagaaagagagagagattagaaaccctaattccttaaactcgaatcccaaactcgagaggagaagcaaaatataaaattgggggagaagaaaatcggtttggtttgttttctaaattctaatttatttccatcactagaaccggttttcactggttacaccgactcagatctcacaaattaaagcacagtaacaaaccggaaataaccaagatttcgctgattccataatcattgggaagaaagagagacaaaaatcaaatctttttggaattttctttttcattttcttgacttcacatagagtatcaaagtatctgtggttactatattattacaacaatcttttttttagaattgctcttgtaagaaacttttcatttgttgtacagtctttgaccaactattacatttccaataccaatccaagatttagagtaaaggttttgacatcttcttttacgatttcgcttaggtcatgtttgttttcgttatcttcaccgggtagttttccccgaggctcgaacagagactccatgtaacagtttaacaaacccgaagaagctaagctttccatcagtgtgtctgatccaatcatgtagaactgaatgtaccggtatagatggtccaacaccaagttcctgcaattcaaaagcatgtcgttttagaggatctgtttttcgatatttttgtatttaagctgaagacagatgctttaacttacagaggcaagttcttcgatgacaatagctcggtttccattcttgtcgaaaagctcataagcatgtcgaatgctctgttcccaacaatcaagcgactcgtgctgatgaacgtttatagcagctgcacaaaactcttcaaaatccattcctctgtattgaagtccatttagctgtaaaaagccagtcaatgaaggatcattaacaccaaattgttaaagcatttatcaaaatccgagagaacacagtcatttaccaaagcaagaaactctgggatccgagattctttcattgcttctgttgcattgcttgcaagtgcctgtttaaacagaaacaaaaaatgcaatacagattagattactacggtgtttctctttttttctcaagaggaaggaatataaaagaagttatagtgtcacaaaccattctaatggtatccattgtgattaggccatctttgtttggtgcgagaagagaaaattgagttttcaggtaaagaatttcatccttgattaacgtcttcgatagcgcctgtgaaaagaaagcacataatagtgagaaagtaatcttcaatgctcttttcgacactttaaaagaatgcctaaaacataccctcaaagcagctttgcgtaatgaagaagatcgcaagtacgccttcatctgcctaaagatcaagatatcgaaagggatattcatgtccgtattataagctcggatccaaggatgcactgaaaaaagtaaataggaactgaatttggtgatttatgactaccaaaagacaggagacataaaactataaagagctgtgaaattaaaaatgactgactcaaggcttgggaggctgacattcttcgccggggatccttaaacaataaccgcttaacaaagtctttagcgtcagaagacaagaagggccaaggaggttcatcgaaactcgggtcagctttaagaacagctctaaaaattccggattcagttcttgcccaaaacggacggctaccacatagtagaatgtatgctatgactccgatgctccacacatccgcttctgttgtatatgatctgtgtagaacttcgggagctacatagtatgcacttcccactatatcgtttagtctctcatctttcaaaaaaaggggcacaaaataccatttttagtttactaaccagaagaaaaagaactggagaaatagtgacatagtaaaatgtgtgatgatgaacctggtctgacaaagtctgataagccaaagtctatcgctttaagctgagaattctcctccttggaagtgtacaagaagttctgatgatgaagcagcgatcagaaaacattctacacataaaagtaaaacataatcttctttccagttcaaaattgtgcctcacctctggtttaaggtctcgatgaacaactccttggaaatgacagaaagctaccacattcagaatttgtataatcactggttttgcgtcattctctgagtatttccctcccctgtagaaaaaaacgatgaatctttttataaaataagaacaatctctggccataagtatcgataactctttagtagcacacagacacacaccttgctagtattctgtcaagaagctcaccaccttcacatagcctgcaaattcaaactacttaaatccaattatgaaacaataggttctttttaccaaattcataactaaaacctaactaaattcaacatcaaacaaggaaatggttaaggttatgataaaataatgatcttactccattgcaatgtagacgtttgcattgtcctcaaatgcatcatagaattgtaccagattcttatgtccagataaagcctgtagaattttcacttcccttctcacatcttctatagcaattgcagttgtcatctgccaaaaaagaatcaaaacacattcaattctatcagctaacactacaatggagagtatgcaatcatcaagatcaagaaactaaactcaagttttgttaccttcgattttgggatgattttgacagcaaccacttgacctttgagctctcctttcttgaacttagcagagcaagtgtacccaaaatgtcctcgtccaatttcttcccctaactctactctactgtgaaactctttagaaaaaccaaatcttttgtcaagccctacttcctcttcctcctcacgctgcggtacctccgtcgttagctgcgtcaccccagataaagcagcttcctttttccctttcctccgccgtagcgccgcccgtatgtgtttcgccggagacggagggtgaaacgcacggcgtaattgacggagaggcgtgctagtcaaactcttgctctctcctcctccgccgacgtcgcggctcttattgcggcggtggcgagcagggctcggcgtgtaaaaggggaagaaaggagaggcctttgcggcggaaggagtaggaattggtgatttaccgggatggtcaggggcaaaatcgtcaatttgaggatagtcattaccgggagcgaaagggttaggtctgccggaggaagtggagggtttggaagtacagcctcccataatctccggcgaaaaaaaggagcttactttatgaggaaaatcacagtaatgccatcgaagttttggcttttagagaagaaagagagagcgagagagatcacatgagaaagagagcgagagagagagagagagaggagcaggggaagtgaaactgttagaattgaattttgaatctgaaaatggtggtagaaagaagaaggaagaagaagacgaagcaagtagatgtgtgcattggttagtaaattagttgcttccggccacgtattaatgaccttaatttattgcagtcttttaaatatatttccgatctgttatgtttgtcattcatgtcccatattttatttttgttatattttttaaatgaggtcattttttcaacggttgtgagatcattttttttttgtacaagtttgtgtaaattgaatttaatgaagtaacagaacctttacaaaatttaaataaagaaaattatagctgctgtaaaaaaaatagagtatgtatatatagttgacagttggtgggtacaattaaggataattaagtacatgtaaccttctagttgtaaaaaatactcctatgttttatcatgaaaattattgaatacatgtctacatatatatttatgtaagaaataattttgtatagatttggaattaaaaaatatcataatgaattgtagtttttagcctagtaattaggttctaaccaatatatactttattttatttatatgcttctagagtttacaagtttctttcgtaaaagttttttgcaaaaaatatgttaccacaaagaagaagaaatatctgttttatttacgaatatctttgatagaaaaaataaatcaaattcattttttttttcttgaaagtttggaacaaacaaaaattgacatactaaataactaagagtcaactaacgacaatccccaaactatgtttgcataatgttttaaaggtgagaagtgtcagaatctgagaaggagtgaattatgtggtgaatctttacgtcgattagacgtcaataatgtggtatgcttgagtctgtgttcgttcattcctttcctgttatattcggtcaactggaagtttggaaagatagttgaagaagaatgtatttgatattatcaaaagaagaagccgttagaaaatgagtgttatgccaatctcaatcgagagagttcaaagaataagttatcttatgtctcgtttagttatgcaaaaagaagacaagtttgagtgtgactctaaccacacatttgatcacttgagctagttcatcgtgaaacaccaaccgtccatgtgttgaaattctctttgaaactccttgcgagaaccagccaactcgactctatggtaccaccaaatcataagattgacaaacttggctccacgtatatatagaaagaggagtaggttggtttgaaattgtgcaaggcatgacatcagagataaacatcttggtcagcatcttcttttgagatcagaataactagcattcaaaattgtcttgacattaaattgaaaattatccaaacgttatatgaaaacacatcaacgagacaatgacgaatgctccaagaggtatgccccaaatttgcggtcgtctcggacatgtaacgttaattaattattacttatcatattagacaaaaaaatctttactgtgtttttactaatgttattaacacgaatattaagaaataaccagctataaaagaagaaaaaataaggttcattaactaattttcacacatatacgtttcgcttaaaactaaacctcgagttgttatatgtatatattttaaataaaaaattaatctcatttgtggaatagataatgtttagtttatttgcatgaattatatgatatttctctattggctgtttgtgttttgcatttaacatgatggtgtacgtaacctaactactattttgtatttagactatatatgtataatagattaaaatagcttatagtatgaagtatttctcattcttccactaactctaatcttgataatttcttgaagtcgttggagaaactttaatggtttaaaatttatgtcttccaatcagtaatcaacaaacacaatacctacaaagttggttgcttccatttggatttgatggatgtatatcatcattcaatgcttatttgcttctttttcgcaaaatttaaataaatgtatatatgttcaaacgtatttttctaattaacaaatatatgcatcaagtctgaatttaaagtggaaatatatgaaatggggtttgcttgtatttgggcttgatggatgtattttcatcatttctctttcaactatgtattttcatcattaagaattaagatcttcttttatttttttaaacaaaaagttagtgtatttaagaattgttgcaatttttaagactttaactatttcgaagatgttttcttttttcacgctaagatgtttgtttgttttgacttttgatagatagtgtatatttatgtagacttagtatattcaatactttaagaaaatgtatgttatatcaacaaaaagaaccatgattttcggaagaagatgtaaaattatgatcattagttaaaccccaatcaagaactaagaatatttatattcgttcaagtgagggagttcgacttaattttggaatataaaaatacaaagacaaatacattttccattacacacaaacgtaacacacatacaagtccaagtatttttgtttatgggatccatatatatatatattgatacataaggacgcttttacaccatatatataaaacatattttattcatagactttggtttatttgattcctcattaaagctagattagctctagatatataatagactgatttggattttgtgaagagtctatatataacttaacctggaaatccacattttcctcgaattactccatcacttccggtcataactccgatattccccattttaaccattgaaactgcgaaatccctcgagaacaagtacggattctcgctgtacgacttcaccaaggcggcagccgtaggatctgtcattagggtttgatcagaatccaacagtcctatgttgttcattaagttcacgtagtaagcattgtcaaacttgactgagctagctgcgtcaagagcagcgagcttagagtctgaggagtccacgttaggacacgtgtcctttagcttagagagaagtgctgaggaagcggctaggtttgggtcaggctggcctgagcccttgaagttgaagagtctatgcttgatcacgaaacattgagcaaatcctatagtatgtgctcctacatacacgtatagtcatatcgtagcataaattcatgtatatacatgcctaatgaagtactttactctatctaagtttgtttataataatcgattttgctacgtttgtttttattattttggttaattaacacaatagtcaatcgatattattatttttatctctataatttatcgttagttgaagtgaccaaacctgagaggacaacaacgtccttgaggtcgagtccaagggtcacgaacttggctgttatattctccaacgcctcaaacggagatggcagatttgtattcgccgcttgctcactcgccgttaatgagtcccttcgtcccaaaggcacgggccaaaacggtcctccagtctgcatggcatgagaagtcataactaagtaaccgatcgattatgttttgttttttcattaatattttgacatttcagattattaatgaatttgggttttaagatcacacgtacgaggacgacagcttctctagccgcgagagcaactatgtcagcgcatgaaactgttaagggacaagaactttcgatatcagatttaatgtcttcaatgacttcgaatccacggactgagtttcggtttggctgagcgttcttctctcctttgaaatcctctgaatcgttcagaagtatagatccatcacatccctacaacataaaggaaatattatatatttgatacacatatatagaccctgtagtctaggacatctactctaatatgtatttttttaatactaaataatacaaaaattgttataaattctgtagaatttgaatgattatttttataatacctatagagtatgtttgactagtgtgagtgatatataatccacaatcttatatatgcatgcgtaaatataaaaagaaaatgtcacgtaacttacaatattattaaacaaacaaaaataaacttacattgacaaaacaatcgtggaaatggagtcgaagaagagatgcagcgattcgagaatcatctttaaaagctctccaaactccggacttaacaatcgtttgaagacgcggacaagaccggtcatagaatcgatagttgagattgctagttagtccatgtccgtgaccattgttgtaaccattgttatatcccgaaggaaacgaggagacaaagcctttgaagaaaagagtaaagattgctaggtaagacacaaacaaatacattgacattttgtggtccatgatgatgaaatgaaagatatatgatcgtagattgatagtgtattgctatgatgattttagcttgtatttatacaccaaaaacaaggtgtatttttaaaaaatagatatttgccttaacaagggtgcgcctcggagatgcatgcataattaagaaagtgggaatgccactataaataagataatatagtgggataaattttgaggtttttgtaatattaggtttttgtcagatagttcagtcacttggcaaaataaatgatttgttattacccatgtgagcatgtgattttatctagaattaaaatgccatatattataccaagtcatacgaacttttccttgtaaacgtcatacaaacattcaaataaaaaccaaaacctagtaaatgttaaatgtatactcataagttttgaatagtgggagaattagtgcatgtaaataatctaaactaatcatctcatgcccttactttttcatttttattgataacgttgtgcgcatttggggtgtttagcgcagcctatgtacagcaaaaatgtaatccggtttataatgatctattggagaaaatatcggtctaaattccgccatcaatctccctttatctcttcaatggatgtaagttataaggtaattagcaagctttttaagttattaggtacgtaccaagctgatcaaagtcaatgtgaactagttctcatgcaagactcatcatttatagggggtggcttcggatcaatattcaaatcctaaataataaattatctacgggtttgttcaaatacaagtctagaatcctaaattagacgaactaaagaaatttttgtaaatatccaaagaaggaggaatgggatattagttactttaagtcttccagaaagtttagggaggttaaaagaaatttgcttatacgtagaaagtagaaacacttcaaaggccaaattaatagattatcagccaaatttgtctccaaaatagaaaagtaggctttgatgaaatttattgctctcgtctacatacatatgttaagtaatgtttccaacttcttcatagtataaacgaggatttcattagatggtccgttgcaaatatactttggaatttaactatatatcatatatgccaaacttgaaacggattctaaaggtcgataatatcgatcccaaagatggtatcaccttcttatggatggtggaatttataatttactcgaggtctaattgataaaagaaggagtattcaactgtgatcatgatactccgatccctctcgatttaaaatgatatttggattttgggggaaacctttagacaagcgctgccattatgctcggtagaacatttcatccaaaccacaaccaaatgatggaaaatgtaacttatacttacgatctaactcttgttcttgtatttgttctgtttgtcacataatatcgcacttgttcttagacttttcaaaacattcatttttccggataaaatttggagttttaagaaacatgtgtacgtaaattttaaattatttttgtccattatgtttatgacatcaagaggattgcgcaacatattccactacgtgcccatgttggaagcttactcggaagtgtactcgaagagttgagaagcaaagtctttgcttcctttggttggccaaaatttacataactttccagtttccacaaccaaagtggatatgtaatattttatgaacccacttgtagctgcatatccatcattgcgtctcatttattataaactagctagctagagtcacacccctgtttaaatttgtagtttagtaataagcttgtactatagtatcgtcgttgagttataacttaggtcaaagttagaaataattaattacaattagataacagtattgcggtagaaagtagcaaaacattttgtcgtttcaaaatttatatctataacaaaagtactgaaatttctataaatttttgtgaaccattactatgaatttgtagcaaacgatatacatgtgcagttgtttaaaaaaactgatgatacgaattgagacaagtctttttaattatgtggcaaaatattggtaaaattatcggaaaatgtcatgaagtttgtaaaaaaatcagatattttactgtccaagtccaaggtatctattttgtgtagtttcaaactaaaaactcattattaatctgttttccagttccaagattattcatttaagttgttttttaattttatatatattcacgatagtctcaaacctttcaaattcatttcaaaaataaaattgaaaatcatttgctttttttttttttttgtgcaaatgaaaatcatttgctatgcagggtttttcttgctcatatgtatcattgggctgaaaacatgaggtgggccggctgggtagcatgaggcatatatatatatatatacccaaaatgcccaaacttttctgcttgttgattttttttgttattataaattcacccaaaaaaaacataatttaaaataataccatatgtaatacgcatctgtcggtcaaagctaaagaccttttagtcaattgaacgaacgaccgaatgattaggtgagcgttgaagaacattatttcaaagcttatgaacaaaaaattcaaagcatctctactatgaatctgaataaatgaccaaacacatgcttatgtccctcctattattatgctctttttgtaaactaaacacacaaaattatgaaacaaaaacatcaaaattattacttgaatattggataatgcctcaagaaaaataaaaacccaaccaaaaaaagccgtttacaaaaacaaggctaagtataatctctgcaaataatttgaaccatcctcactctctctttttctctatatatatatctataaacctttctataattattgttctcattcactactaatagatatagtaatgaatccaaaataacaaaaccgtgatcaagagtttggtttcttgagatttatggtgatctcaatctctccagttgaaagctctcagacttagcatcttcaacatcttccatgctactatctccaccagttgttgttgttgtagacggtaactgcaaaggaccttgaggagaatctgattgcgcattgcttctcttcaatgattctcctccttcacatgtctcttcttcatcttgtgctgaagaattccacaagttaaaccctaaaacaactgctgattgtttctccgcattcgaatttggcttcctgatgtgtaacctgtatttctacatataacagagaaaatgagttcttagtaacattcactgtaagactcaaagatctcaactttttgtttctttttagttacctgtaaatgactcttgacttcatcattggttaagccttcttcttgcatatgttctctaatttgtttaggagttgccactgttattaacacaacaaaacatacaaagatattacaacacattctgtatcaggtaaccaaactcaagaacacaagaagaagatcttttatacctcccggtccacctagctgttgcaatgcatcgacaaatcggcgatgcaactctggattccaacaccttctttgcttccgtaaagcttgctgcttaagaaatgctggttgttgtggtactgctggtgttggtggttgtggcatagagttagaagtaaagccacatgaggcaacaatcccttttcttcttatcgaactcgaacttaaaccgaggcctaaaccagtttccacctttggaatcaacaacataggagatttctcctcatttctctgcaacatttagatcaagcaaagtagcaaactcagtcctttgttcttaattaatcacaaaacatatcatccaatctttccaaatgctgtctcaattccagagttttaattaccttaatctcaagcttgctcttgatcttactagtgtgatcatcattagctttccattgctgaaacttcttctccctcattagctcctctcttttcagcaattctattcctctttctccttgaataggtttattaacagaaatgaaatctttcaacaatggttgagtctccatctctgaacatctcttatccttcagatacaaaatcgctgcaaacaaaaaaaacaaaactttcagcaacccaaatgattaaaaacagaggaaacagaggagagatcaatcaaaaacaacgaaccatcgtttaaaatctgcaaagacagaggaagctcaagttgacaactttcgagctttctcttctcttcttcaagcttcttaacatgttcatcaactttctcaaccgccacaacattcatcgaaactcctctcccaaagatcgatcccaaactaagctcatcacctaaagaacccatttttattttttctcgattcgaattaaaaactcaaactttttccagaatttggcatgatctcaaacccactctcttgatatcacaacaataacaacaacaacagagtcaaatagtaagagaatcagagtgtgaagaagaaacaacttgagatgagatctgtgtgaagcgattttatattagagggagagagaacaatgtttgtggaatcttttggaagagagaaagagagaagattgattgaaggaagaggaaagctagaagattctgtcttgtggggttttaatcttttttagatatcacaaaactcttcgtttcgtcgcgtatctctcaaattccatttttacccatttgctctgtttttgaattttacagttttactcgcgagttgactcattctctaactcataccaaactcgtgatttttctcaatgttttcagctccgattttttttttccttagattggttggtaaacataaaagcgtacaatatttttcttaggagatagaaaaaacgatatgcgcggtttgaagattaaaccgataacagtacaaaaagctgagaataacacttttagtaacgcttttgacgtcgtttttatgatttgtaactgttgaaatggtatcatttgtactgttacggtttaaaattacaaatcaaagatatggatactttaaatttttacactctaatttttttaatagtagattaaagaaagctaattttacgtgaaattttaattactaataaaaaacaagaaaaatagatattgttttttatatagttaaattcgtttaaatcattttgttatttgaaacatcactttctactttctattgcatttaatgttggaccatttaaatatctaattttatgtgcaaatagatcctcaacaatttaaattctgttgatgaaaaatatcttagttgttaaaataaatgatgtaacgtaatttgtacggttgttaaaagataacataacttagaaaattgcccttttgattgagatatgtgcgatcgcaccatcgataggataccaaaactcattttagattacaaatgcagttagatttgaatacatatgtgacttgtttttctcatcataacattggatttgaagctttgctagttattacactcacctctcttctgtttcctaataaatggttggtccaataaaattaacaacgacgttgttagagttattaaatatctttattatgttgggttttgatttgtgactctagctagtttttttttttttaacgataacaagatagtggttcttgtcggttaaaagcttaattttaaagatgtgtggtgcgtcaaagtcaaagataccaaaaccatgggattagcggcacaaagaaatgtgattgttcctccttttttctactttccgatttcgagcttttgtgaagttgaagattttgtccaaagaataacttttgcaaatgctctctagctcaagcaccaacagatttccgacacgtgtcaattagagaatgacttaggattccaaagtcatcattcttctataccaagttatttcttggtaactaaaaaacatatgaattgaaaacattttagaatgtcaatttttttgtcttccctcgttgttttttctagtaacatctctacgcattatatatcaaacgttgaaaataatttatcttcttttgaatattaaaagttagaattccagttgaatactcatcaaatatttcgacaaaacacattaatttgcttgatttgattagtttaactttgaacttttctacgaaagtgatgcttttttcgtcaatagaataatgcatataattaagcatatcatgtgcagagaatagtttcctctgacaaaccaacatgaaatatattttgttgaaaaaagtgtcccaatatattcttcgaattaacgaatgcgagacaaatattttggaaaggccaatcgaatctctatatatttatatatttgatgctggttagattctcgcctctctcatagatataataagaattttgccaaccagtcgtcgaattataaactacatttttgagtatattatacacaaactttttgatgtcattatatatataaaccagtctcaaatactgctgaagtaaggaccttacgttagatcacatcgatttctctcatctccattcgttttgtcgggtagtcccagttaaaaattttactttgtatatttttggggattacttcaacatcaataacttagtacttatgccacttatattatgaaactaggggttcaactaaattagtgtaaatcgtaactatccagagatttgaatttaaatctagatagatgaccaaaaatattattcttaacgagttagttactgcatattttcttattttatagaataagttgaattcgatcgtacttattatctgtacgaactactggttttcgatgtaatgcagttgacaacaccataagagtataaaacctaaagctgtcaattgggcttgaccatgaccaaatggtcttgtccagttggacattttttttctcttcacaaaaatgaccaagcccaaagtgaccaagcccaaaagtgaccaagtccaagagtgaccaaaaccaattatatatgtccatggacataaaaaaaatgtttaacatcacaataataatctaaaatgaccatgacaaacattgtaattagacatcataaaaacattttaagacaacattcttaagactatccataaagttcaacatgaccatcattcttcaatcttctcttctttctccttctcgttctcctctttgttctcttctaaatctgcagttacaaccattaaacaagagagtaaacaaatctctaaagcttaaaacaactatacaaacaagaacttgtttcatttaccttaagcttcttctttctcttcttctttctcttcttctttctcttcttctacttcctcttcttctccctcttttggaaagcctcgcagccaattccttgtgcagattaatgcttggatattttcaggaagaagactactcctatatttactaaggactccgctgcctatgctaaatgacgactcagaagcaaccgttgttatcggaatggagagaacatcacaagccatgcttgataactccttaaagcgacaagagttatctttccaatatgctaggacattaaaatgtctaaaagcagccatatctaatgttggttcacctaaatatatgtccaattctgattttccactactaccaactttttgagagacaaatgcataaaatccctgagaaaaaattcacacaaatggagcatatgagatacaaagctgccagatagaagtctaaaaccaagcaatatataacacttcaagtctatcaagcttaaagcaaatcaagtgcaaaaacagattaaaactacaaaaacagtggctaagtaagaatttacttacactgtaacctgccggaatgtcttcttccaaagtttctacttgtgaagaggaggtgatgctacttggacgtttcttgtaagctttaaaaagcttatagatcttcgaacgcacatgagccaatctggacttactagttaatcgatctagagtactgaaacaatattccaaacatttcaacttaagtcttggatcgaatacagctgcaattgcgagaatgtcactatactcttcccagtatttttcaaacttaagagtcataatttccaccatttgacaaatagtctcatcaactgaaaactcatgagctctcaaccaacactctatcttccaaacttgcataaaatataagttggctgtaggataagaagaacccgaaatcagatttgtcatttcagaaaatggctttaagaattcacatatcaactctcctctactccaatgaccaactagtcaaacccgtttctgaccgtggatctatttaggcgtagtccattaaaaccatggtttagttgggctagaatttaattgtccacaacaatattggttgggctaagcccatggtccttttgaccaattgacagctctaataaaacctgtagataacaaaacaacacaagttttatatactataattaattgtcttctcaaagaacttaataggaagcaaaaaccatgtttgtttcatcccatttaaccaccttaaaatcgagatcaaacaattttacatatgcaagttcaacatacctccaaacatttagactcaagacgtctatccctacatacaaaatctccttgccctctttttttttgggtatgccaaaattttgaatatacgccaaactactttccaaatcgtttgcataacaaagatgaccataatctttttccttacgacgtttgtgaggtccactgtaatcatctggatcaagactctgatatagatatcttaaaccatatactatcgctaaaccatttagagtatcagtagtccatttattatttttaatggaccaaacacataaaattgagctgaaccgtatcaatccattaaaacttctgatatccaatattattataaataatactaaaaaactccttatgatactatatgaatatcacttatatacatgctcttatatggtgtgtagttttcatcccatccatgtagtcttctaaaggcgctgaccatgtcagtgatgacataagtccaacaaaggacatggttacgttggtctcgaatatactccgagacatctttgagcctttctctgatttcctcgtctagtagtagaaaattttctagtactcctgtctcctgatatcgtctaatatataataatatagttaaccttaaggcagtcaatcatcaatacgccatttatcctactaatttaactcatccaattggtgctacactattgacgtttgaaggttgggatgggtgtaacatatatcgcggacatgccttatccataaatacacttaaaattagtataaattttctgacttgccttacctgagtttgattattttcttagtaaagtattttgatattataatttggtagtaatataatcactataacatgcaagaactacaaaaccagaggtctctcaaatggacactcatttaattgttacgatagtaaatgtcacccatcaatgaaacctaagtcaattggatgatttgggcccaattggacctaattcggcccatttaatattccctcttttctaacctttgtttctcctcttgcttgctcacccttttccctgaatcttaagaattactaattcccggcgagttttcccggcggcggctagataatactggtttctgccagcaagatcgaaggagataaacttcgtaatcaaaaagtctccttctgataaaaagatgtcagaaaacacaaaagtcgaagcgaagagagtgttcataggagcaggatgcaacagagtcgtcaataacgtctcttggggagcttctggtcttgtctctttcggtgcccaaaacgccgttgctgttttctgccctaaggtctgtttgttccactcttgtctctctctttcaaaatcattccaaaagcaaagatgtgattttttttgggtgtgttttgtgtctttgtttaatgtttttttcagactgcccagattcttacaacgctcccaggtcataaagcttctgtgaattgcactcattggttacccacttccaagtttgccttcaaaggtaggacttaaagcttacttgctgtaattttgaatcctttggtttataggaacttcttttgctatctatttagagagttttaagtatgttgaatcgcttaggcattgctaaaggatgagacttttgatgttttataagatagagaacataggttgaagaatttgtgagtgatagcaaattgagaagatataggcattcaaattttctatttatagtctctatctacggtttggtgatttagttgctgtgaaaggttttatgtatttgtatctccctgaattttctatgatcgttcgcagccaagaaattggaccggcaatatctgctatcaggtgattcagatggtatcatcatcctctgggaactatctactcttaataacgatgtaaaattcccttactctcggtctgatcttagtttctttgcggtttctctattatctctgatccctagtatgttttctgtttgttttagcaacagtggagacatgtactacaactaccactgtctcacaagaaaggtgtaacttgtatcaccgcttatatggtttctgaaaccgatgcaatgtttgcttcagcttcttctgatggagttgtgaatgtctgggatgtttcttttccgtctcagcctagtggtaagcattaacgttgctgcagtatattaccggttaaacgaagtgaagtatgtcttctaagcagtatctacatctttttcttcctctgtgttatctgttgcagaggaatgtaaagtggtgtgtctggactctatctgtgttgacactaaagcaattgtaacgctttcattagcggaattgcctcaaaatcctggtcgatttgcccttgctttgggcggattggacaacaaaatcaaactttactctggagaaagaacaggaaaggtgcttcccgattcgcttttgtgccaaattattctcaactaaattcaattgtgagagtttttttggtttcatcctttttcagtttacttctgtttgtgagcttaaaggccacacggactggattcggagtttggacttctcattaccgttacacacaacagaagaaatacccaatagtattatgcttgtgagttcttcccaggacaaagttattcggatctggaaactagtgttagtcggtgatgttggctcgtggcgaagagaaatcactctagcttcttacattgaaggcccagttttcgtctcagggacatttacatatcagatttcagttgaatctgttctgattggacatgaagattgggtctattctgtggaatggcaacctccagtcatcgatttcattgatgggcggctagttaaccaccaaccgctgagcattttatcggcttcgatggacaaaacgatgatgatttggcggcctgagaagaaaacgggtgtgtgggtgaacgttgtctgtgttggagagctaagtcactgtgctcttggtttctacggtggtcattggagcccaaatagtctgtctattctggctcatggatatggcggagcttttcatctctggagaaatgttagtagcagcaaagagtctgagaattggcagatgcagaaagttccttcgggtcactttgctgctgtgactgatgtcacatgggctagaaccggcgagtacttgctatccgtgagccaagatcaggtcagggtttatggttgaggtgttaaaacgattcagtatattataatgcaaaaagtttcttttctgatatttcattctccaaatttgcgttttgcagaccactcgtgtgttctcagcatggaagaatgatgaggggaatgaagcagaggatgagcattggcatgaactggctcgtcctcaggttcacgggcatgatattaactgtgtggctatggttcaaggtaaaggcaaccaccgttttgttagtggagcagaggagaaagttgtgagagtgtttgaggctcctctgtcgttcttgaagactctgaaccacacttgtgcgggaggagaaggaagcttccctgaggatttacaagcagacgtgcaggttcttggagcgaatatgtctgctcttggattatcacagaaacctatctacttacactgtaagtgattttgattgatttaacaccattactagctttttaccaaaagcaatcttgagattcttaattttttttcgcagcttctagtgaaccactggagagaaatggcggaggcgaaggtttggatacatttgagacagttccagaggcggctccagcagagttgaaagagcctccaatcgaagatcagcttgcgtttcatactttatggccggaatctcataaactctatggtcatggtaatgaactattttctctctgctctgaccacaagggaaaccttgttgcttcatcgtgtaaggtaagttaatgcagttttcagaatttttttacacttcttcaatctcctagatttagattttagatctaactgagcaggattccattactaaattattatttttatatatgaaccacaaacttcttcaggctcaatctgcatccatggcagagatatggctatgggaggttgggacatggaaagctgttggtcgtttgcaatctcacagcttgacggtgacgcacttggagttctcttatgatgacactctgctcttgtctgtctcaagagatcgtcacttctccgttttctctatccaaaggacaggtaactcaagcggtttcaacttcaccgttctaaatcagattttctcaaaacatcgaaaaatgtctacgtttttagcgtctctaactcgtctgtttttttgcttctgttcagacaatggtgaggttagtcacaaactcatggcaaaggttgaagcacacaagaggatcatatgggcatgttcatggaacccgtttggccaccaatttgcaacttcatcaagggacaagactgtcaagatctggtcagttgagaacgacgctcgcattaaacagattcttgtcttgcctccgtttggaagcagtgtaacggccgtggcttggactggactagaccgcaacgagaagagtgggtgcgtggcagtggggatggaaagcgggctaatagagctgtcgaacgtaaagattatagaaacagaggaaggtacgactgcaacagcagctcttgctcttcggctcgaaccgttcatgtgtcatgtctcggctgtgaacaggttagcttggagaccaaccgagaagtgtgagtctaatcagagcttgcgatggttaacttcttgtggggatgataattgtgtgagagtttttaacttcaagttttgagtttacaacacaaaacatatcgttgtatttttaagattatggaccaaaaggtccaaaactctcttccatacaggaccattgtaatatttatgcaaattttggttagctaaatcgaaacatgtttaacaaaccacttttttcctcgtttaaaaggaaaaacaaacaaataactttctcgctttgcatctttgatgcttttcattgattattaagctatggtgcaacagtcagttttgtctcttgacaatataatcagcgagagacaacaaaggaaccaccttgtcagaatcaaacccctgaagatgttcctgcgcttctctgttcaacctctttgcatattctctcgcattgtccacacccatcaccttcggatacgtcagctttccggtgatcaaatctttaccggcagttttcccaagctcctcggaagacttggtctcatcgagtacatcatccatcacctgaaacatcagtccaacgcacctcgcgtagctcttaagcctctcaatctcttcatcagacccacctcccattatagctcccacaacagccgcagcttcaaccaaaaccgcggttttatgaacatgcatcaactcaagatatctcaattcgtcgtcttcgttcttaaaactcatcctttctccggccaaatccgctgcttggcctgccacaagtccctctgtcccaacagctctcgccatctcctgaacagcccgaagaaccctctctgaagtcacccccaatgaggtcgatgccaatgtctgcttgacggccaaagacctgagcgcattagaggccaagatggatgttttctcgccaaaaactttatggttggtgggttttccacggcggaggctgtcgtcatccatacaaggaaggtcgtctaggatgagcgacgctgcgtgaatcatctcaaccgcacaggctgctggcattgcggttgactcttggccacctacgagctcgcaagcgaccaaacagagcattggccttactcgttttccgcctgggagaagcgtgtacctcatagctttgtgaacctcgagtactggctcccaaagaggaacaaaattgttgcaaagaggaattgaattgtctagtgctttgttgatggacttagccttattcttcatgtatgaaatgaactcagagtcggagcttgcgatcgaacttagacggcggttggacggtcgtattagccgcattgcagacagaatcagactgtaacgcggccgcatgatgattatgttacagcgcaagtaaactttattgagttgtgtttatatctaatagtagcaccaaaataatgtaaagtttcttcattagcctctaatacaaaataaaaaaaggaaatatgcttgttaaaccattttaagttccatacttggtcctcaagacagatttaatgaaatatatgcatgaatctcagaagatttacggaagatacaaattttgttgatgttttgcgtaaacaccaatacattgaggcgttttaagatcatgaccaaactctactgtgtaagattgtaaagacagaggaaggttaacttcttgttgtaaagataactgagtcagagtgtttttgaattc

SEQ ID NO: 1007 - DNA, 91720 bp, Arabidopsis thaliana
caatttaaatcttctgatctagtttagctgtctaaaacacgcattgagagtctacacttgtttatgaacttttatcgtagtctagcaagtcacactggacctaaatatttggaatgagacttcgtattgtaaacctggatattattaccagtagttgggagttggtcactgtccccatttgtatctatgctagagaattcttccagcaatcaaactggaattatgaattcatcctcatcctgtattggcttgtaaatggatcacagggtcgtattggggaagatttccacatctgatggtcaaaagagtgcttttaccgttattcctggcaggtgggttggtaagtcatctagtgtgaaaaatcgataaatgtcttgttgtttttaagtttaatctttcgtcccccaaagttgtttcctttttaaaattgcttcaacttcgaggggttggaaataccattggctgtccattgggtgaactggatgcaggattggccttctttttcctttttgagttcaagacttcaagtctcaaatttcttatatttctgacagctgatcagagatattagtacatatctagttgatattattacagaagtagtctgtcttttaaagtttatcctccttatctcatagtctggctttcctttagaattttttatcttttcgtttgttgatcttgtctgtttctatatgactacgtgctttgttattttaactgtgagtggtgtaagcttgtgaagaagttgacaactggtactagaactatgcactgtgaaaaacgtttgaggactatgaaagatgatcttgtaaatttcaggcgcttaaatatcttctatgatacgttggtctgatattatttgagtcgatggctgcttgttcttcctagtggtgttgatagtaattttctcataattatgatttttccaagtgagttcgatctgcctttccaaatcattggggattaggatttgaatagttcagatttagcattggatgtgagggaaatttctgttaaaatcattgccttccgatgtgttcgttggttcctctcagcatcatggtttttttagaaatgattcttccaatcaccgctatcgttttgctaattgatgaatgggattttgtttggttgtgaatatcatcatcacatactctttattcatgatattggtatttctaatgacagtatgccatctgtggtttttgtaattcgacttgcctgaaaatggggaataccattctctgtgcaccttttgcaacatatatcgaactcgaagagttcggagattttaaccggagtgtatacatactttcaggccattgtctagtggacaacgtggagaggtatatgaggtgattgggaaccgtgttgctgtcatattcgaatacggtgatgataaaacatcagagggaagtgagaaaaagccagcagagcagccccagatgttacccatccactggttagatggtataattgcttcataatattccgatcgttaatgtgtgatacttatgaatctagagaattacttgctatgtatgaagacgcttgacatcatatttaaatgtagctaagtaatatctattttattacgcagtgaaagacctgaagtacgatttggatatgcaggcagttgatggctacattgctatggaagctttaaatgaggtatatttggaagttacactgacttttcttgttggctttactcatttgtttgtttcagctatagatgtacatgtatatttaaatttccatgtttgagaagatgatgctccagcaatagcaaatgctcataactttttattttagtttgaatttattagttaatttaactgttaatatatctatatacaacaagacgttgtgctctgtttagccagtagccttatttaacattttcctatctatgggtccttttcattgggttttacttggtatgctgaaatgtgtgaccaagttctagcaccataacattgaaatttttaccaaatttttttaaagatcttgaatgttcttttattcctatactgtggatgcctgcaattctgcctctatttttatttctgaaacgtatgtctggattgttatctacacttagtcctttattttttctgtctttgtaggttttgcaatccattcaaccacttatagtctattttccagactcgacgcagtggttgtctagagctgtgcctaagacaagacgaaaggaatttgtagacaaagttaaggaaatgtttgataaactatcaggtccgattgttatgatctgtgggcagaacaagatagaaacaggctcaaaagaaagagagaaattcgtaagcctgtcattatgtctaactcacttgtcattggttattgttccgcctttgttcctgattagtgtgttaaaaaagttattttttcctgaaaacagacgatggtactcccaaaccttagccgagttgtgaagctggtaagataaacattaaagatgcattttactgatatatgtgacttttttttaaaaatcgtaaagcacttgtctttgcctgaggtgcggacattttcttcttatcccttggtcgtcccttgatgaaaaccgtcaaatgaggacttgcaagttattccacatcttgaacacccgtttttgcaacaagttaattgcgcagtaaattagtcacgtttttacatactttttgcaacatgtgcaggattgtaaatatggatttgaactttccattctccttgatatgactcttgcttggtttctcgatctgtgttttaaaatggcattccttgcgatgtcatgctcttcttgatactattaacttaataaaaaagtttcttgttgcctttgtatatttcagcctcttcccttgaagggcctaactgagggattcacgggaaggggaaaatcagaggagaatgagatatacaagcttttcactaatgttatgcgcctacatcctccgaaggtatgcctaatatctttgagaagttttcatcaaattaacaatgaacttattcctgtatgactttaaacaatgtctgaggagccgtagatgtattgttatacctaagtgagatacatagactagtctgattatgtatgtcgcttggacaatatctcttctcaaattctctttaagaggtacacatccatctgtggtccatgtatgcttttgcaaagcttctatgtcacgtgctatcctacttagcagaggagaagctacttatattagttgtttcttcgagtatacatgctaaaggtaggaggcatatacccatattgccaaaacagtactgattccttcctgtaaaatattgatgtaggaggaggataccctcagattattcaagaaacaactaggagaagataggagaattgtgatatcgcggagcaatataaatgagttgctaaaggtatgtagatctaaattatatgtcgaagagaaaaatttagttgaacgtgtaatgttttcactaatcgttgcatccttaatgtactctttcccaggcacttgaagaacatgagttattgtgcacagatttatatcaagtgaacaccgatggggttatattgacaaagcaaagtgcgtaactcaggatgaaaacacttgtttttttttgtatttatagttgctgattgagaatgcaagcacttctttgctctgtactggcaattcctctctatcatgtacaatggcagtcgttccaatgcctagctagaatcggggtgttaggatactaatgtgaaacatgtgagaataggggctacctataagtacacttagatccaaattctcaaacatttgattgttcactttttcttaaagaagtttggtaaatctcttgattatatttagttgagaatggatacagttccttgtggttgatgattttttccgctggtgcaaacatttgactttttcccttgctttttgagatgaaaatatatatgtgatgaagaagagacctcagaaacttgtggcttttgtttttgcagaagcagagaaagctattggctgggccaaaaatcactatttagcttcttgtccagtcccattggttaaaggaggtcgcttgtctctgcctcgtgaaaggtacatgtgattgtggcttgtggatctgtaatttttattttattttttaatcttactgcgtttttttttccccttttttcaagccttgagatatcaattgcgaggttaagaaaattagaagataactccctaaagccttcgcaaaacttgaaggttaatttcctgcccttggattctggtaaatggatcttgaatacttttgagtaactatgatgttaatagacaatgtattgcagaatattgcaaaggatgagtacgaaagaaattttgtctcggctgtggttgctcctggagaaattggcgtcaaatttgaagatattggggctctcgaagacgtgaaaaaagcattaaatgagctggttattcttcccatgagaaggccagagctttttgcccgtggaaatctcttgcgggtattgctttctgtttgggacatatcgttgttttcttggtcaggtatttccgttcaacttggctgatattcctgatgacatgacctttttcagccctgtaaaggaatattgctttttggtcctcctggaacgggtaagacgctcctagctaaggcgcttgcaacagaagctggggcaaacttcattagcataactggctcaacacttacatcaaaggtaactggattatgttgtatgacagtgttttgtgtctccttgttgtatgtgtctatttgtatgcatgttttaatcaatcaagaagaatagttaaccttaataaatatgcttcagtcttcactggcctgtattgatacacttgtcttagcgaatatgtaatttcttagcttacacttctataaatgatttatgatactccccattattattctgatctgactctgtcttgtctttattccttgtttggcatagtggttcggagatgcagagaagctcactaaggctctcttttcctttgccaccaagctagcacctgtaattatttttgttgatgaggtgagaattttgtacctaaaactaaaattcatttctttattatgtccatagttctatcttagttattgatgctcttagtaaatatttgatgatgggtaaatgtgactgaacgggatttttgtttgtttggtagatcgacagtctgctaggtgctcgtggtggctcttccgagcacgaagctaccagaagaatgagaaatgagttcatggcagcttgggacgggctcaggtcaaaagacagccaaaggatcctcattcttggtgccaccaaccgtccctttgatcttgatgatgctgtcattcgtcgtctaccaaggcggtaacacctgatttgacttttatttacctttttgaaaattgctagtttgtatttctagtattggtaaactgtgtacctttgaattctaggatatatgtcgacttaccagatgccgaaaaccggttaaagatactgaaaatatttctaactcctgaaaatctggaatctgatttccagttcgagaaacttgcaaaggaaactgaaggttattccggtagcgatctgaaggttggtatttgttttctcatccctagctcatgacggcacttgtaagttctttatttaatcttttttgtttcttttgtgggcttacatttgcagaatctatgcattgctgctgcgtacaggcctgttcaagaactgttacaagaagaacaaaaggtacagaatccagattttgcagtgaaacatagactgctcacttacatagctttttttgcttgatgattttgcgttgtttgaatctttagggtgcaagagcagaagcatctcctggtctacggtcgctaagtttggatgacttcattcagtctaaagctaaggtaatttagttgcatcaatgccaggaaacaagatgtatcttgattttgttgcgttttgcattgtcgatgattgatataaaccacaaagatgtgattattgttatcatatgtatgggtgatgtgattctgcaggtgagcccatctgtggcgtacgatgcgactacgatgaatgagctgagaaaatggaacgagcaatatggtgaaggaggcagcaggacaaagtctccttttggcttctgatgaatttttttttgttttggtagatcaaagtgttttcatctgtcttttactttgtgatcatagtgtaactctcagtgctatagcctttttagtatcattttatttgatgtaaactatatataatggaacacgaaacactgtacgaccacatacaaaattcttcactataacataatgatttcttgtattcatataaattctcagagagtgagtgttgaatttgtctctatgtggcacaaaattgcaacattagtcacgtgaaaacaaaaacaagcatctgtttaaaagatttcaaacgtacaatgtcaacactctttaagcaagtgtttcgccattatcatatataactttcatgaagatatgcagagagatgattcggtgtgggcacagaactattagatcggagggggcacacttgtgctggagcagtagagagttcaaattagttgacaataaacaaaaaaaagtatccatgctgcttctattaggaagcaattgtaatgaaataactagcttttacctggtcacaaagatggcggttggattgcccggagatggaggattcttcttcagcagtgaagcatgtggaccagcttttgaaacatcatcagggtcacttgcagaatatacttcaactcttcaagaccaagttgccgcttgatcaagtccatgttactcttaaggacttcaatctctccaaaaggcagcctcaaatttagagcctgaatgccaatagatattgcctccttcttcttgaatttaacgaaaggcatgtaaatgttttctgcttgtccatccttctgtaatatctcctttagttctgcaattatctctgcatcaggggcaaaacgataggtttgctggtcaaatttgctttgcaggaacttgaggcagtgagctctccatcaatcaaattgctcattcacatatactaggcctattaactttcccgctggcgctgctgttacttgagcacctttcttagcagccttcttggaacctaagagctttctcattaagacaatagaatcttgcaaatatttgttagcactcttgagaaccaaatctggctcatttgatgtaggccagcctgctgttaccacagaaccttccttcttcaaaagtttcctccatacatattctgcaaactggggacagattggttcaatgaggcgtgtttgcacatccatgaagttcagtatcaagtcatggttcatattttcgtcactgccacaagagtttctatactcatctcgagcagcttgtaagtcgtaaaccccattcttaagtgcctccctaaacaaacattctttgtacgctttttcagtcaatctgatagcaatgttaatgtcattctcaaacactttatcagcatatgtagatggaggccccgttctcaaagaggattcagcagccagtttttcttccatccattcgagctgtttcaccagccgcaaaattgcagcatttgcagtttcaaatacaaaatttgcatcgtcaacgccatcaccagcatcagccaaagaaaaccttgtagcagtggcagagaattcttcgatagcctggcgcagggttctgaaatttccagttgactttgacattttctcagaattgagcataatgtgccattacatctgataccccgtggccagttacgcttctccattagtgcagtgtggttatagatgaaaaatgtcaaatgattctgaataagatcctttccggaaactcgaagatctagcgggtaccagtagtcaaattcctgcttcatcttacttaaaacagctgatggaatatcagttgattttggatacggaccatcacagaagagatactcccaaacttcatcattcatctgctgaggacggatcaaagacttgcttcctttatacatgtctccgtcgtgaaagatatgggcaactgtataataggccatataaagagatgaatcagataaggattccacaaggaaccgttcattatcccaaggaatacgagttcctagaccaaaagaccgtgagcaagcccactgaatgagccagctcaaagtgtgctcaaagccatgccttgtttcctcagagtagagattcatttttgataagcattcttcagccattttccgccattctgattcgccgtacgttggtgacgataccagtacctttgttggttagaatcgttgacatgggcagagcatagatgatctcgttcactgacagaggagacttcagagggagtccaatcagatcataaccggtcaactcgaccaagcaagatggtttcttagggttctttgagaagttctggtaggcacggttgagtgcagatctctcagtaaggatgaagacatcagtttcactgatttcataagctccatatttcccatcaggtagtacccaagcgtttgtttgtccatacatggtctcaggcctcaaagtagctgcagccaaaaacactctttttccttccaaaggactcagtttcagaggaaatggcttcactacttccatctttatgagagtatactcctgaggctgaacaccttcaccagtagcacggtcgtgatcagcacaaggctggcgatctagaggtgagaatattgtgtacctacagtctttgacaatctttcccagagctttcaacttcctcatctgccacctcacaaaggcatcgaaaaaaggattaacatcagtagtcacaaatgaccgtctccagtcacagcccaatccatatgccttgagatcttcaacagccaaagggggaaagtaatacaaccattcatctggatcccgaaatcttgcaatctcactgtcagtaagaccaaaactgcgcataatctgccactgataaacctgtccaccagatttcgcagccaccttagacttctttcccttgaactgacccgttaaagccggtgtatcactgccctcctcgtgaacttgaggagctaggttatcttgagcagggaagacaggagggtctccaaactgtaggatctcacgagaaagcttatccgcggaagccttaataggcataccagtacagtggaaaccaaaaggaagaagcacattggcacctcttagtctatggtaagcagaagcaaaatcaaccttggagagtgagaaagcatgcccaatgtgtagataaccattcatatagggaaaagggaaagtggagaagaacttttctcctggctttggaagatgatcacgagattcagccctgaaaacatcctcatcctcccaccactttcgaactgctacctcaatctcgagaagacgatctcttttcgcaaagctattggattcagatgccattaggtgacagtacctgcccagacctaaacaaacaatcaccgtacgcgagagagatagggagagagaagcttagtgcaaggagagaaaaatggagcgcagagacgatagggtttttttctttttcttttccctctcaatgttgtattaatatagaacaagtaaagacatctagggttttttccaattttccaacttttctattaataattttttttttttttttttttggtaggattaagattttgagatttggatttatcatcagtttctcttacccatttttctacaattttgtttatcaaaagttactttatgtgcccaaaactgatgaaactgatttaagtaacgcttatataagaaacagtttgtgattaaagatttaagatcttttatcataggacaccaaaaagaaaaataaatctgctctctatagtctaataaactagtaattaaaaactaaacaaaataggtttgtggtatatatatttcccttgaaaagttatttttaaatgatcaaaagaaaaacaaattattgcatgaggtgagctagacagagaccagaaactgtatctttcaccaaaaacaaatttagctacgaatccaagacggctccaaaccaaaaagcttatctccacggttttgagcacctgatgtccgaggcggcggtgcatgtacagtaatcggaagaacccattcgcttttttccctttccggtactaacaatggatgttcgtacctgtaaattaccacaaaacagaaccagaaactgacttcaacaacttgagcacttcaaaagactcaaccagagaatggatcgtttgagtattgggagtaatacctgcttaagtccacactcttaggagtagttaggaactcaaaccgaagaatccattgcacagaaacacggggcgtagaaaacgacattggaccatccgtcggaattgaaaatagaaagctggtttgaataaggtctgccaccacctcatggtgatcgctttggaccttttgacgaaaaacatatggggtagtaagattacaattgtagagacatagcatccagcggaaaaagcaaagtaacaatatccatagccaaattataatccgctgcatccataccttagtaagtgttggagaatttctccttgatggatgaacaaatctcctgtttattgtctctaaagtttctagagtaaccgagacctggaaacagatatggatcatcagtaccaatggccctcgatatagcaaaatgtacaccagaagttttgtcttgtctggatttacctcgaggcatcttctggttccttcttcatggaagaatgtaagagttccacctatctgcaaaaaaaaattaccattcgtggaaacagttgtcagatgcaggcaatgttttagaagaatgtgagaagagatgaaacagccaattacagtatcgctgaagtaataagtagaatcggcattcttgggggaaaacctaagaaggacttggtcatccattctaatgttgtatgatcttcctcttgtaaatccttctgctgcaagaaatgattgcatctggataagtaggtacttgcagaatctatatacaagcaaagactagaaatgacgagtagtttacatggaactggttctcttgctcctgctccaggcgacatagatgctcctgcaccatttgtttgcttgggctgttggctcgggaccacagaatttgatgatttatgaggggaagatacatctaaaaggaaaaaaaaaaaaagtattcttcagtaatcttttcctcacgaatattatagagctgataaacaaaacagatgatgaggtctttttttatttagcatctttccatcaattatttattggtatttgagaacagtactgtgtttagcattagttcgaaaccagccttcaccaaaaaacagagaggctacatgagctggtgctattctcagtgaccccattaaaatactgttttaggtatgtactcgcacataaatcactaaccagttccggaatcataagacaccacggcagctgataactgagaaagcatcatctttggagatgatcccacacgttcttcaacatatgacgtgtctttcattgacaatcgcggtccagaattcaaggacaatgaactgccaaatgttctgtttaaattgcttttgttgggataggaagaaacagatgagatctcgtcacgtgaactgtcatatccatcctcaccactatcatatgcgtcatttgctctagtctgcattaagcgcatttttgttcagtgttctgagtagtatgcaaatgcaacccatacgtataaaacaactgcaatcaaaagaaaaaggataaacagtagaattccacagttttgagcatgccatacccattctgagtccccatccatctctttccaatatatttctgtctgaatggtactggttggaacaatacctgtaagaaaattggagagccccatcaggttgcaccactaatgtcatccaaaaaaaaggagggaaaacaactttccgacgtcctgtaacttgttgtcttgtaaacaaacagagtttgacttctgacttaaaattcccaatcaaaattttagaaaaaagcttaccatcgatttgatcttcctctaatagcagcccattgttcttctgaattacccatacttgtaatggtattcgagtctcctgttggtaaataacaagattacaggagtcaaatttatgccaacagcaaactataaaatacaagtggaaaagggaaaaatatattatatttcagaaaaattaagaggcttatcacaaaatacatttacttagtattttctatcaagcatcaggccataggaggtatgtaattagaccttcagttatgacatattaccatgattaaatcgtagaccaactccagaatcaaggcatccaatttcaggggaacaagattattttgatgacagaaagtatcaaattatacttgattagaaagatgttataatcaactgactgaactactaaactcactgcagtgacaaattggccaaagaaaactaactacatgtaacactgaaaagttttccaagaagatctagactaagctacgctttaaacctcatgcttcaacttcatagtttgcatataaaccctggtgcatctccattgcatcgccacagagaaacaataagctagatgatctaagaatgttgaatgactcatacaaagttgtgtgattctattatcaattaggcatcaagcagactaaaaaccaaggatacagcctgacttagcactatagtaagaaccatgagacgtgtttcaacacaacagagctacattgtttgtgtttatcccagtttatatattttccacaccggtgaatagaaaacaaattgcgttcaagcaaccaaagtaaccgaaacacaatgttttacacatataacacctacagaaaacacggaaagtcaagtaaactaaccacttcaatgaaatcttgtgttgagtctttgtaaaattgactgttttctaatgccatccatcttccgcataatgtgctcttaatgtagtaaaggtaacgtaaagtagcacctttataagaaggtggtataatctgtgggagtatagctcgaaccattactgtagatgaaaattacaaacaaagaagcctgtcagcttaaaggttgacattgtaaagcctagccgttagtatatgtgccgtcggcatcaagcaagtgtacgttattattgttctttgttcatacagtattagagaaggagttaggcaagattacatgtcatcttagcaccaggggataggatttgatttgaaatcaaagatggtgttgaactgtctaggaagatgtgttcacctgaaaatctccaagagatatatatatggttaacgcacatcaatagaaaattacaagtagatggtaaagtgagcatgacgtgttggaagaaacatgaaaggctgacagaagatatataacagttgcagtaaaaagcttgttaaaatacctcttcgtcctttgcttcctggtgaaggtttttgagtagaaaaccactgaatgtccaatttctctagacctttaacctcaaaactaagcttttcaaccaaaatggagggattagaggcgttgtcatgagaattagcaacctcaatagttacaaaaatggaatctccaggcctatacacatctttatccgtttgaacacttagagatggtttgatcttgcttccagaaacacccacggagtcattgacttcactggaactgccgatccccaaaaaggaaaaccttgatgatagcatcgcttcaatggctgtgtttcttaaccaatacaacaatgccttccatgaatcgcttcaatggtgctaattacaaggacgacgagacttggatggagttgaatcattcaagggttccagagagaggacaaacataaaaaattggcagacagtagctaacgaatggcaatcaattacttcagatccagagagaagacgacgcgaatcgcgcagatcatagaaccaatttgtgagatttcgttccgaacaaaaggcaaatgtttcgttcacagagagtgagcttctaccttggttccttgagaatgacgagcagaaatgtgaagacggtgccgccgggagaagtcttcgtgataagagagccgagatcacaaatgaagagaattgagcaaggattctggaagagagtttagagggagatgaagaaattagggagataagcaattttctgagatccttgtttgatgacttctattctcctctgcaggagaagcttacaattactttagaaagcttagcttaacttaatctctacgtcttatttcagcccaacatgagcccaacatttcttatattctgcaatcatatttttgatccatttgattagttcgtttcgaagttctttaggatcatacaaatcctttctacatgtatctaattcaataaatcattggctcatcatatttttgtacatatgatgattcgttaaaaaacacctaatttacaaagaagtaattatattttcatattcaattttagcatcttttcgacatcttaaaaatgtgtactcggctaattagaaatactatacagtagtagttccttaaacattcaatttagtgtgttttggattatgtatcatggattttaaagtaggctagactttttgtctttctatcttaagtatttacttgcattcactgattgtcttttacatgaacataaaactatctaggtgtcttgattcttagcaaaatgttgttcctattgtcttttgcaaaacattgaaactgtaattgaacaatatagtttgaagttgtctaattttgcgagttagtttatctataatcacacgaaaccaaatcatataaaatccataaaatttggtcatttacatcacggattgctttggtaagagctagttcattatttatggccacctcttctgaatcagtaacaaatgcaaaactaggcaacaatactccttaggattctatcaagattactcaaaacgattttttgctcatgagtagtccatggaagacaaatcatatcagttacgaagcttgtttagaatctaaaacaaacaaaaaaaaaaatgataaagggaaagcaaaacatatttatcgtggtagcaaacatgttgttgacttgagctttgttggcataaatgtgactgtagtaaaaaagcgaatcaactggaactaaatctctgaactttgtcgtcggattaattggtgaaccattgaatttaacaaagtgagtgattgcccaacaattcattgcaacttgaatcttactccattttcacccgataaattttgtaacttcttttttatattttaatttttagtaatagatatattttattattaaaaatgaaataaaaactaaaaatttatcattttggaaaaaaatagtccggttgtaaaggttctgattatcctgattataaagaaaaaaaaaatagtacaatgtatcggtatcaataatatgtaaatgttttcggtactatgaaactgcattgcactatatggtttactctccattcggagtctcggtgcaatgtattggtactaatgaattaaagacaccttttctcaacaaagaacggccactttagcttaataaaaaaagtctttagccatcccatcaaccttcgtataaaaagaaaaatagttgaagattctacaatttattagtatattcccatcaacaaattctttaaaagaaaaaagtggagaaggaatcaaaagggtttgtttgttgtcagtcacactataaaaagacgctcctgaaaccacgtgaccactacacgcctctcttcttctgcttcacttcactactgctttctctatttctccatagatggctccttcttcatcacctcttcgtactacaaggtataaaaaggtctcatctttttatgataaatgagaagaaaaaaaaaaggacagatttatagttattagaatcccctgatctggggttatctcgtgtttgttcatttaaattcattttactcattttctgttttcttttggtgggcatgcattgaaatcaaatcagtgaaacagatgaaaaatatgcgaatgtcaaatgggaagagcttggattcgctctgactccaatagattatatgtatgtagccaaatgcagacaaggagagagctttacacaagggaagattgttccttatggcgacatttcaattagcccttgttctccgattctcaattacggccaggtaggttttgaggaccattatggctcttacttcatcaaattagtgctaatttgctttctctggttgtataagccttaccaaatctcactgattgtaggaacttcggtatttatcagaaacattattaagaaatttgaagcctttaatcaatgattgtttgaattgactgtaaaagtcagcaactttagcgtctataccttttgatattggtttggctttgtagggactatttgaaggtctcaaagcttacagaacagaagacgaccggattaggattttccggcctgaccaaaacgctcttcgcatgcaaactggtgcggagaggctttgtatgacacctcctactctagaacaatttgtcgaggcagttaagcaaactgtgcttgccaacaagaaatgggtatggactattggaccattgtacctctagttccttctgatgtggttctctatcgtaggttactctcatctttagtagttgctgctaaagagtagtgtaatggtttttcggttttaggttcctcctccgggtaaaggaactctgtatataaggcctctgctactagggagtggtgctacccttggagtagctccagcacctgaatacacttttctcatatatgcatctcccgtaggagattaccataaggtgattttgtatgtttttgtttcatatactctgccttaagactctttaaagttgagacagctaattggtttgtctgtcttgtaggtaagctcaggcttgaacctcaaagttgatcataagtatcaccgagcccattcaggtggaacggggggtgtcaagagctgcacaaactattctccagtaagtaaagagatactaggaaatataattttatcttccatggaaacaggttaatgaaatatcttgttctctgatttcctcttttataatttttgaaaggttgtgaaatcgttactcgaagcaaagtcagcgggtttctctgatgtcctgttcctggatgcagcaactggtagaaacatcgaagagcttactgcttgtaacatcttcattgtcaaggtaaagagtttcaacattatatagaaagttccaaccttttaaattcctatgcgtaaactcattagaaatcattcattttttagggaaacattgtatccaccccaccaacttcaggaaccattttacctggagtcacgaggaaaagcataagtgagctggctcatgatattggctaccaggttccacctcctctttcatatatagacattctcatgaaatcaagattagcagattgtgagtgacaattaatgttatcacaggtcgaagaacgcgatgtatctgtggatgagctactagaggcagaagaagttttctgcacagggactgcagtggtcgttaaagctgttgaaactgtgaccttccatgacaaaaagtgattaacttttataaaaccataataaatcaaagaccctttcatctgattctcgaatgttgattttgggtcatatctatcttttgactacagggtaaaatacaggacaggagaagcagcattgtctacgaagcttcactcgatgttgaccaatattcagatgggagttgttgaagataagaaaggttggatggtggacattgatccttgtcaaggttgaaagaagaagtttagaaagctgatgattctatgtactcaaacgtgtatcttttcttctcatgtgttggtttttattaggattcttctttttttatcatgggacttgtaataaataatgggtaactcttaagatacaagaggcggcagtatgttcaaaggtttaaggtccaatacgacatcgttcattaagggagacaaaatgaaaataaattaaaaacattagatgacagctgtgggatttgaacccacgccctttcggaccagagcctaaatctggcgccttagaccactcggccaaactatcatttgttgaacatacacgtacattgttatctaataatgcttacagttatctttttccacatcgcttccgtgtgacgcaagtcctcgtgtacgttgataaaaatacgagcttccacgtttgcttttaaaatagttggtttacacagatggaaccatattattttcatattcctttcggtaaattgcatatggaaaataattcatatctgtagtttaaagcaaaattttgtagttctttagcatcctaatcttgatttagattcggtataatattctttatatctccatatgaatcaataatacaatttcctaaactctttaacgtgtacataaacacctaacaccttgtaactgaagcttgtagacttgtcacatatatattaagagacttggctgcaactttaatcatttggtcttaaattagtactagaatttatttaatatcccatttgcattactcaattattttgtatcccatttgccgtatatttagttttaagaatagctgactttggtagataaacttaaatcgataaaagctgcatgtgatgggcagatcgatactatataactagctatgcatgtatatataaactttttttctttctttcgtccaacattattttaattaaataaccggaaaaaaactatcttttagatagagttattcaggaccaacgtgcttacataaaaatagactacagtaaacacatgttttacacataaactaattaaagatcggctttttggttaaaagtaaatataaaacacacaaacttaccttaaagtaaaatcacaaacgtgtgtttttgcaaattccacataacgcacccgcatctaattcattgcatcttaatggtaagccttttaatttgggtctttaatatgtttgtcaagtatggcttttagtctttgaaaatattatactagtttaaagattctaaattaataaaaaaaagacccatggattgtgccgaaacaaaaggaaatgaccactggaattcgaagggtttgtttgttgttgtctctataaaagcaagtgtttagtcgtgttcttaagccttaaattaactactttcttgctctctgtcttatttctctatccaatggctccttctgtgcacccttcttcatcacctctttttacaaggtgcaaaaatatcatcttttcataaacatgactttttttaaacgttcctttctctgtttattcaaaacggccaaactcttttactaactaattatgtatgtgtgtgtttttttgttttcttttgtgacatgcaataaaacagtaaagccgatgaaaagtatgcgaatgtaaaatgggatgagctcggattcgcactggttccaacagattatatgtatgtggcgaaatgcaaacaaggagagagcttttcaacaggagagattgttccttatggggatatttctataagcccttgtgctgggattctcaattatggccaggttttgttctctcttcattttttccccactcacttataaatttttgttcaatactggtgtttggtttttgaacgttttgtcatattggatttggatcggtttataatctagatcgtatactcttaagcaaaagcttgtaagagagtttgagagaaaatcatttgatattggcttgggggtttgtagggactatttgaaggtctcaaggcttacaggacagaagacggtcggatcacactcttccgacctgaccaaaacgctattcgtatgcaaacaggtgcagataggctttgtatgacacctccttccccggagcaattcgttgaagcagttaagcaaactgtgcttgccaacaacaaatgggtactatatggtgtctctaataacatgtgatcagtactttttaatctttattataagtagctaaagatttttctcttctttttttttaggtacctcctccggggaaaggagctttgtatattaggcctctactcataggtactggtgctgtccttggagtagcttcagctcctgaatatacgttcctcatttacacatctcccgtgggaaattatcacaaggtgagcttgtttgttattcaaatacttggtgatcaagtaaactcggtctaatattttaaatagtgatcaaatctctatgtgaaaggaaaaaaaatatgggctctaaaactttttaaataatgcatggtatcctttttgtagaccatgttcactagcacttctgacacttgctaaaatatggccatatgctgcctaaagattccttaaaatttaagactctttactggtttgtcttaatttcttgtaggcaagctcaggcttgaacctcaaagttgatcataaccatcgccgagcccacttcggtggaacagggggtgtgaagagctgcacaaattattctccagtaagtaattaataaagagacaccagagatatatagatggccaggttaatgatcatatctaaatcatggttttttattgtataaaatttggaaggttgtaaaatcgttgatcgaagcaaagtcttcgggtttctctgatgtcttgttcctggatgcggcaactggtaaaaacatcgaagaggtttctacttgtaacatcttcattctaaaggtaaagaacatagaaaaaattataatataaagtttcatccttaagattgcatttgcaagaactcattagtatatatatccttcattttctagggaaacattgtatccactcccccaacttcaggaaccattttaccaggaatcacaaggaagagcatatgtgagctagcccgtgacattggctatgaggttccaactttatctaatgatacccttttgtatatagacatttcatgaatgttttcaagattctatgtgtttcacaatgtatcacaggttcaagaacgtgatctttctgtggatgagctattagaggcagaggaagttttttgcacggggacggcagtggtcattaaagctgttgaaaccgtgacattccatgacaaaaggtgatgaatttaacataaataaaaacttaaaagaccatttcttaaaatctttagtctttcctcgggttacctaacgttgattttgggtcatatctatctttctttgaccacagggtaaaatatagaacaggagaagaagcattctctacgaagcttcacttgatattaactaatattcaaatgggagttgtcgaagataagaagggttggatgatggagatcgatcatttggttggaacagattcgtttcctgatgaaacataagaagaaataaatttctaagcaaaaactaagaacaatgaaaagcgagaaaaaagaggaataaaaattgttatccttttaaacaaaaaaaaaaaaaattgttatcttttgtttaaagaactattactccatacatatagttcttgttattcaactttaaagcaccaataagatctaccaacaaataaaatagtggtttaagagcgactcctgtaattgaaagctaacatgttgtcatggttgaaacttctatttttctatttatatttcatggttaaaacttgaaatgatttttttttttttttttggaaagctgattcaaattttattaattactcaatgagacatataatggagaaatctgaagatgcaaaagacagagagagtgattgcaatttcacagacagaagagagtgatttcaattgtgttttgctgtgtatgtttgctagcttcatcaggaagttagctgcccagtccacgatttacaatctttggaagcaaaggaacaatgtggttcacaaccaagtctcgatcccagctcctacaatcttcaagcttatcgatagagaaatcagaaacattatcaccgcaagacgcaagcgcaaacgttaccgtaacctgatgcaaatctggttaacttgatctcactgtaactttcaaatcttttgtctccttgttttttattcttttttgccaaggattcaaatcagttggctcctattttgtaaagccgaacctttcatttctatgatattaacagtttagcaaaaaaaatgtttgctagcttctgagtttctcttattattatttgttctataccactagtttaatcaaacaacgatttttttttttttctttttgatcaaaatcaaacaacgatttagatgaaaattttgtgaatatgaagttggtcgatttaaatttgtacatgtaatgaagaactattacgacgatacaatatgattaatacggtttcaagttcatatacaacatcctttcggacaagaattagagactcagggggtgttattcgtttatgattttaaaaaagttttagtgatttaaactgtcatgtaaaatctattgttattcaatcaagattttttaaaagtatgttaaatttttgtgttattcatttaagatttgtaaaaagtaatctaaaattttcataaattttggtttattagattcatactcttataaagccattaaaagttttgtgttattcaattaaaacaaaagaatctttgattgttaatgattgttaatgatttaaattattatgttattggttcatgactttctacatttttcttcacaaaataaagtcatggaaagtcatgaaaagtattatcaaaataaagagattgttagagaaactttacaagattatgaaaaactaatcaacaagattataaaatactctctaacaatcgtttaaaatctttcatttctttactttctaggatttgattgaaatcatcaaaattcgttgtaaatttggaaccaataacaccccctaaaagtttgttgaccaaagaaaaaacaaaacaaaattatttgatgacagctgtgggatttgaacccacgccctttcggaccagagcctaaatctggcgccttagaccactcggccaaactatcatttttaataactgttaacttgtaatatgatttatcacaaaaacaaccattgcataaaggccttaaaagaaagcctttttctaataaatgatttgggtaaaaaatttggaatttctacttgttcggttgaaaaaactcttcctgatttaatgaaacaaaactaaatattataattaccaaaatggtcctctctaagtttaatacagtttggattaaaaacaaatttttggaactaataatttactacactgaagttgaattaaattcggtttccctgcaatttcgatatgattacagtgtaaaaatgtatatgaaatttataaccaagtttatgagtagaacaaactttttcactatataaacaagaataaaaacaacgtttgattaattgtaaaagaaggcaaagcttacaacctctttatgtgaagatcataaattattacatcttgagattaaaacaaaagatttataatttcatatgcagtaattcaaattagttttattcataaatcatatttattgtcttaggtaatacagtattagtgatcaggatcagtaagggtactctccgacccaattaccgggtgagttatagttacaactcacgaaccaccaagtattggtgcattgaaccctagcacaccctatcttcactgaatctctccacaccacttgcgtgtaatgcaagcattgttttccacctgtagttttcaaattcaacaagctttgtcaaatctctattaattacatacactcgatttaatttttcgtgtgcgtttatgttacattaaaattgttgtgttcattttcagataaaaccatagttatatatacgttaatacgtacgtcgtactttagttaacaaaaaaaaatcaagtaaaaggcaaatgatatggattgattgtatatatatacagtaaaacctctataaattaataatgtcgggaccgagaaaatttattaatttagagaggtattaatttatcgataaattaataattattaatttatggagagattttacaaattttgtaattttttacaaaaatgtgatctaaacggtagtttttctatacaatcaataattttcctaaaaatcattacaagtagaaaaccattattaggtttaaaaaccaaaaaaaaaacttttttatatgtagtaaattattagaattgaattttacaaagaattaatataaattaaaaaaaaacaatactaaaatcatattttactaagttttacataaatataaatatatatattcataaatttatacaattattaatttataatattgatgggaccatatatttacataggattttcaaaaaaaatattatcttattaatttatcgatttgtatcaaattttacactagtcccaactcggaaccagaaaaatttattaatttatagaagttattattttatcgattattaatttatagaggttatattgtataagatattagatacctgtgcaattattgtatgcgtagctgtagtaaggtttctcgtcgacccaaagtttgacggccgagatggccgagaacgaggaactacttcccttggctaggttttctccatatggtccgttggagtgaacaaggttgcagtcggcttttctaaaatttgaatagttcaatgcgtaggccgcgagagttgtgtcccacaccacgttcggtactccaacctgcgcacgagcggtgttgtgagagttaaggtagtcttgtggagtgttttgagcattggttgcaacaacaagaaagctaatcgcaacgatgacgagaaaaggggttttgaaagtattcattgtcgtatttatatctttagtgatgattatttttaagaagatggagatatatagttaatgttgtgagtctgaaagaatgctttgccttctttatataggctatgtgtgattttttaggttcagtggttttgggaaactttaacattggggagttgacttatctttttataaatattatatttatttttaaagtgaagtaaaatgatcaaaaagtgttatcatgcctttaattatcattattaccgcattgcgtgatctgaagctagatctaatggtctcctaagagaaaataaaataagctatagtagtatataacaaaaatcgtactgctagagcaaagtggccgcaaatgaataaaaacgacaaactaatctatttgtttttttccgaatagatgaaagtttttttttcacagaacagaacaggtcttgtcttatcatcctcttcactaaaacacacccaaataaaccagacggttcttcgtaatacaaatcatttgcaaaaattgtctgataatcaagttactatgtcttcgtttatcatctgttaatcgtaacaacggaattttacaaagagataaggttattattgttttagaatttgactttattatttccaaatgtttctattgaaattttaatctttgaaattttatgtttgaacagagatcttggacattgattgtcaagaacccaattttatataggtaagtattgttaattttatatctaaattatgataatcaacacttgaaaggatattttgagatcggttagttttaacataaatctcttatattttaaaattggatagtgtatagtttaacagtaaatttattatatgaaaagagttataattaactttgtttccaatatatttcagttttgtctcaacgtgattatgttggcaaaaagaaaattattttcccagttaagtttcaacgtgactataagtaatatattcttttccaataaaaaaaaaacagagttaaacaatttgacaaaatatatccaactttaataagattgccgtatacataccaatttgacccaaaaaggctttgtactctttacataacaaaaaaggtcaaatagggaaaacgatgggactttataaacccaagtcactcattaccgacctcataaatctaaacctaagcggctaagcctgacgtcatttaacaaaaagagtaaacatgagcgccgtcaagctctgcaactacgatctgtaactccatcttaacacaaaagttgagataggttcttagatcaggttccgctgttaaatcgagtcatggtcttgtctcatagaaaggtactttcttttacttctcttgagtagcttctatagctagattgagattgaggttttgagatattaggttcgatgtcccggtctatttgtcaccagccatgtgtcagtttcgaccagtcccgtgctctctgtatttggttttatcggaatacggagatctattttcaggaggagacaactttgttttcttgtgatttttctcaacaagcgaatgagtcattcatcggtatctaaccattcaccatattatcagagtagttatgattgataggatggtagaagaatattctaagtccaacatagcatattctaagtccaacatagcgtaaaaaattgggagatatccggaatgatattatacgtaaaaaaaaatgggagatgtccggaatgatatttgtaatatttttatgttaacgaaacatattttaggatatgcaaaaaaaagtagatgttggtattcttgttttgcaagatttgtaatgggagttgtgtagtctttttatgatgtgtcatgaagtctaccgccaattacatacatcattcactttgtaattaaattgtcttcaagtttgtaattttatttttgttttatgtaccaaaatctaaattcagttgtttacaacttgataacaaaaaaaaagttatacattacttatgttttcacactcaatgattcaagttttttctatatccattcgaaagcttcttattaatcatcatacatggatttttactgctttgtatatttgtagtttacaactgtagtggattaatatcattcatttagcaacaacaacactcgttaagtttgctcacttgtcataattataaaccaacgcatgcatcacatatataagtaaatgcaaaacctatgcagctattatcaaagtcttcacttctcaaacgtgcttcaatcacttcaccctcagctgcactgaccaaccaaccgtaaacgcaactttcactttttcgtcactgagccatctctccttttcaaatcaaagttgaacagagcctaccagtggcaagtgaagggcttttctgaaacttatttctcaactgaccacaagcagcactcgctccaagtcctcttgtttgccttacgcttgctgttatcttacgcgacttcaatgcagctgcaaacgctaggacctgtacaattggttaataaaagcgattatttatttattgagcttttgaatccaaaaccaaaccagaaccgaatgcctggaattaatggttattaacataccgatttcttgcaaggtcgctcccgattaatttcaatgtcttacgtaagagaaaaggatactgtcagtgagtgctctgtcttattgttttaacatgcaattaaaattttgtgcagagaaataactctatacagtatatttatacgccatagtattactataactacaatcatagttggtcatcgaataagctttaagtataaagattatccattccaccataaattttttaagggtgtgtttgcaaaatagtcattttttcaaacttaattaggaaagtagtcactttactattcataatttgcaaaatagtcacttttcactgtttgattcgtacacttggattgtacatcacttttagtgtacaaatgtaaaatgtacgctgtgtatttttatatatatttgtacactaaaagtgatgtacaatccaagtgtacgaatcaaacagtgaaaagtgactattttgcaaattatgaatagtaaagtgactactttccaattaagttttaaaaagtgactaaatagcaacttaagccattttttaactagtttcgattcggatttggaatctcataattaattaaagaagttaacaaaaaagatagtatgtctttacatttttttccaaccaaaatttcacaactgatccacattaccgtgaacacatctgtttagaaaacaaaagaaaaggaggtttcattaatttctagatgattaagatgctaggaaatttaaattcttagatatttttcttttgtctctgtaaatataaaattacagagtgatggaatctcacatagtttataagggttacatttgtttaaaaccgataaacctaaaaggctaaaaaatcgaattaacgttgtttatttttgtgtcttattgaggtgatggtgttgcgaatttcacgatctatagatatgaaaacaatatgtggagagatagacttcgcttgtgaagaacggtgtttctttgtgtccgtctatgatacactaacgcgcctgagctacaaatttccttacgttataaggggcctaaggactaaaaagtcgaatcaaaatcgaaccaccgtaaaacttgttaaattgtttttttttttggtgaacagaaatcttgttaaactatattgggatagtgatttctttagtttttctgttttgttttgtttttgtttcattttgtgtatgttaatgtccagtaatctttttagattgtatatgcgttcgactcaaatatacaaggtttccaaaaaaaaaagcctggactggacattgacataattggatcggtttgggtcaaaaattgggaattcgatatgtttggttcaaaggactgtcaccgaaattggaccaattaatgtaagtttggtacaatttggggtgacatttttcaaactaatactgaaattgaattacaaattcagtttttcttttctgcaaattttaatacaagtgtaaatataattttacgtgtagcagtagaacaaactttctcactatataaaccagaagcaaaagaacaacatttgattaaaagaaggtaaaccttacaactcctctttacttgaaaacgatagaatattacatgttgagatcaaacgagatattttattttcttaatctaattaagatttattgatgattaattaatagtttaggttataatataggtgatgatcatgattagtaagggtactgtccggcctgattaccagatgcatcatagttacaacccacgaaatacccgccattgttgcatagaaccctagcacaccctatcttcaccgagttactccacaccacttgcgtgtaatgtttgcattgttgtgcacctgtagttttcaaattcaacaatcttatttagtaaaatttctattaatccctaacatgtgaaacctgctgttttgtttgtttcaaaatatcctttaaagaattgcaatgaatacgtttcttatacatatgacaaattaatatttcaatgtgtgaagaaatcagaattatttccatcgtaaaaacagtgagctactgagctaaaccacaaatttttaaaagcataaagttaaacataatagttggtaaatacttgtattatatatgaactgtttgtgttagttatacctatgcatgcattggcagtgtagttgtagtaaggtttctcgttaacccaaagattcacggcggctacacctgtgaacaaggcattatttccattggctaggttttctccataagatcctccagttgagggcgtgaggctgcagtcgacttttctagcattcgcatagtttgttgcgtaggccgctacgactgtgtcccacacaacattcgctactccaacctgcgcacgggcggtgttgtgagtgttaaggtagtcttgttgagcgttttgagcgttggttgcaagaaccagaaagctaatcgcaacgatgatgagaaatggggttttgaaagtattcattatcgtatttagtgatgattctaggaagagggtgatatattgtttatgctgtgagtttgagtaatactttggtcttgtttatataggcaagtacatgcttagggtcagtggttttgggagacttttacaatggggaaatggtgacttttctttgtatatagattaattaagtcatgaattcatcattaattaagcaatcttaagctaaatcaaatggtttcaaaacagaaataaaataagcagtgtatatgtatttaaagtatacttctagagagaatagttagcgcaaatgaaacaaaaggataaaatctaataaaatgcattttgtaatttgcgaactattttttattataatttagaattttagattaaactagtgagattaaattataagaatatatatatatacatatatatatatatatatttttaaaactggtttccttcaaaagaggatcctcaatatgattactatttcgaagatgacaacagtaataatactcatgaaattattttaaattaaaatcttaattcctgaatacagatttttaatttcttatagatcaccaaaccgtaattatctacatatttagcattatccattgaagaagaaagttgaatagagatttgcatggtcttgcactcttctatattttgttttctggataggtcatatatatctagatctgtttgtaattttcgaacaatttttcttttaatttagaattgtaaaataaactggtgagtttaaattataatattttaaaacggattttcttcaaaagaggatcctgaatattatcactttatcgaaaatgacaatagtaataatattcatgaaattatgttaaattacaatattaattcctgaaaacaaaacgatatattcatgaatagagattttttatcttctggataggtcatatatacatgtatttaagctttgaagatgtgtacttttaatatcaatgtttatttatttacatatgatggcatgtgaaaggccgtgatcctccgccggttgcaacgttaatgggacagtactcatagtgttaatatagaacttagtttagataacaaactctatctacttgtaccattctccaaccacatcaaacgttaaatatcagtagatagagtgtaaagaagacgacgtaaacatttgacataaaaaaaagagaggaaaacgacgtacataaatagtaaaaaaaataaggaagataccaagtggatcaagatagtagaccataaattaacctatcgtgggttgaacgctaaaggattcattacatatatacatgcgagcaaggtaaagatacattcggattcgaactaaaagataaaagaacgcgtaatagtttaatggatcaaagaggtggtggtctagctagcagctaatataatggtggttttgcgttgtcggttcaatctttttttagtgttaaagttttttaaaaaaaaaaaaaattggaatagttaaaagtcgtattcatatatacgtagagatcatatcatcgacattgcaattacaatttaattaggtacctttcaaaaattaatatttttaatactttcatgataacagatcaacgccaataatttataaaattgtcaaaactcgatcaccacaataattaaaccgatcaacgctatatgaaacactattgagatagtaatattagattattaatatatagatagttttttatgtactctattggttgattcggtaaaaaatatcaaattatattgcatgtaatcttagacaattttattttggttttgtatatttccattgggaatgattcacagttaattccaacctctctttttttgtctctaaatattgagaatcagaactgatatatataactatctctaagaggttccatgatgatcacaaaagagagggccgtttcgctttacacagaggtaaaactacaatccaagtggaacaaaaaaaaatcaaccaaatatacaaaactaaaacttgggacacctgaagccaggtatgattgtcttcgatccaagatagctcccatagtttttcactccttttttcgtgaattacttttcgcaaggaaatatgggccagtaaggataaaattttatgccagtggaattgaactattaatgaacttattatgcttagttgcttcccaaagcccaaagcctgttaattcaaaactcgaaagtccaaactttgacataaaattcaaaaagacttttccactttactcaaatttccccaatttccctcactagaaacaaaaaaaaaactagcgagtggaagacaactgacaattctatctcatgtatcaaaacgacaaagcaataaacgtcaaacgatatcaacacgacttggctgtctcagctcatttcttagcttctgagagaagagcctacaagcatccatgcttagatccaccgccgctgctagtgccacgtgcgccgccgcatcctccgtacaagtcacgtgcttcacacctacctccaccttaggcttgctctgtttctccactccttgcaccctcgtcgacatcacaaaccccaagttttgttgcgcttgagacagtgagaacctgaaatccgaccccgatcctgaatcagttcttgatgatctgatgcttgaccacgaagaaagatcgaaacttccttcagagctactccaagaagcagtcgtagtcgtagaagtggatccatcaatgatgaaactcccgccaagttttgtgctgatcgacgaggaagcagagactgcaacagcgataccgtctttataaagctcgaaacggtaacctagaacatcggagacgcctggttcacgccatgcctgaaggcgaacccatggcttccaggtgtagccatcaggtctgaggattagccaagctccaggactagaccgagagacgcggttggaaccaggagatggtacgaaaggtgtgaccattgaagccatagctactggtgaaccagagagatcatggatcgttatcgaccaaccttttctctcttttgaaaactgttcctttccacttgtcaccgatgataagctgcagaatttaaacaccaaaccatttttagatatcatcattaggaatacctaaatcgtgcatagatccaaattccaagaaaactaaacataaatagcaatgctgcaaggttaaaaatctataattggtactaatcagaaccctaaagtaaaaaaaaagcaaaagctctgtttctaataagcaacttatctgataatttactgacctgagactaagattccgatcaccggagtttctgaacccgaacttgcaagtgaaaacagcttgttttgcgtttccttggacttgaaaaacctgaggactacactcgggctcgccgtcgaattgaaacacaaacctcgtgtcgggttcaacccgtacgctaacgtggagctcaggatccgacccggacttcttattattcttcgatttagtgcccaaatcaacccagccgttgtgtgccaaacacgtctttgactccgccgccttcaaatcaagcgtaacctgaaaccgaccaatcagcttctcaccggaagcagcgacaaatccacacgacgcactacggcgagagtaaacctcgacggagagaacactccatttagccttcttaagagacgtctcaatctgagacttacttagactaaagcaagcagcgacggttgagacgttaccggaacaacaccgagactctgattccgattcggttcgcaacagaacgggaacagaaacaatctggcgtgggaaactcttgaacttgattttacaatagcaattaccagaggatacatccgaaacagacggtccagatgaagaagaagacgacgatgatgacgacggtgatctcggaaacctaaccgccaaattcccgacgatgatgcgtacgaaagagcaaggatccattgtgaattgaagattgaattatcggtaaatgttaattagtcagagctacgaagaaaggaactttaacactactaaccctaactagtttagggtttaagagagaattggagtggaagaagaagggattttggagaagagctataaaaatggaagattgatgagaattaaacaggctggaatatagctgtgatttttttgttgagaaaaacaaatggaaattaggtgaaagattttgtggggtcaaaactccaaaaaaccaaactatcgcctgtcaatttccagatgtgtaaattgaaataatattattctttcttttattttatttttttattttttggtaaataaaagtttttttttagtttaagtatgtattgattcttaaccttgaaatttctagtgttctaaatagatttatttctttactcctttatatgatttttttagttaaatgtttttgtcttttacaattttgatataatttctggaatcgttattgaggtttatatggtagatttttttcttttatacaggaaacatatcaagagattaaatagtaacgtgtatatatatttttgctggtcttgaattctttttaatgtatgtacattttgttgttgttttattgacatttcacacgttttattaaatatatttctacttagataacgattgaaaataggaatacgtcgtatactgtaatttgtaagattttaatgtagctttttttggcactgatacttgattacttctaaaaactgaaagatcttgtaaaatgcagtttttttaatggaagagagaaataatggaacagtggataaaaaaaagccaaagacctttttgatttgaaatgatttagcttttaaattttgaaataagctgatggaaaatagttagaagtggataatttatctatctgtttatcacttaggttagatgaattggtcccaaaagttggagcacgcatgtatatagttggcatcattatcctttgctaataatataaaacttaagaagctaataaattaatattgacaaaaaagtctaaactaataataaaattcttctttttttttgatgaggttatttatcctatatggaaatgtatatgttattatttaaattctatacgtataatgcgttaatgatataaaaaattgagttattttgtgtcattttaactcttttttaaatagtactcttagttgtagtttattaatttggagagaaaagaacaccaatattttcaccgacattcttgtcacgttatgggattgcgcaacgttaacacttggaccctgtctattcaccatccttgatgtgtacgatgaaaccaagcgatgctatagcctcccacaagccacaactcttttgaaattttatgttggatgtgcttcgtttaattttcgaatgtaatgcttattttgtcatacacaatcattgtgattattttcgttgtaacaacggagaaacacgaactatattttggaggagccatttctttagtttttcctatacatatgaatatgaatactacttaacatacaagcaaaacaaaaatttaccattggagaataaataatgatttctatgatttagaatttttatgaatagaaaaacaaagtttcatcacatctaacaattcaaatccactccataccaaaaaaaagaaaaacaattcaaattaactgaatgatatgattcacatttcatcaatttttcaatatatgatatatcgattaccatacaactattttacaattctactattatttgacattttttattcaaaatttgactaatattcgatatttttttgtatagatattattcctcttatttatttaatttgttgacaaacttaaccatatgcattcaattgaattttttcattttccccattatttttgttcgtaatgactactaattacaacaaaactatagtttattattttcctacaatttaatgatcattttaaaaactccttatctgcttaaaagcataattggaaataataataataaagtgaaatgacaataaaagaaaacttattcaagaaactacaaagttattccttgacaaaaaaagttattctattgtccagtgaacaaatatgagtttttgactattttttttttcacaagtaattttttttctttgacaagtgtatattaaacattctaaacattacatagcccaaacaaagaccctttcagggttttaagtaattaatcagtgacaaaaaaaaatgaaaatattgtatttataagtttttgatagacaaacataagttttacaattttccaaggaaaaagtcatattttcctagtaaaaacctttcgggttttccaatttatttaccaaagataattggtctctgaaagaacaaagcaaaacctaagaaagctaaaaagacactcagcgaattgaatttgtaaaaaaataagagaaaaaatcttgatttcttctgcgatcttcggttctcgacgcatcatgtgttgaagattcttctatcttcctctgtacatactctctctctgcccaagtgttgttgaaccaaaaaggggtcagatttagggtttttggaagatttttgtggctggactggccctgcagcgatgtctacctcgtcgcaatcttttgtggctggacggcctgcatccatggcttccccttcgcaatcgcaccgcttttgtggtccctcagccaccgcttctggtggcggaagctttgacactttgaatcgtgtcatcgctgacctttgcagccgtggtaatcctaaggtaatgaagaacattgtaaagtattctccctttttatgctttagtagaaacccatataacccttttgcttttattgcttatctgacggaatctctctgttctggttaatggaaaattcgaagttttagttcttataggtctggcaatttgtgggttttgatctattgttgttggtttccatcaagtatgcgactttgtttatgatttttggttgttgtattaggagggagctcctttagcgtttaggaaacacgtagaggaagcagttcgtgatcttagtggtgaagcttcctctaggttcatggagcaattatatgacaggattgctaatttaattgagagcactgatgtggcggaaaacatgggtgcactcagagccattgatgagttgacggagattggatttggtgagaatgctactaaggtttctagatttgcgggttacatgaggactgtgttcgagttgaagcgtgatcctgaaatcttggtgcttgctagtagagttttggggcaccttgctcgggcaggtggagcaatgacttctgatgaagtggagtttcaggtaagattgtttgtttccctccccttcctatcactgtctcggctcatagttgctcaattcttgatctcgttttcacagatgaaaacagcttttgattggcttcgcgtagacagggtggaatatcgtcgtttcgccgccgttttaatattaaaggtatcctgatttcagctgcccgatcctttagataagcagatcattttttcttttagttactcagaaagaaacttctgaactaataaattggattatagatgtttgaaaaatgatagtgatgataactttccaatcctaagttaatacggatatggatgttttcttgcaacattgcaggagatggccgaaaatgcttctactgtctttaacgttcatgtccctgaatttgtggatgctatctgggttgcacttagggacccccagttgcaagtgcgagaacgagctgttgaagctttgcgtgcatgccttcgtgttattgagaaaagggagactcgatggcgagtgcagtggtaagtattctcttatccttgaaaatgataatgtctgaaatgttttccttaggttatgtatttggtatgatatttttgatgcaaggcttttctttgtgttgttgcaatactttcatttgcaatcaccctcatttaagtactactttgtatattttattgtgtaaatgcaacttatattagctttttatgctgtggtcccccccccccccccaaaatggatgatattcgaatatatattcttcccatggtgatacgttttgcagactttctactgcatttatatatatcattgccaatgcaatgtttcaaattatcaataggggtttccatctttattaactgatcttctctcaatttggcttttacaggtactatcgaatgtttgaagctacacaggatgggttgggcagaaatgctccggttcacagtattcatggttctttacttgccgtgggggagctgttgaggtaaatgcagaagtggttatctattttgaaagcatccctttcttttagtcagacactcaagtttgattctggaatatttccgtagaacaacttgtttgtccccatgatgctcgggttgttttgttagtttgtcttcgtattgtagtttacatcattaaaaaagtaggcaattcatgtatattcctccactctcagtgtatacctgaacaaaagactcttgacgacgaaaattacgttgttttctgttataagcagattgatttcatggcatattgggtgttagagtttacagcttaatgctagagttcgtttgcaggaatacaggtgagttcatgatgtctaggtatagagaagttgccgaaattgtcctcagataccttgaacatcgtgatcgccttgttcgccttagcatcacctcgttactgcctcgcattgctcactttctccgtgaccggtttgtgacaaactatttaacggtaagtgactgagagattcttaaaaccaaaaaatttctggaaacgtgacacgaattactttcttgcagatatgcatgaatcatattcttactgtgttaagaataccggctgaaagagccagtgggttcatcgcccttggggaaatggctggtgctttggatggtgagcttatccattatttgccgacaattatgtctcatctgcgggatgcggtgggtcaaattttatttatttatttatttattttgtaattacgttttactacttttgtgtcaaagtattatattgggttttagttttgaaaactgaactagacaagtggctttgttcgactatgttgtccctgtagattgctccacgtaaaggcagacctttgcttgaagctgtggcttgtgttggtaacatcgcaaaggcaatgggatccacagtggaaactcatgttcgagatcttttagatgttatgttttcatctagtctctcttccacacttgttgacgctcttgaccagataaccatcaggtaaagttgaacgaaagaagtttgttattacatacattgatgtgtatacgtttaatgctgacaattctttgtatctcagcattccttctttgctgccaacagtacaagatcggcttctagattgcatttcgttggttctttcaaaatcccattattctcaagcaaagcctcctgttaccattgtccgaggtagtacagtgggcatggcaccacagtcttctgaccctagttgttcagctcaagttcaactagccctgcagactcttgctcgtttcaatttcaaggttggcgctctttgcggataacattttctaaagaatatgaaatttctgtctttgagcttctgatttctggcagggacatgatcttcttgaatttgctcgggagtcagttgttgtttatttggatgatgaggatgcagccacaagaaaagatgctgctttgtgttgttgcagactaattgcaaattctctttctggcatcacacaatttggctcgagcaggtcaacacgagcaggggggagacgcaggcgccttgtggaagaggttttatatcatactgaaagcccattacatttttttcttattatgtcttttaatttcactgtttctcattacaaaaggtttctttttattattttccaaatctgaacttaagtatgttaaacatgcttcgtgatggcatttataattgcaataccagtggcggttccaattttctgcttgctgagaaatgatgtttgggttctgcagattgtggaaaagcttctcaggacagccgttgcagatgctgatgtaactgttcgcaaatctatattcgttgctttatttggcaaccaatgtttcgatgattatctagcacaggctgatagtttgactgccatttttgcttccttaaatgatgaggtatgattgtgttatttgtttgaataaaatagcagcttagatgtcatactgcagtcctaatttgttaccgatcttttatttgtctctcttgggtgaattattgtaattgtattgctctttgagattcaatttcatgggttcatgaagttggtatttaattactccccctaatatcaaaatttggataccaagacgtagctgggcttttagtctatgaattagcttctattgtgtcacaaaacagtgttacttattaagttgtactggaaaagtgcagctgagataacttaattggatgatttgtggatggaatgaatgccttttgttggtggatgcatcatgtgataccctgttaacttgatagaatgtttggcttatgtttcacactttcactccacctggctacagtatctggcctagtcaatggaaccatttcaattcatatattacaatatctctgtttaacaggaccttgatgttcgagaatatgccatctcagttgctggaaggttatcggaaaaaaatccagcatacgtacttccagcacttcgtcgccatcttatacagttgttgacctatcttgagctgaggtaactacaaattttttagttcatatgggaagattcatttcctatgattatgtatctgttgcattgacttcaattgtaatgtcagcagtgcagataacaagtgcagggaagagagtgcaaagctccttggttgtttagttcgaaattgtgaacggctcattcttccatacgtagcccctgtccaaaaggtttaatttcttttcatttcttagatagtatggctattattgttgttcacggggttgtaactcttgttttctaggcacttgttgcgagacttagtgaaggaactggagtgaatgctaacaataatattgtcactggagttctcgtaactgttggggatcttgcaagagtggtaagttgaaatataattggcaagttttagattctatattaagtgtcgattcaaacataactgcgtttttgctgcgcgttaaagttgcagtctgatttttgactatttctatctgtgttctaagtctgtgttggctaagcgtatttcaaatttcaatgccctggccggcatctaatattgtattttttgttgtctctaagttaacagaatgttggtacttttatttcctttcctgtcctgttatttattgtgtttggctaagatattcccttcctggttttcttttgcgttgcttgctcagggtggcttggcaatgagacaatatattccggagctgatgcctttaattgttgaagctttaatggatggagctgctgtagcaaaacgtgaggtggctgtttctactcttggtcaagttgttcaaagtacagggtatgagatattgaccttcttttacgactttcttcttgttttatatgataatgctactaggcaattttgaacatgctaattttcttgtaaactaagacaatgctactatcttgattggcgaaagcctggttggactagatgaaaatactggattctaagtgaattttttgacacaaacggggcctccatctcttcttattagctaggtagaagcctgagctatccttaggctgtttatgtgttaatgtatacatatgtgttatgtttatcctttaacctactaaaagtgagaaaattctatatgaaatgacaatattgttatccctagctagttcttctatctgcggtagatctttgtgatggttttttttccgtctctcctgagatggctcattattccggagaaagaatattgcctttctgtgtccggacttgtcatgagttgtattctctgtttgtcgtgcgaaaggattgatttaccaatacctaggatattatgctgcctagatttaatcaactgtatcactggtgtttatgaagttgtagacatttgtagacagtgcggtgatcaacttgcatgttactgtttagtagcttgggacatgtgctaattattgtgcacataactagtacaaaatgaagggagttccagaagtttacaatcctccctgcatgttatttacggctctaatttcattatgaacgtaggtatgttgtgactccatacaaggaatacccattgttgcttgggttactcttgaaattgctgaagggtgacttagtgtggtctaccagacgagaagtgctcaaggtagtttctagagaattgttttactctagactattctagaagatatttttgtgataaacgtggttatatctacaggttcttggaattatgggcgctttggatcctcatgtgcataaacgtaaccaacaaagtttatcaggatcacatggtgaagttcctcgcggcactggtgattctggtcaacctattccatcaattgatgagttacctgtcgaactccggccgtcatttgctacatctgaggattattactcaacggtagttcttaatttgtgtgaatatatttcatttgtagtctgaattgtgctcaattactttccttattgttataggttgctatcaactcgcttatgcgaattcttagagatgcatcacttcttagttaccacaaaagggttgttagatctctgatgatcattttcaaggtaactaaaaccatcttgactgttttttaaaataaacttgtgttggaactgcaatgaggaggttacaactttatcactactttgtttttgcgaggttagtcaatgggattgggatgcgtgccttacttgccgaaggtaggtgtaaataatattgtatctccggcagcttttcgataaatgctctctctgttttacgttgtggtaatttgttgggttggttccacctctgaatttgaaggttttacctgagctttttcacactgttcgaacatctgatgagaacctgaaggacttcattacgtggggtcttgggactcttgtttccattgttcgccaggtatatccaccttaatattttcagttatggtcaaaatacgaccgactttgtgtaaactcatagcttatgttatctgtgtacagcacatacgcaagtatctgccagagctgctttcattagtctctgaactatggtcatccttcaccttgcccggtcccatacgcccatcacgtggtcttccggtaagttgtatgctgcctagagtatgctatgtttcttattgattaaggacagatatcttatggggagtacttcgcctctcttactgataatcaggttctgcatctactggaacatctttgcttggcacttaatgatgaattcagaacttatcttccagtcatccttccatgtttcatccaagtattaggtgacgccgagcggtttaatgattacacctatgttcctgatattctccacacactcgaagtgtttggcggtcagtaatacttatcttgttttgacatcctcatagtcattttatattacttgggtatgcgagttctagtaattaacgtatgcagttcttttacaagaatgtaaagaggttccacattattagattgtgtagtgtaagatgatacaagtagtttcgttattatatgcatatttgtttcttatctattaaatccaattttttttcggtatataggttctttgaatagtcagattgtttactcctgtagtttccattttctcaccatggccagatttcactctgatggttgacccttagagtccttatgtgcaggaactcttgatgagcacatgcatttactccttccggcacttattcgattgtttaaagtagatgctcctgtagctataagacgcgatgccatcaaaactttgacaagagtaatcccgtgtgttcaggttaggagctttggttatttattttgattttttttttccctttgctgatccagaaaaaattccatattaagcttcttgtaatacttttaattatccgtatatatcctcaggttactggtcatatctccgctctcgtgcatcacttgaagctagtattagatgggtgagttatactgattgtcactatctgaaaaacagtatattggttactttttcctaagggttttcttacaatacttcttcaaaacttaggcattgtgtcactatctggttttctcttaaatggttgacaatgcattatcaaaaaggatggaattattattatctcattaactttcaatccgtcattgttactgttacaaatctgttttccataagttgtttgtattgcttagttacaattttttctggccacatgtatttgttattagaactccgcagatgttagttacatttcttaatatcatgggattttatctgccattattgatgggacccaattgttttctagtggattttcatttcacgtttttctaaaccttactcgtgatttcagtttcgtacgtataaatattcttatggggtatatcttctgtaatcgcaggaagaatgatgagttgcggaaagatgctgtcgatgcactatgctgtttggctcatgcacttggagaggacttcaccatattcattgaatcaattcacaagcttttattgaagcatcgattgcgggtcttgcattttactatcttttaaataaaaatagcagcaaaaatttatctgtcatgtattataaatgtcatttgtgaacttctgtctgtaaaatctcactgtacaacattttttcagcataaagaatttgaggaaattcatgctcgctggcggagacgtgaaccattgattgtagctacaactgcaacccaacaattaagtaggcgactgccagttgaggttatcagggatcctgtaattgagaatgagatcgatcctttcgaagaaggaactgacagaaaccatcaggtactcttttctgtgtcgtatataatcacatatagattcttaatgtgtgaaaattttgttatcaagtttcaagttaaaatcatgattttactctaacattgtacaaaatttctggtcggcatagtcattattagtatgacttcattgaggcaaacatggggtgtattgtagggttccttagctgaataaggcggatctttttttctttctttttcctatctaaatgatgggtaggtttatctatagcaacgttcattcattgaagcttagtcttggtcctgagccatttgcttcaatgagtttgtaaatatgtcctctatatttcctcttctccatggacattcagcttttaaaaacaaataaaactatatatgggcttgatttaacatgatcctctagtaaagtttatttggttctttcttagttttgaaagagctaaaactttcactcatggctttgatgatctgctgaacaggttaatgatggtagactacggacagctggagaagcttctcaacgcagcaccaaagaagattgggaggaatggatgagacattttagtattgaattacttaaggagtctccctctccagcattaagaacttgtgcaaaacttgctcagttgcaggtgtttcatctatgctctttcttttcctctctcaaaagggtgcattttaatgattgtgttttgcagccatttgtcgggagagagttgtttgctgctggctttgtcagttgctgggcacagctaaacgagtctagccaaaagcagttagttaggagcttggaaatggccttttcatctccaaatatccctccagaaattttagctacactactcaatttggtatgttcgttgttacattacaagaaaacttaaacatgataaagacctttgattgagtcactggctataacgaacagcaaatttgtttcctgtggctatgcttgtgcttattgagtgcttgtgttttagcttaggcgattgttatgagttgactacattttccaagactggaaacaaaaacttcttaggtcaccatttctttagcggttgcacctgttaatctttctatgtaaaacacgttttttgttgctaaaaccatcaacaaaacgatctgtgagtgtacatggaaacatgacgtgtaatttttatttaatctaatattaacactataatccaaatatctgcttatacttcgtttaatctatattacgtttaggttggataaacaatcataagttcagaatcaatatcaacctacctttatgtgtgatcctgttgcttggtcctgtcacttgtgcttgattttattatttctcttcttaggcagagtttatggaacatgatgagaagcctcttcccattgatattcgtcttctgggggctcttgctgaaaaggtttgcgttatgtatttgctagttaaattagatttggtacttttttcatttgcgtatcaagaattcatctgattttcttggtaatgtgcaatattccaactttgtagtgccgtgtttttgccaaagctctgcattataaagagatggaatttgaaggtccacgatccaagaggatggatgccaacccagttgctgttgtcgaggctcttatacacataaataatcagttacaccagcatgaggtacactgtattttgtatcctatttcgaccatctttgatatttgttattattgattggttggaattctttgtataggctgctgtcggtatactaacctatgctcaacaacatcttgatgtgcaattaaaagaatcatggtaacatggcttttctgaatcatgatgcacttattttcagttctgtttgataggcattccgtcacaagattgtgtgtggttccattctttgatcctaatcagtggaaaagcactaacagtgtttgtttctaggtatgagaagctgcagcgctgggacgatgcactcaaggcgtacactttgaaagcatctcaaacaacaaatcctcatcttgtattagaagccacattaggtttgtggtaaccaagactaatattgggaggatttagtgggtttttttcttcgataatgtttttttctaagttctgttggcatttttttgtcggtattctgttagtagttcatagagaactgtgggttcataacattcttacaagttagcagaacaacagatcaacgcatttttttccagtctaaaattcatatgatgcttctcttttcttttcatgaaatggcctgattctattgcttatttaccacgttgtaggacaaatgagatgtcttgctgcacttgcacgatgggaagagctcaacaatctctgcaaagagtactggagtcctgctgagccatctgcgcgtctggaaatggcaccaatggttggtaacttctacttatgctacattcggtgatatagctacatggttacataatgtctttttgcaaccatactaggctgcacaagctgcatggaacatgggagagtgggatcaaatggccgaatatgtgtctcggctagatgatggtgatgaaacaaagcttcggggtttagcaagcccggtttctagtggcgatgggagcagtaatggcacattcttcagggctgttctgttagttcgaagggcaaaggtacacttggacctatattttcgtactataaatcttatcaggcttacttataatctatttgcagacactaatttctgcgtatgtgtgcctgtggatatttttctttcctttttagtacgacgaggcacgcgaatatgtggaaagagctagaaaatgtcttgccacagaacttgcagcgctggtaggtttcatttctggtagtattttcattataaacttttgtgaaaaatatctatgaatcatctgttgtgaataaagggaacagatgtatatcagcaaagatatttgtaactggtctcagccttttccattatgttcttgaaactatttgagtacgccttgtggtgttggaagtaggattatacattcctgacatcttagttacatatttagctctatttaaataacattttgtgcatgctatcgttggttcctttcaatagaagcatcatgtaatcaccatgttaccttcttagttgctcacgcatactgaaaaacttgtaattgtctatttgcgccttctacaggttttggagagctatgagcgtgcgtacagcaatatggttcgtgttcagcagctgtcagaactagaggaggttagatctcaattatccaagatcccttctcctggacaccctccctaacacccctccatatacatgattaatctttctatttttttcccctgttgtatcgatactaggtaattgaatattatacgctgcctgtgggaaatactattgccgaagaacggagagctctaattcgtaatatgtggactcagcggattcagggatctaagcgtaatgtggaggtatattatttttaatgttatcatgttagttgagccactagtgaatgacaaggcatttggtattttaagcatcaaatattgcagtatggtgactttattaaatgaatcttcgctaggatcaaattgattttttccatattaggtttgctttatttagtttccgtctgttgatttataaagtaaagtagcttcttaccaaactgttagtcagagcttgtatcctacgtagataaaaaaacaaatccaaataagaaaactcattaaaattttattgagtgatctcaggttttttgtataatagtgtgctttttaatactttgcattcccaatactactcaggtgtggcaagcacttttggctgtccgggcacttgtgctacctcctacagaagatgtggaaacttggctcaagtttgcctcgctttgtcgaaagagtgggaggatcagtcaggcgaaatctactctactcaagctcttaccggtcttgaacttttaccttttgattgttgaattttctctgccaagagtgtatctttattctgttatgtctaacttgggcccttattttgcagtttgatccagaagtatcaccagaaaacatgcaatatcacggacctccacaagtgatgcttggatacttaaaataccaatggtcacttggagaggaacgtaagcgcaaagaggcatttaccaagctgcaggtatgtcatataccagttgctacttgcattgtctgggcttattctctttttcacattttcccatatcttgcttgaacggccatgttatagcttccctcgatctaaattttaattgtttctagattctaacgagagagctctcaagtgtgccacattctcaatctgacatactggctagcatggtatctagcaagggcgcaaatgttccacttcttgcacgtgtaaatctcaaactgggaacgtggcagtgggcactttcttccggtttgaatgatgggtctattcaaggtgaattgtagttgcttttaaatgtgtaagtgtaatcaaactacgtctgaccttaacactttggtgaccaaatatactcttttccagaaattcgtgatgcgtttgacaaatctacttgctatgctcctaaatgggctaaagcatggcacacatgggcattattcaatacagcagtgatgtcgcattacatttcaagaggtcaaattgcttcccagtacgttgtttctgcagtcactggatatttttattctatagcatgtgcagcaaatgccaaaggagttgatgatagtttacaggtaaagcgtgcatgcatccatggcttttccatgttacacaaacgaaaacgtgtctttcttttcttttccatgttgctacttttcttatacttgttgaaatgaggtgttgttttaccatactggtggtctgttaaattattttcctctgctgtctcatttccataggacatactgcgtcttctgacattgtggttcaaccatggagctacagctgatgtccaaaccgcattgaagacaggattcagtcatgtcaacattaacacatggcttgttgtgctacctcaaatcattgctaggatacattctaataatcgtgctgtcagggaactgattcagtctcttctcatccgcataggcgaaaaccacccacaggtttgcagccttctagaaattttataaatcttcatcagtattacaattctatggtgggaattaagacatacataaagttttactctgccattttgattgcatatgtacttcgattttggatgcataatttctccttgactatttatttttcaaatgttttcaggctctgatgtatccccttctcgttgcatgtaaatcaataagcaatcttcggagagctgcggctcaagaggtggttgataaagttcgccagcacagtggtgcactcgtggatcaggttaaaagtcatctcttgtgtttgtcgattttattgaattatatatttttacctgagctaattagtgacccccttcctctacacccataacaacaaaaaaacaggcgcaacttgtatcacatgaacttatcagggttgccatactttggcatgaaatgtggcatgaagcactagaagaagctagtcgcttgtattttggtgaacataacattgaaggcatgctgaaagtacttgaacccttacatgacatgctcgacgaaggtgtaaaaaaggacagtacgaccatacaggaaagagcatttatagaggttggaaatttcaatcccggatttttggtatttgggtgtgtgtgatcacgttatttataattacatctttatctagcacaggggtgtacagcattgcagtatctaggtttatttgctatgtaacttgtagtcatttttcctcttcgcgattttaaagtattaaaataaaccagttgcccttgatagaatcagattactaatgttactgtatggagtgtttcttgtcgcatatgtttcagtaactgttatatgtgaactttacaatgttctttaatgtcagcaacttaagttagtgtaatgttgatgcaggcataccgtcacgaactaaaagaggcacatgaatgctgttgcaattacaagataactgggaaagatgctgaacttacacaggtgatcagaaattttgaacaaaatttcagatgagtgtttgctgtcttcttattaaagggacgggaattgacataatttttcttttcaattctctatcttcttaggcttgggatctttactatcacgttttcaaacggattgacaaacagctagccagtctcacgacattggatttggaagtaataagattctctttttctttggttctctcgctccttttgagttctaatctgactggcatgttacttgttgtatagtctgtttctcctgagttgctgctgtgccgtgacttggagctagcagttcctggaacatatcgtgcaggtaacaacatattgaactgcttaagtttgcctgagctgatttattttattaacccagacttcattgcttacatacatacttcgtttttcttcttattagatgcccccgtcgtgactatatcatctttttcacgccaacttgttgttataacctctaaacaaagaccaaggaaattgactattcacggaaatgacggtgaggactacgccttcttgttgaagggacatgaagatttaaggcaagatgagcgtgttatgcaggtgattctcaaaaaaatcagttatgcattgttctgatgaattcttgttggagaatacgtaattgaagttttcagtttacacttcacaaatatacagttttcagctacaaaatcacatctatccctttcctcttatttgtgtttcagctttttggtttggtgaacactttgcttgagaattccagaaaaacagccgaaaaagatctttccattcaacgctattctgtaataccactatctcccaatagtggactcatcggatgggttccgaactgcgatacccttcaccatcttattcgagagcacagagatgcaagaaaggtttgtcttgtattcactaaggttttcagtcctgaaactatctgcggtttacgttaattcttacacatgcctgtctgaattcatagatcattcttaatcaagaaaataagcatatgttgagttttgctccagactatgacaatctaccgcttatagcaaaggttgaagtatttgagtatgctctagaaaacacagagggaaatgatctatccagggtactcaattcattctggtaactctatttattttgggtaaagtacctaatctggaatactaagttgcttctattcttctccttcttattaggttctctggttaaaaagtcgctcgtcagaagtttggctagaaagaagaacaaactatactagaagtttagcagttatgagtatggtatgtagttgatctcatcctttgttctccacttgtgtagcatcaaataaaaagtttctggtgtttaactcgccaataaaatgaacttcatgcgttactttgtgtcaggttggttatattcttgggttaggtgatcgacacccaagtaaccttatgcttcatagatacaggtacataaaactgaaataaggtttacattacattttcaaccttgggttctatttctttatcaatggttttaattgtgcagtggaaagatcttgcatattgattttggagattgttttgaggcttctatgaatagagagaagtttcctgaaaaggtattaattttaatgtttccctcgtatatacttgtttgtgggtatcaaagaacaattttgtgaggattgcttaaataatgttaggttccattccgcctgacaagaatgcttgtcaaagcaatggaagtcagtggcattgaaggaaacttccgctcaacctgcgaaaacgttatgcaagttctcagaaccaataaagatagtgtaatggcaatgatggaagcgtttgtacatgatcctttaatcaattggcgtcttttcaatttcaatgaagtcccccaattagcactgctcggtaacaacaaccccaatgctcctgctgatgttgagcctgacgaagaagatgaagatcccgctgatatagatcttcctcagcctcaaaggagtactcgagagaaggagattcttcaggtttcttttgaaaatcttattatgtttttttcttctcaaagggggatttttttatatttaaatttgatttttggattatttcaggctgtaaatatgcttggagatgctaatgaagttttaaatgagcgtgccgtagttgttatggcacgtatgagtcataagcttacagggcgtgatttttcttcgtctgcaattccgagcaatcccattgctgatcataataacttgctcggaggagattctcatgaagtcgaacatggtttgtctgtgaaagttcaggttcaaaaactaatcaatcaagccacttcccatgagaatctctgtcaaaactatgttgggtatgttcctctacacttctacactcctaaaccccgattgctttagttcatttaaaattgaacatgcatatttcttgtgtttgttcttttattacaggtggtgccctttctggtgagatgggtcatctgtacatttttaatgtaaataggctttttaattttcaactaatttgcatttatgtttgactaattcgataataaactatgttctttttaatgtaaataatttattagtttcatagtcatgtattaatacatgatgtagcgtggatgaataaatgggcaggtcaccttttttacttttctgaaatatacattctcatatcctcaaggtattttaatggaattgcgacaaaagaagaagaagaagaagatggtgtacaatgtacatgttttatgaactatataaagcaattggaatatgcatgttctttttaatgaaacatgtttccggagtttaagatggatttcataaaaatcaacataattttgttaatagtccaaataatataatttttttattttttttttgttaaagcaaatttgtcacatttttttatataaaatttgtgatgtcaaaagagaagacaaatgtaaaattgtgttgtgggttgttacagtatgtagttggtatctttattaaacctaccaaaacgagacaatttgtaacattgagggagcatgtgatagtacattgggtattatactattaagctaacatgagtaatgatgtttttttgttttttttttctcttctatgtattttgtttttgtaccaatattattaatacagaatggggacaaaaaggagacgtggagtctcgcgttacgttaccactctctcaaatgcggcaatttggcagccacacacacatggacagcgttagcgtactgtagataaataatccgtactcgtgctaacgtacgcttcaaatagttaaaggtgataactttcaccgttgtctcggcaccacttgctcgaatattgacacctttttcttccccagaaaaaatccaaacaaatagaattttgccgtctgaaattcctaaaactataaaacacagcttccttcttctcctatatattcatcggcgacgccttgatcatgattctttccggaaactgataagaggaacaaaaatggcttcttcttctctggagattgttaaattgtgtggctctcctgtatcgtttccccgccataaatctcccataaaattggaatgtagaaaaagggttttcagattacccaattctaggagttggcatcgtcttagggtttcttcatctgctctcaatggtggtgataatcagtccaaaggtcagtttttttttttttttttttgttgcttaactctctaaaagaagtaattagagttgattttgattataactgatatttgattagtcaatagattataaagatgtgattttgattctttccccttttagatagaatttgttgtcattagttctctaatagtatcattagttctccaatcttgtttcttgaatctcttttcataagtcaaaaaggggttttaatatacaagttatccattttacttggactctttcttcttgtaatggtgtgtattcattacttagattttcctctacctgaatttggagtttgatttgtatgagttgtgtaggtgaagaacctccagaatctttatttatgaaagaattgaagagacgtggtatgactcctacttccttgcttcaagactatgaagtggatcaggatgagatcaaaaccggtaaagaaaccggaaacagctctaaaacgactgcaactactccggccttcgataaaagcttgttaaatcagagagagagatctttggctttaaacagcgaagggcttgaggtcagattatcactagtaccctctaattattatagtttctcatagtcagttattgtagggcttgaaattatgtttcattgccttcttttgtatccggatagttcttagcagcttatgtagttatgataaaggttgattttaggagtttgttttgttaaatttggaaaggaactgcttattgttgtttcaggggttgattccgcgtgctaggatcttgctgacaattggagggactttcttcttgggcttttggccattgatagtcttaactctcggcgccttctctgctctttaccttgtaagtatttaataagatcaaggagtgtacttttcttcattctagtccttgaatactaagaaagtggcaaatgtattttggagactgtaaagagacctcttagctcttccaaccaaccacctagttaagaccctcaactctgatccaacccaagtcctattcacatttatgcttatcagtattcttccacgttcttctcgcacgccgtagaaagtgttttggaatgagtttttaaggttcctttcttctatggatttgataaggtttcttaccataaactgatttttcttgttgaaatgatagtactttggagcagatttcattcatgatggaagtagaactccggtttcaccaccaccttacatcgatccatatgctctgttggaggatgagaggatatcagggatggatcctcgtctaaattagcaggcaacaagttgttctttattgcataactagtgtagagcatatatttgctctaagtatatatttttatttacagcctttccttttatttattttccttacggttgtaaaaagaatcgttgcttctctattgcttctctgttccaaaaatttcaatctttcaccactcaaataacaatttgacgtttctatttgtttagattttggacaatcgatttaaaccaaacccagcttaaattcagttcttggagatgaaaatattatcagaaacaaacgaactagaacaaatggctaccgccacaagcaagagatagaaatatggtttttgaaaacacaagtacgactcgtaagagtttcgagcctattcacacaaacacgagataatagaaatcccacataaaaccgacaaccttcttagtactcctctccttcatcatcctcatcgtcaccaccttcagcaccaacctcttcgtaatccttctccaatgctgcaagatcctcacgagcctctgaaaattctccttcttccataccctcacccacataccagtgaacgaaagcacgttttgcgtacataagatcaaacttgtgatcaatacgggagaacacctcagcaacactggtggagtttgagatcatacacacagctctctggactttagcaagatcacctcctggaacaacagttggtggctggtagttgattccacacttgaatccagtaggacaccagtccacaaactgaatagtacgcttggtcttgatggtgccaacagctgcgttcacatccttggggacgacatcaccacggtacatcaaacagcaagccatgtactttccgtgacgagggtcacactttgccatcatggatgctggctcaaaagcactgtttgtgatctcagcaaccgagagctgctcatggaaggccttctctgcggagatgactggggcataggaggaaagcatgaagtggattcttgggtatgggaccaagttggtttggaactcagtcacatcaacattcaaggcaccatcgaacctcagagaagcagtcaaggatgagataacctgaaaccatcaagagagagttaaacataagaaacgaaacagcaaaaagactgactgatgtaaatgattgaagctggctctatacctgagagacgagacggttgaggttggtgtaggtgggtctctcaatgcttagggaacgtctgcagatgtcatagatagcttcattgtcgaggaggatagagacatcagtgtgttccaagagtgagtgagtggagaggacactgttgtaaggctcaacaacagaggtggagacctgtggagatgggtaaactgtgaaacccaacttggactttttcccgtagtcaacagaaagtctctcaaggaggagagatccaagaccagatccagtccctccaccaacagcgttgaagacgaggaatccttggagaccagtacagttatcagcgagctttctgatacggtccaagcacagatcaacaatctctttcccaactgaaataagatttcaaaagtaaatcagtgaatgaacagtaaattcaacaagatatggttgatgatgaagaaacaagggaaggagtaacttactggtgtaatgcccacgggcgaaattgttagctgcgtcttctttaccgctgatgagttgctcagggtggaaaagctgacggtaagtaccagtcctgacctcatcgatcacagttggctcaagatcaacaaagacagcacgtgggacgtgcttccctgcaccggtctcactgaagaaggtgttgaaagcatcgtcacctccgccaacagtcttgtcactcggcatctggccatcaggctgtaacattccacatccaagacaacacatcaatacaaagagacatataaaacgaaaagatctacacatatagaagcaacgatgaaaagagaaaatcacaacgagatgcttcaactatatcgcaaatatcaatcgccatctctttaagcaaataaagcaaagttttccttcacccaatattataaaacaaatacggatatggcatcagcaaaagcaatctgacatgaaatccaattcaaacacagatctatccaggttcatcgaataatttagaaatgagaaacggatttcgcatcaaccacagaaatttcataagacgtcgaaatcaaacacagatctaaacgattacgtaaaatagatctacgaggtcaatgctgcgcaaaaatatctcagatttgatcttttaaaatacgaaaaatatgaagaaaaacacagatcaagatagaagaggaagagacgaacctgaatgccatgttcaagacagtaaagctcccagcaagcatttccgacctggataccggcctgaccaatgtggatcgaaatgcactctctcattttcgtttcgcggaagaaagaaaagatctagaaactagatttgcagggaagaagacgaagaagaagaagggcgtttatgaagacgctcttcttttagatctagatctgattttttcgatttctaggtttttacagagctgtttgatgctatatttataagcgaaagtatccatctgtatgtaacggcacgtatgatacacgtgtagtgatgtaattgggttgtcgttaaaaccacgatttgttgatatcctcgtgagttgcgtattttctaattttgaattttgattccttagattctgtttggcaatcgctttctgaccgtttctctttatttttgaaatagcaaaattccttgaattgcgtggaaatgaaccggaatttaattagaattgaaccggatcagaccaatatttaaagtaaaccgaaacgataagaaactagtattaaccaaaatcttcgaaatggtaaccaaaaattcaaagctttgagtaaatgatgagagcgctagcggcggcttcacggccactgttttccgatttgccgagtctcgttcgttcatggcttccgacttctagcttcaaatcgtttgctactgtatcttcgtctcctccgtcggatttgaatctccggaatcaatctcgcggtggccttcctcgattcttttccgatgatcttccatctcgcaaggcacacaccctatctatctctatctttatctcatataatttttgttccctttaaatctgtgtaagaatccaatcgaaatgagagtgagggtaatcactgagaagtttagaaattactgtaattcactgtaatctctaagaaatttctggtaaaatcatggtgaaatgataatattaaatgttcttgttgtttgaaatgataagctcctctttgtgtaaatcgttttatgattgtttatagggtggagttgttcgtgttcaaggctctgagttttggcatatggctaaagttcttagactgaaacaggaggacaggtaattactacattcatatatgttattgtcattttccagtgttgcattcatgaaaggcccttttaaaaattgatttgttcattttttgtttgcttgtatccatgttgctaaaagttttatcctatctgaatgatgtttgtaatgtatctggatccatcctttcatttttatgcatctttatcatgaggaattcagttgtttaagtaatgatagcatcaaaagtaaccctgaggtgagaggaggccaaccttttctttagtttaagatcactaaaccttaagtgaatgtaagtaatgacttgcaccccttttctttgcaagggtagaactctttaatggcaaagggggtctagtagaaggctgtatacaaagcatagacaaaactggagttgattttatcgcacaagaagatcagaaggtgattcttcctcagggcatgcagtggcaggtgtttgcagcttttggtatgaaataggacttcaacctaactttacgatatcgccggatgttatagtctctggctcagcttgagtcatgatttctttgaaaatgtcttgtcaggaactttgaagggtggtcgagcggattggctaattgagaaatgtacagtatgtatctacttttagtatgtaactgtctaaatcacctgtgaatattgtgtcactgaatatgtgtatatgctcgtcttaggaactcggagcgagcagtgtcacaccacttttaacggaaagatcacccataatctctgaaaaccgggtcgatagattggaacgcgttagttttgctgcagctaagcaatgtaagtagcaatagtgaaagaaaacaattggttggttaatcttgctcttctttttccttcgcattatagttgtatgatcagaaactatttgccttatctttcactgtcacaggccaaagacttcatcaaatggtactgaaccctccaatcaaatttggtaccctcttggatcatgtatgtttgaacatttttctacgcaaactctaagatccttggtttataaaatttctgactttttgttcttctaaacttgttttgacaccttttggggttttctagattttgaagtcaaagttatgtttggttgctacagccgaagctaaacctcttcttaatgcagtaaactcctcagcaaaagaatccagcggactattaatcgttggaccagaaggcggtaagaaatcttctcttcaatacatttctgatgtagttctcttttaaaatttctactgacttgctacactttcacattgtcgaaaatgaaatcatgggttaatgctcgagtagacacaaaatgaacagtagcttatggctcttgttaatatgacttgtctcagtgatataaaaaatatgtttgttatctaacggtcaacaatgaaattgaagcagactttacgaagaaagaggtggagatgatgttggaagcaggcggcacagcagttggactggggccacaccggttgcgagttgagaccgcaaccattgctcttttggcaactctagtgatgtggtctgactctcaagagatgatctaaaagcttgttaggctttagtttttggtgcctttaggctttgtcttgtgttcagagattttgcttagttgagtctggacatcattgataagaaaacaaagaggatgtttgaatattaaagcctcatgataaacaaggaatcaaggatacataaaaatacataaacaccgaagaacaagcttcccgaagaaggataatcaatttggcggtcggggtaccgagtccatccaagatgggagcacaaactgggataacataaggactccatcgcatctctcttccatgtacccctcagtacccgacgtgtttacgcgacaacaatcaccttcactactactcccattctctgactcttgatgaacaataaactcttgtgcctgcaagtaacccgataccaaacaaccgtgttgacgatcccacagatagacgatataagtatcaaacggattcattgccaggggaaaacagttgacatcagatatgaaagacggcatgacgacttcccaaatcagttgccacctttcactctctttgttatgcagcctccatgctttcaatattcgatgtattacttcaatgaagataacatcttctcctgaagtagtcaagcatctccgaacatgttcatgttcatcatcatgttcatgttcatgttcatcattcgcgccagggagaggtataacctgacattgatcatcagctccataaaagtcatgagctacaaggacaccaggtccatttgaaaacatatacctatcccacatataaagaaccccgttgagattcaccggagaatcaactctaccaccgtggacgggtcgagatgagaaaacttgcttgaaagtccataaacctgtctcagaagaatatacacaaactctccataaatacattccttcatctctacgatcaatcagttccatttggactgtcctaaccatcttgaaacttgaaacgacgccgttctcaacgcgtgttaccattccaacgccgctatatggactcgggtaccaagggtgtttatcttgaacccatggattaggaggttgagggatctcaacccattcttgtaaaactggattaccaacgaaagatttataactataaaccttgttcttgatgcgagaaacaagcacatcgatccaaatcaatccattggaagaagctatatagtagtattcagaggtagggagattcggatattcttgaaatggcatgatatatgaaactagagatttgggaagatcccatgttttgcatccatggaagcctatggcttgtgtcatctcacgaagatactctgttctgaacatgatcgaccatgaggtagaggagcttcggtgaaaagatccgaagagacgtcggaagtagtccgattctattactgatttccatcttttgcatactgatttgaacctcgcaatgcttctcaacggtaatcttgcaagtatctccacctctgggattgttcttcttcttccagtctccattagagtcttttttggtctctctgttttcttcttaaatagttctttttcttttggagatggttggacgtgaatcgctcttttattatcatcaactttatggactcatgaatcaatcaatatttatagagtgattaaaatgtgacaatatgataatgtttttcaccagaagtacaaacgaagcaaaacaacatattctaaccatattaaagatttgataaagaaaaagcttttgcaataagcaattgaaaagtgaatttaaccaagatgatatgatactgatagggagctctagtgaatagtgtcctcattagtcattacactaaagaaaaagattttgctaagcaattgaagttaccaattctttaagaaggacaatcaatttggtggagaagtacagagtccatccactgtggaagcacaaattgggataatatgaggatagatttattgtgattagcatcttccatataccccttagaattgctaatcaaattaaataaaagttcaagcttcaagatggaaattaagacagaaagatatgtctatataaatataattcttgtcagaaatcatatggtgtagataaacataatttacatatctacaagtaattaagaatgtgatttgaggaaaactttggaccatttaaaaagaagatgatggatattagcatccatgcgagtaccaactccgccccacactaacatgtcagccatgtctccaattgacgacccactcacttcattcacctcttcgaacccaattcttctgtaaaacctaaccagctgatacatgaaaattcagttcgggtcagtatgtgtttgtttggtaaagcgagatcggaattcaatcggtttggtccgatcatatgatgaggtttctataatttcattgaaaaactataaccagaaaaagccaaaccaaaccaaatcgaaacgtaatcaacccgaactaaaatttgtttacagactaattggttttattattctaacacccccgctaaagcaaaaccaaagccaaaccgtaaccaatttaaatgtcacaaaactaaaccgaataaaccaaaattcatggtacctgtaatcaaatcacctcttagattcggtccggttcggtaataataaccaaacaaaaattctcaatttcaatttcgatagaaagagttatggagtgagagagaaaccttggaatggtagagatcggagtcgtagatagcaagaagctgagcagtacggcaaccacagtcgtagccatggcgaatcgctacagctccgacgtataaaccaactccaagaacagacttatccatagccactgtctctttcgtcagtcttatcgtatccaaatgcagaaccaaaccgcgtccgaaccatggacgcaccactccctctgctcttcccacctcaccgcccgtgtctgcgttcttccctgtcactctgaaaaacggtcctaaagtctggatctttaagtctagctttcgagcttttgatgacgtcaggatgtctgacatcgacggtagggaattggaatcgccgagggaattggacggtgagagaatgagtttcggtgggctcagagccatcttcatttcctctgggtttcgttactgaaagagggttcagataaaatactaaatacaatgatgagataatataggtaacatagatgacacgtggcatccattcagagagtcgaacattactaaaactatggacaacatgaacaaggctcacgagttttgattgctttttgtgaagaatgcgtgtattgggatgtgtttgctactgtccttttgatctggtttctgcttctttggcttcgaatttaccttttcctttccgagaatcctaacaagtgtttggttatgaaactttcagtgagaagcagagacttgtaagaaacataacggaaaatggagtaggctttaaaatgttactgtcagctgaccttcgttttgaaggtgttgtggaagaactagagccagtttcttcgttttgaagtctctgagcgagatgaaaatcagagtgttcttgtcgttcctctacaaaagatggtggtaactctatcccacacaagacgcatttgtagccgtcaatccaatataacggctccgtttgtggaaatactgaaactgcttcggttgcattagaattatcattcatcgagtgactagtatctggtttgcactccttgtattttttgagcagtgaatctccttccaatatttgcagcctttcttcttttttcatacactcttgatttggaattacctttccggaatctatttgggaccgttcttcatattcgacaacatccttcagatgggcagagcttgtctcatgagaaccaaaggatacattcccgctctcgtcattgcttaagcaatttttattagcatccaagtcaaatgagtcattgtcatccagatcttgtgcttgtcttgaggaatccttttgaacgatgaacttagtaatagttccctgtgaaggatcagaattgcggatttcttcaacgaactgcgacatgcgcaaacctgcatatacatagatcgagttctggaattttagtagatgggctaatatatttaatattatgtttctaacgaaagaagaatgacgaacactatagagccgcacctatcaaccttacggaaacaggaagttctgccttcaacagctttgtagcatgctttagtatatcatcgcttgaacacgtgtacctctgcaggctaacagctctgctcctgatctgagcatagcagattgtcacagtttcagcacatagatggatttccaaacagggagaaataaaatgaaatttagatgagcacctcaaaggaggcagttttcagtttaagtgtcaacgttcttgctgttaggccctcctttttcatgtcatgagatagcatttctgcaagttcatctgcccagaacagcagagataacaattcaagtgaattatgtcaaagcaaatcttttatgtcaaatatagattcgttaagtctaaaaggcaaacaggttgatgtaagattactcagtatcccaggaacaaactatgatttcaagtagtctcattaaacaatcctttactgtgttaaattttaaagatccttttgtttgcctttgattattgagttatgtacgtcttatgagagaaaaaaacacgaatgcgcaaactactcacccaacttggaatatagcaatctttcatctcctgtcgcagcaaatgtcctctcactgctaatacttttacgagacctaacctgaggggtgtttgttcctccaagccccagtccaaccgacaaaaaaaagtctacaaaattttgtcgagcaatcaccaaagcatgatatgatccattaaagatatcatgtgaaacttgacttcacaagtaatgcctacaaacaaacgaatcttttacaggaaaggaacagtaaaacaagaaggaggagatgctgctacctgctgatgactgagagaagagagcgtagagaagagatcccttctgcaccatctcctcacatgttttaattcccaaagcatcctttaaaatatgttcagtaaccttaccaattccaccgatctgtagaccatttccaactggcattaatttgacgagtaaattatagaaacacagtaccatttcctagcacaatttaaaactcaaactataatcgaatttatttttgaaaaacctaggccaatggtttagacaactcataaagaaccaaccccaagccgtcgcaaacaacgtgaggttgtttttagttctgtgccaaacagaaactaagttctgcatggcatctctattactaccaacattcaaattttgtattggatatctaatctcgctcacgtgaatgaatcatcatctgcacttctacacagcaaattaaaggatctggggaataattgagaggtagtttctctttaaagcctcgaaaagaaagagaaaaaatctttaaaagatttgacagcaaaagcaacaattcaggaacacatacctttcttacagggaggaaagatacgaatgtcatgacagttgatcggtcattttgtagaacaaactgtccattaggcttgttaatgtctgagcaaacctgaaacatagtagggctagattaagaacacaatgttttttgtaatatagtaatatagaccaaactgagacaataaagagataaaaattggaagacgtataggatatcatgcacatatgaaaaccttggctagcaagcggtttgccgctactccagcactgcatgtcagtccagtctcggaataaacagaagatctaagctcctctgcaatctgcagaaagtgaagaaatggacagggaaacagttgcagtgtcagccaaataatctctcaaagaagatacaacaatcacaaaagaatgcatctcatgaggtcaaacttacttctccacctgaaagacctctttctcgacaaacctcagttatgtcaaggtaggcttcatccaagctcccagcaatgaagtgaggatcatagttcctaaaaactaaatgaaacacatgtatgcaaataagagcagagaaataagaacagcaagcataaagctacacatgttaaaagaggaagcaacgaaccctttctggttaagtcactgtagtgagtatacttagtgaaatcaacaggaacaaatatcaaatctggacacaatttacgagcaatgaagccaggcattgcagcacggaccccaaacttccttgcctaagtgggatagtactaatttaagttgtaagcataattttgaggaaactttttatccaccagttgaaaccaaagcatacctcataattagcagtggagatcatggataagcctccaacagccattggcttgcccttgatcgaaggatcgctcaaagtttcaacagcagcataaaaagcatccatatcaacatgaagccaaattctggataggtcacgtgtagcttctaactctaagatccttttatcaaccaccttcatatgataaagcttatatatagtttccggctaatcaaataaatatgtgaaagattacaaagccagtattccctatcatagccaactattcctcaaagcaaaagaagatatcgtatagaaaccttactcaggaatagtgacacataccttctgataattagataaatcaagggatgaaagctttgcgcatcgatcacgcatatgctcaatcttttgtttcataagagcttctttacgctcctcattttgaaaatacttggatcctttactcatttcatagacaaccctctggactttctctttgtcaactccctccatacctaaggaacatacacacagaaacatcgacgagtttagaaatttaactcaaacatcaatcaataactaaagatgcaaatttaagattttgatattccgcaattaaatcttcaaaacaacacataagaaatatgttcaaagaccagtcaactataacccatgatcaacgaattgatcaattttcaagaaattttgaactctggaagaaacaattcacgaaagaatcctgaaaatttgctaaagaagaaaaacactattggggaataatcgggaacaaaccggctttcgcgttagtgaagacggtattgtaggattcccatggacgcgacgaattgttggtggatgatgattcgccattatccattcttctccaatcttcttccttctcttcgaagcttgctggagaagaagaggaacagtttggtcgccgcaattttatttgcaaggcgtatcggaaaagcccgcccgattcatacctgaaccgaaccgaaatttatatttatttatttatatattgcgatttaacgcctcattccatttcaacttttttataatatccttaaatttcaaaatttcgataaaggaaccctattcgcaattatgcaatctgttgttgtctttcttaagaggtctttaatctggatttcaatttgaatttttaggtcttttattttatattttcgttttatccaaaaatgatacccaaataaaaagtaaaatctaatatatatttatttcttttctgtaaaatctaatatataatggatggcttagtatattttttttttttttgaatttttagtatatatccttatttttaaaagaaactaggttatgaacccaaactacgcgtgagtctatttttaaaattttaataattttttgtgtgactaaaagcttttattgaaaattttgaaatatatgtttttatatgtctacttgtttatatgtttacttgttgttaatattataaactcctggaattttaaaattactatgacaaatagttacaatttaaatacataactaaaaataacttcaaatacaacttttaggttttacaacaattatcaaaagaacattttttggttcataactctctctttagctttagatatttaggataacgacgtctttttacgtatgaaataaattgttgtatggagaataacttcgacgactttcttattttggtacccgtaaatttactattgtttttcgtttatcttcactgcattggttagtctatatagaagtatattcataagcttatctacattttcttttttaatttagaacgagtaacgcatgcatacgtgttttggggaaaagtcgttttggtcttttgatttgaccatttactgtgtatttttgcggtaaattaatattatttaattactttgactaacattaattactaaaatgtgttctattgatcacaagaacaacgagatgtagtattttccagtggtgaagacgccggagataatgtttatccggtgaaaatgaaggtgtttattaacgaggtgcctgtcaaaattgtgaccgtatatttatttttctgaatttgaacttttagtatatatccttatttttaaaagaaatttgagtttgtttacgtttttttaatctaggatctaatttaatttcttgttgataaaaaaaactgaattcatttaaattatattaagggaccaattggttacaattatggttttggttgtagatattctagatgtagaaatattgactgtaaaagttatgaaagttaatttagatatttataagagttttattcgcgatatagttgtatctattatactattaaaaatctagacttctttattggtgaataatatgcattatgtgatatttaaaatcaagttatggtataatgacagatatcgaacaaattactaaactacacgttttgtaaaaattaaatttttaataaactttaaatagtgcaaaaaatatatactaattattttataaataaatattcaaattacttgtttagattttgagttggcaacaattactattatctgatttttatgtcataactcaaaagtaacaatgattattttcattaaaatgctatagatttctctctttattttggaacattaaactcattaataaaaacgggaaattctgtcaaatggccaatacataatatgtcatgtaataacaattggatgacttgtgtttaatttgaaagtaggtaaaacaactttggtaaaacgatatactgtatggattaaaatagagaatttaactattcgtttctataatacaatataaatcttgtaatacgatatgagtgtgttcttgttaggtttagactcactaaatcaagctcaaggtagattgctggccttaactggagaagcaagaaaccgcataagaaggcttacttgagacacacgaaaccatctaatgcttttgtgtgtttgatcttgtgacggaaacaggcggagtttcttgagaagatacctagtagaagcacattcgcacacaagtgaaaggcattgtattctcatctgtccacatggaaaccataaggatactacaaaatcaagaactttagcgaccagaaacgccgtggacaagcttatctacgagtggagaggttttaagcacaccattgactggaaacaaacggtaggctctttagaaatatttatctcccatgagacactatgagcttcaattcacttccccactccactctcctgactatgttattgcatccacaagattgagcttggattctggtactccgttttcgaaaataaagtttgttgagaaaagcaaaaccgattcaacaaaaacatatacagagcaagatatataaattactgagcagccctttttaaaaaaaagtttcatagacaaacaaaaacttatcatcattatcaatttatcatcatcatcatcatcaattcatcataatcatttgttggctttgagccattccagaatccgtttttcagattcactgagctctgcttctgtctttccctttatagatccttcaacaaactcaaagtagtctttataattcctcttgtaaaaactgtccaatctctgtttcattttcccaatatgaacgaaaaaaagatcataagaaaatttcctacaaaagacataaactatgtgcgttatggtatataaatgtcattctctttacctccttatcattcttggctttgttttcctcagtcttcttcaaatactctgaaacaattcttccccaaagaacgacatagtttaggcaaaagaaacattctaaatgtaaagaagaaaaacacaactaagaatttctaattactttggagaagctggtcgctgctggtcaaagcagcggcgatgaaagacgtggaggagaagagaatgtttctgcgtcctaaatcagcgggtggagcagttaaagaatggcgtttggtatcgtttctgcgtacagcttgaacattggaagaagcatatttgttaacagttactgttaaagccatgagaatgctttggcttatggagctcatctctctcttgaccagaagataagattcttgttttatgtctcttatctacattacagagaagaaacaaacatctttttatttattaacaaagagtccctaactatgtaatttacaagaacaaaccctcaaatctattaaaaatagattccaaacccagatagaaatttgtagagacaaaaccggtttaatagacaaatattctcaaagcgattctggttcggtcgggattttgactgtactcagtacttacatcttcttcatctgacgatagcaaaaatgacaagcaatccctaatttcgcctcaaaaaatcccaaaaagcttcgttcttttttagtcatcatcatcttcttcttttcttcttcttcggttgctaaatcgaagatggcgactgctctggtttctcctcttacttcacaactcaaccatgaagctgtctgttccaagtttgtgttacccaaatcgccgttcatgtcgggatctaagctcttttcatcgaacatgccttgctctactgttcctagacgcacaagaagatcacactgctttgcttctgctaaagatatgagctttgaccatatccctaaacaatttcgtggagacaatctcaaagacggaggttttcattttctctcatctttttttttcaccttctgatagatttgttctttgattctatttggtgttgaattgagtcacaaagctatgtatttgacctttgtttagcttaaaccaagtacctgataggccttagcgacccatttatctgcaatcatactaagtgtagcaaagcttgtttctttgggggtttaattccgtttgcagtacgtctatgttgtttatcatctgagtctaagtagcaaattaatgtgggcttttgccttcactaaagttttaacctggagttagtttcagacatactaatttcagtaaagtaacagtcttttgttcttgataagttgtcgctgtataatggaatggcgaaatatattagtttgattgctacaattcttaattggaactaaatttaagcttgaaagaacaaaattcgccaaataagcggttaaatttgaagaacgtgtttcctttaattctctaaatactatttgatctgacatactatattcctcgcctttgttatagtgatgcagaacttcaagaacgtaccacaatatttttacgggcttaattcagctcaaatggatatgttcatgacagaagatagccctgtccgtaggcaagcggaaaaagttacagaggttagtttttctcttctaagccttcttatctgtgcatttacaggtccagaatctggaaacagctaagaggagaacaaatttgcttctctactatatgattcttatctcgtcttttggcatgcttctttgttcaggaaagcatctcgtctagaaataactatttgaacaatggaggaatatggagtatgtccggtatgaatgcagcagatgctagaagatatagcatgagtgtccagatgtacagaggtggaggtggcggcggaggatctgaaagaccaagaactgctcctccagatttgccttctttgctattggatgctcgcatatgctaccttggcatgccagtaagaccttcatgtgtcgataacttgttactaaacccatttctttgctactgtgtttgctctctgcttagctattggatctagctcattttgcttcatttttacttgcagatcgtacctgcagttactgagttactcgttgctcaatttatgtggttagactatgataacccaacaaagcccatctacttatatataaattcacccgggacccaggtcagtagaagaagtttgattatatattgtttgttggtggtagttttctggatttatttagataacccacttgttacttttaacaagctatctattcttttgtttccttttgcttatgccatgtagaatgagaagatggaaactgttggatcagaaacagaggcttatgccatagccgatactatttctgtaagtgattttactgaaactatctacatttttcttctgattgtacaaacacgaagttccttttgctgatgtttgtcactgattattgtttcgatagatggtatgcaaataacctatgtagcagctttgattctcatcgcctcactgttttttatttttatgtggcgtattagtattgcaaatcagatgtatacactatcaattgtggcatggcttttggtcaagcagcaatgcttctttctctcgggaaaaaaggttatcgtgccgtacaaccacattcatcaagtatgtactcttctctaaaatatttgaactctaactttgcattttgatcataataaacaaatgcaatacctcttgcccacttgtgtaagcttctaagttttgatggttaatggtgcagcaaaattatatctgccaaaagtaaacagatcgagtggagctgccatagacatgtggataaaggtggtgctcacattcttatacccttctgtgtaattccctcaagtttctttacctctactgtaatgaataatcctctggcaggccaaggaacttgatgcaaataccgagtactacatcgagctgttagctaagggaacagggaaatccaaagagcagatcaacgaggacatcaagcgacctaaatatctccaagctcaagcagccattgactatggaattgcagacaagatagctgactcgcaggacagttctttcgagaaacgggtaactttcaaaattatacttttatattcacccaaaaccaagtgatctttttgttgacttcattcatgcttaaatggaaaatatatctgggtttaggattacgatgggacccttgcccagagagctatgagacctggaggaggcagtccagcagctccagccggactaagatgatcaattcccaccagaaagaaagaggttgaatcctaatttcctagtcactctggaatatgtagctcttacaatctataagcaaacacatgtggtagtaacatacaaaaaagtgttggcaaaaagggaaataacatcaaaagttatctaggtggaaagttatttgtattatacatgtatctctctagatgcaggtttctcacactctgaaaaaaccgagttttgggttttcgggattttcagaatgaagggaagaatcggttgaggttgtaaggcaatgcgtaaaattcttctgttcgagtatcagtgtggtagactctgaatttctcccaccaatgtcttccgctgtctctcctcaccgaggcatgtccatagctatgagtacagtccaacaagaacgctgccattatcccaaccgttgcagcggaagagaatatcacttgcattatcacgttgaactgtcgttggcaacaccaaatacgaatcaataaagaggacaagacaaaaagaaaatgattgtttctgtttctcttgaacacttacagcagaagtgcgagtgtggacaggtccacgaccagagatgaatagatattcggtgaagtattgcgccacagagagtccaatgaagatggagaagccgaggataaatttattcctaaagctgtttaagttgcagaactgaagaaggccaagtcccgcagaagctgttcataaggtcatctgcttaatctcaatcatatttatagaagctataaggatctgaaagagtttagtttttaagttatacataccaacataggcgaatagaacacagtacagagctgcaaagattggtaaaggtattgatgcaagaacagccccaaacttccctgtttgtcaccaagttttgcagtcgattacaaaaaaaaagaccaattgtcttggaatgacttcacggggttgagcattaccgaaaatggagaagaagatcatgaaacctgcagatatctgaaccactcttctgctcccaaccttcgttaatcctagaagccctgtattttctctacaaatgacaagaacaaacaaaaacagagtttaaaatccgaaaacgagttttcttgattaaagaaaactgcagagcagaaagagaatggttctattacaccaaagctgtggaaccagttgctgttccaaacagtccattcagcaaaacgcctatgccctgtttttattcaattcccacatagcacacacatcggattcacatactaacacacttgaaatcgaatcacaataacaatcaatccgttttacctgccatccaatgccacggctaagcaccgagggagggatatgagttgcactgccaaatcttgaagccgcgatgaaggaacctgtcgtctaatccattggaaaaaattcaacaagaaaaggtgatctatcaaaaagctaaatccttctgcaaaccaaaaatgtgaactgaaacagtagtaaacctcgacaatcgccacgtaagtagctgccatcattgcgaatgcatcacttccatggaaacttggacgtccccattgcaatggatatggaattctcaccctaagaatgaaggaattgtcaaaaatgctctgtgttcttactgaaacagaggagatccaatgaaagatggaagatgaccagaccatggagaagcactaatgagaccagaccggtctgttcgacaactgagctgtgtattgtccggtcttttgtcataagctccagctgctgtcagaatctctgcgtaagcccagacgatcgctattgtgaacagaacagcgaattgctcgcatattgatctcttacacttaaacaagtgaggaagatactgaaaacattacaaccattgtcagaaattcagagatgataaggttttatataaaatctcacgaaattaaccgaaacctgagataaaattatcagtatgatcaatgctgggagtccaatttctatacatctcgcaagctgcaacacaaagactatttaagctccctcaacaaacaaacaaaaaccctaaaaccaattcgatctttatggcagttaaatcttgaatcgtctacctgaggaaacgcaaaggcgaggaggccaacgccggtgagaatcacaagaggagcagccgaaagaggagaaagaaacctgaagtagttttaataaagcaaaagcaaaaccttaaagtcttagttacttcttccacaagtaataatatataatacaacacatgagctttttatctttttttctccggacctgaccaagattctccacaaaccgaagaaacccattatcatatgacttattgaagcaatgataagagctccttgaatagctctcatagtctcttcaaatctctgcatttaacacattcattaatttactgttttcgactaatttgaaactttaaatgttttcaaagaagaagacaatggattgtgtgactaacgagatgaggatggagatagtaagtgaatcgataagagaaagtgatgtaaagagcagggatgaggtaagcataagaagctcccatgaccacaggaagtcgacttccgaacaaactctgcaacaacgtgtttattcctgacacgaacaatactgtgtttatgacttccgctttctccacctgaagaaaaatgacgtcgtttcacatcaatttatttaatttagaaagagttttcttctcgtgaatttgagctattagatgagattagggttaatgcttacgtcgccaccacccattagagggacgagtatggaaggtatgattacagtagttccaagcattacaatgtaatgttgaaacccaagaactattccttccgctgcaccattaatcatataaaaccatatcattttctcaaacatatattgttgacaaatcaaagagaatttggtgacgatcgactaaataactcatatgaataatggaaacgcttcaactgaaatttttgttaaataatcacaaacgctttaaaaacgagttttgtagattaataagaaatacaaccctaatttaaactaaatcgtatagttcatcactatcggtgaaacataaattcattatcctaaagactaaacataattttactgctaatagaacacaactatataacaaaatctaaatgaaaagaaaaaagcatacgccaatttggagagctcgagacacaaaattcgactccgggaagctgatctttaactggaaatggtgcaaaatcatcggtctttgttgccatatctcactcgcttcgagaagggctactctctttgtgatgagagctgtaaattcaaactaaggctttgcttaaaacggattcaaaagtgctaagtaatcgttaggcgggcaactttgttgactctttcttgctttttttactttctgtcttgtgttctcgtgcacgtaattaacactaatgctatacgtagaaaaatgaaccggattaaaccactggtgtgacttaaccagaattgtccacttgtatattcatgtgaagaatatgatgtttaatattacaaagtctttataagtagcaaattattctcatcttaatgccaaaaaagtatacaactaactccatccaccacttaaacattctctttaaccaatatcaagaattataactaatgactaattggtatgacttattgttggcttaatgaaaataagataaaacaataggattatcagttaaaaaatccagaaagatttaaggaggtttattttgaaataaatttgatgaattattgttgctgacttgaattattatcaagtacatatttcatatcataaataattttgggctcatgagctaaaaatgttaatttggtaatttaataatttattttggatggaactaattgctaatgttttattttgactgtaatttgaaattatttggacaattattaatttaaacccaaatatgaaattagtttgtattataaaatcataaatatctaggtgaaattagagaaggttctttctttttactgaacatctgcagaaaataaacctagtaaaacaaatcaactaaaactatgttcaacgaacttttcttttttttacgaaatgatctttatatttcaaattttggagaaattcaaaaataaataaattataaaactttttaatgtgtttaaaacaagtgtatagatttggaaaactctcaaaatatcgcaactaccatgtccacaatttttttttaattagtggtacagtcaactagataattttcagaaaaaataaacaatagagaaaattctatggataaaatgaaaatagcatttttgaaaaaaaatatcacaactaccaccccaccacacatttctgaattatatctagcaacatatttgtattttatgttcaaaataccacttaatcatcaaatttttaatcaccaccaaaactttcaaacataaaccaaattgttcgtgtaaatatgatctgggtcactgcgtattagttttgataatatattttcttgacaatcatattaacacttcatttggggaatttgatattttctttatcattattaaaagttgaatttgtaaatatttagacaatttataatcttcagaatataataactagcgtaaacaaaaacgcgttttaaggccgtttgtaaaaaacgcgttttaaggccgtttgtgaaaaaacgcgtttaaagcttaattggtctaagcggtttgccgcatcagaattgacggaggtccgttactctgaatccttgtattcgcattaaccctaactttttctgcttcccaagcgtctcgaaatctgaatccagagattaaacaaaaattggtattgcgaatgatcgattcttcttcctctaaactctgattcctggtgaattcatctgtttcttctttctcgattgtgtatattctcagcatgagattaggcttcattctgaaagaacggatttttctagggtttgagtttcggcatctttcagtgatgtgaagttggtgtttgctattgcgtcttagtttctgaactattgctgcggtatagtttgataatctatgttagggtttcctcggaacagggaattagggttttactattctgtggtatttgatgatgaattgtgagctacaactgaagaaaaagtttacatttttatgtagaaactttagttctgattggtttcgtgacatttgatatgtattgttgcagaacggacttgctttgacacagcagaccgtaaatcgggatgggtgctcctaagcagaaatggactcaagaagaagagtcagctttaaagtctggagttataaagcatggacctggtaaatggcgcacaattctcaaagatcctgaatttagcggagtcttgtacctgcgttccaatgttgatcttaaggtcatgattacttcttatcctttttgtcagctttgataatgctactgtattttgtttgtgattttatctgactgggagatggtttgtttattgtattgggacaggacaaatggagaaacatgagtgtcatggcaaatggctggggatcgcgcgaaaagtctaggttagctgttaaaaggacgttctcccttcctaaacaggaagagaactcactagccctaaccaattctttgcaaagtgatgaagaaaatgtggatgcgacctctggactccaagtttcttctaatcctcctccaaggagacctaatgtaaggttagaaatgtgtctattttgtttcttgtattgaagaggagttgctttgttgtatctctctcgctggtatttctgaagttggattacatctcaaaatgtatggtttgccgtcactttttattctgtgcaagtcgataagtgttggattacattcatgtgatatgggtttgttttcacacctctgtttaagttgtcttcactggcttagtacatttctcctccttcttactattatcatgcgagccgtttgctcaatcctatcactgtggctttataattgtgaaattatgatgaggatttgtaaagtcccacttacacgtagatgtttgtatcactcaaatcttttattatagacaaattgtaacttttaaaaacgttgcaggttggatagccttataatggaagcaatagctaccctgaaagaacctggtggctgtaacaaaacaacaattggtgcctacattgaggtattctgttttcgttcttgcatcttttttttcttttctcatagacaatatgtattattaaattgttactctcagctaaatcgcatcgtgttacatttcaatttgaatgatcctcagtgggttgatatgttgtcaactagaacctgtgaagcattgcggatgaaaaccaaaatatagcctttggttgtgtcaatagaatatattcctcaatatcaatataggcaacggatgtggcagttttattgcaaggcaatgggtgacatctttatcttctcctctcctgaatagacgaatgtgcattgaatatcctgactgaaactaagctgaaagggctagaaatatttctgtaattacgagatttattgtggtggcatctacttaagtcgatataattatgagaatatcgtaagagtagattctgtagttaattcagaaacacgccaatgacataaatattttcgtctacttatgtgattcaagcatgggaaatattgagttcaacttgtacgattactgctttgaagattctttgtctaagttccttgtaaaagactgatttagaggactgactgtacccgtgttccttttttttttttgtgtaggatcaatatcatgctccaccagacttcaaacgcttgttgtctaccaagctaaagtacttgacatcttgcgggaaacttgtgaaggtaagaattcctacattcatttaatgcttttgagtgcatatatttttggtcttttgaatagtatgtatgactttttgtgcaaatcaatttagttcatggatgtcagtagaacagagacatatccattattcactgcaacttgcgaggtttattgatctgggctttctcttttacaggttaaacgtaagtacagaattccaaactccactcccttgtcttcccacaggagaaaaggtctgggggtgtttggaggaaaacagaggacttcttctttgccttcacctaaaacagacatagatgaagtgaattttcagacaaggtcacagattgatacagagatagccagaatgaagagtatgaacgtacatgaggcggcagcagttgcagcacaggcagtagcagaggcagaagctgccatggcagaggctgaggaagctgcaaaggaagcggaggcagcagaagccgaagcagaagcagctcaagctttcgctgaggaagcttcaaagacattgaaaggaagaaacatctgcaaaatggtaaaaaaaagaaaaaaacacccatattcttttatatcacaagacattatatctatgagagaactttgaaaatctcaaaatgcttttgttgaaaatgtgattcgacagatgatccgtgcctgaggtaatggaaagcgagagaagaaggagactaaatgtgaagagagagtagagagaagcctagtgtttgtgttgatcattctctttacttgggaagttgttttttagtagtaagcaatcaaatatgtttgtcagtatgtcgtcgctctgactcttttgattcctgcacaacttttgggaaaaaatgttttatttggctcttctcactctccaatatacatacaactatcgttagtaatgtgtataatttatagaccgatctatctatgcactatcatgcttatcgccaatgagcattttgattatgtatgtattatcaattaatagtagtactgtttttttaagatataaaagcacaatgactttgggacactatatggatcgttttcgggttcagaaaaggaattaaatccttttaaatcccctgtaaatcttttaaaaactcttgtaaatctattttctattaaaattattttttctggggaaaatgatcttttggaagaaaaaaaagtttggcgggaaaatttttgtcggatttttttggtcgaaaaattatcttcggaataattttgataggaaaaatcattattatattttttaaacctaaaatattttcaaataagagtaaaatgaccataaaaaatcaaaagatgggataaatgaaaataaattacaaaaaatgatagaattgaaaaggagtagtttgaaagggcattcctaacaatttctcccgattatatatgtagttgggattattaggtgattgacagatatatatataatcatccgaaatttgacatactaaaataatttgtaatcattgatattaaaaataaaaagaccatggtatttttactataattgtgattctgtaaagaaaataatactatgccactcacagtcactgcatagccaacataggattagaaccaaaccgagtcaatccaaaattgttcacggagcacggtaattacatcatggttaagctttaaccaaaaacatttcaggctgttactaaaccaaaattttaaaatcttgggttaaattttgggctgttaacgttaaacatttcacacattacaatcggtgacgtgtcaaaaaataaaattcaaaattctattctcgaaatgggcggcatttttgtttttccaaaattgaattttgttaaatagtctgttagaagacaatcatctacaagttcctctctgatctctctaatattttaaaacccctaaattctccatttcaaaaaatgtctgtaaattttgagaagcggtgcttttccggcgaccctgcttatgccaccagcgactagaatctagaaattgcgttctctcacgttattcgatttaatggtcagagattctcgaattctggattttagtcgagtgaattccgatgattacgagtctgtttttgatttgtgtttctctgctacttgattcgatttgctgttactatgtctcttgttacttaatttgtcttatcgttacgttaatcttcttgattttattagaaatcaaatgattttgtcatttcattgctttcaataccttctaactcctgatttgtttgatttgggtttgacagatcactagcgtctagcgatcgcgaaactgggggatcaagaggattatgatttgtgacgagaacaggactctttaaaggaagcgacagtggatgagaccgtggtggtggtgggtggccgccgtgaggtggattacggaggcggtgacggaggtttgtggttttcaatcgaatttattatgatttaattccaccgtctcaaatttcttgtgttcgtttttctctgcgaacccaataagtttgattttgaattttcgcgatctcatccgatcatttttgatctaatttgttgtgtctttggttgatagaagcttttagaaatcattttggttgtggaaaatcatattgttttcttatgtcattgccattcgaaattttaaaggtttgttgttttgattcatatgcatagttatactgaaacttgctaatagttttccaaatggtgataaaactttagaagacacttgtacattatttgtgttctcttcataagattcgtctaggtcgtaattcagataagtgaaagcatctttagtgttgacatactcatttattttgatctctgatatcttgtgctttcttttctcaaattttggtgtagggagcaattggcgactctatctcctttgcaaagagtttgatgttgtgtcacttttcttctgcaacaacaaattggagagccacagaattcttatgggttgttcgcaatcattcaaccaaatgcatacacatacatacatgcattcattcatacacacatacatgcattcattcatacacacatacatgcatacatgcagtcatttatacatacatacatacatacatacatacatacatacatacatacatacatacatacatacatacatacatacatacatacatgcctgcatacttacatacataaatgcatacataatttacattgcaaacatacatacatacatctacgcttatgtataatatgtatactttcgtacttttacacatctataatttcttctctgcttctttgagtcgttgtttacttacttgattccttaattctttgcctgattcttcgcttacttttttttttttttgtcaatccaagtttgctttactcattttacttcttcattacttgttctgttaccaacttcagaggtatgttgcttacttccttcagtccttgtgagcttgcttccttccttaattcttggtctgattctttgctttcttcattccttgtttaattaccaggttcagtggtttgtcgtttacttcctttgattccttgtttacttagtttttttttccttgcttcctcattagcttcttgcttcactgtgtacttgatttcttgcttacatggttaacttgattccttgcttacgtgcttaatttcttacatactttcttttccttaactacttgatttgcttaatttgttttcctcattttctatccttaacttgctttcttatttgctcatgaactgtctctgtttattaaatatttgctttgctttagatcgttctaggactattcaaagtccttcagagcaaccaatcagctaagttataactgtcttaacttgtcagaccaaataaactaagctagataaagtttatttgattatttcttatcattcaatttatagaacctttaagcagtgctagaagtttctggaaaaacttcatcttagagttaaacaatacattccgccaacaatgaactgtcacttgtaagttgtctaactcttaagactcaatgaacttcttttttgttttttttctgaaaactacaacaatcttttttgataacaggcaaattttatgtttgttgaaggtatggctgagacaagctcaagaatcattagaaaatgtactcatcgatctctataaggtaaataaactctaaccgataccattctcttgtttctctcagttattgttattagattgtagaattgacaaaattggattgaaattttgagcaaaaaggtggaagaactaaagagcaagttgagctcttaaagctaaactttggatgatatatcaagaagaagcattcaatggaaaaccagcaaagattgcgagatctcatggccgaaatttcaggtcacggtcgagaaggaaacctctaggatattggtaagactaatctcactagtctttagttttgatttgatttatgaattctcttgatcaattaactgatggatttgaatgtgatgttacaacagctgaagccgtgtatcggaaactcaagtgatagagccagatgcaaacaaggcttgtaaaaagttgccaaacataaagtgcattgtcgaagtcttactgaagtggctagaaggaatgaagaaaaaacttttcaaagcaaaggtttgcttctaatacctgttttgtaaacgcagtatgctcaagatgcatctttggtgcctcaaatttaaacttcatattttcgcgagtttatcttctcttaacatgcaaatgttgagctcctcctagtacattaactttattgcgtttatgcaaacatacatactagttgtgtatatatatattaatattttttccttttttcagagtcaggttggaattatatttgaggccaagaaaggtaaggcatattttgttagctttgcttacaatgttcaaagttgtctagattttggtatatttgttagcttacatctctcttgatttatctcagaccaagaaaggtaaggagaaaataaaaatgcaactggctctaacataagtagatcggaacattcaaaagaaacttcattaaagtacttttccaactcaattgacaaattctctcatagaagttctgagtgctcaagtactgatgttctttgtttatgtttccaggactagtaggtagaagatattttggataaggacgaggacgagggcaatgatggatactatatggatgtggagttgcatggccatagcaagggttcctctttttcaaaatctaatgcatcgttttaaggttggttgttatatataaattttggcataatcttggcttgctatgcgtttggatctatctatttgatcaatgttttggtaccatattacagattcaagtatattcagaaccagagtcttcttaaagtggatgagtgagacgatggaccactttgacacaaaacaagatcagctctttgaacaagtgaggtttgcaaatgagttagatgatgaacctctttcaacaagatttcgatgtggaaggaattttaatcattcgtgaaggatatatctgatgtaaattttgatgccagacacaacaaatactgtgagatctcatggcaagaaatttcaggtcacggtcgagaagaaaccactaggatcttggtaagagtaatctcactagtctttagttttgatcagatttctgaagtctcatgatcaatgaactaatggatttgaataaatgtggtgttacggcggaacgtcggatgggcttatatgcaactaagggtctatagagcagctaaagacgaagtcttactgaaattgctacaaggaaatggaataaccttttcaaagcaaaggtttgcttctaataactgttttataaacgcaatatgcccaatctttggtgcgttgaaatataaatgttgaatttctgcaactttaccttctctcaaacatacaaatgttgaattcctgctagtacattaactttcttgcgtttccccaaacatacatactagttgtaaacatatatatatatatatatatatatatatatatatatatatatattgagattcttgtccttctttcagagtcaggttggagatgcttataaccaaatttgggttgtgaagcctgaggaaaagatgaaactcctgaaaaatacgaaaggtttgcttacaatgttcaaagttggctagatttcagtatttgtgttaactcacatcttctctcggttcatctcagatcaaggaacgtaaggagaaaatatatgtagctggttctaacataaggagatcgcaacattcaaatgatatttcattaaaagtacctttccaactcagttgacaaatgctctcatagaagtatttgagtgcttaagccctgatgttctttatttatgattttcattattgatataggtggaaagtattttggatgggggcgaggacaacgatgggaaatatatgaatgcagtgtcgcatggccataacaagccttcctcaatttttaaatctaagaaatctaaggcatcgctttgaggttgattgttatatagtatacacattttggcattatcttcgtttggatctatctattcatatttttggtacatatgacagatccaagtatatcaaaaccagagtcttcttgaagtgaatgagtcgatgattaagcgctgacttaatgttataatacaaaacaacgtacgttagcactttgaaaaactgaggtttgcaattgagttagatgatgtggaaggacttctaatcatccgtgaaggaaatatctaatgtagatttggatgccaggaacaacaaagctagtagtttctctgtaaactaataaaggaagaacattactggaaatacaaggatcgaaatctattataattcttcattaattagcttttagggcttatatatataccaagatttaaacaaggtattctggtttgtatctaaatattttacttggtggtttcagttattcagggtttgagatattggcgtaatcttgcaaccagcttctgagccaagagggtcatgaattttctggcagaaggttaaacgactgaatactgcattttctgatcattcaatttctagaacctatgagcagtgccagaaagtttctggaagaacttcatcttggtgtaaaataagacgatccgccaaccacgaactcccacttgtaagttgtcattttaatgtaatttacagttactataccaaatcatataatatataattttcttaacttatcgtgaatgaatatacattcagatcaatggaactatgtttgtagaagggttattatcctgtacactctgtatcaaacattttatacaagctagaagcattgccagaagattctagaagaactcatcttcgagtattataagacaatcaaccatccacgaatttccacctgtaagttttcattttcttgatcccatgatttttcattatgcataggacaactttttaatcgtacgaacgacttggtaggtcatcttgtatatatttgcactgatggtacattatttcacgtgtatattgttttagattttgcacttaaagcactgcaattcgtagctaagagatgaaacataagagatgtagttctagagaaaagccaaaaattggatcaagaaacagacttgtggaaaaatatcaaatcttttgaatggtaattcgataagaacttattggggtctttgtttctcttgtgttcttaaatcagaaacacattatgtcgcttatctctcagacatcgttttgcttatttcaggtatactgcaacttcggacataattaacgtatatcgtttcttaggttgactcctttccctagtatgttactccaatcttttctgcaataatctttcggtttagctattatagtttccagtaactttatttttttgatattacctatatatacaagtatttcgtttcttctcttataacttgaagttatcatctctttcatttttatgcaggagccgatctcatagccaacaaactttgtgaattaaaagaagttatgtggtgagtaaaacaggtatagaccaattacattgacaatgttgtctttcccttgacagcgtgatatcccaaccattgcatgtatgcgcccactcatgtacacatgcatatattcatttttgcatacatagatacatacatatacacatacatacatacattcatacaggggcggacccagcaaaaaaagttggtgggggcaaaatgttatagggatgaatcgaacatgggtttctagcgaaaatttgaaggatatgaaaccatttggccatgccacttaatttgtttagtactaattttttgttaatttagatattagtggtggcaggtgcctccaccttccttaacgtggatccgccaatgcattcatacattcatacattcatacatacattcatagatacattcaaacattcaatcatacattcattcatacatacattcatagatacattcaaacattcaatcatacattcatttatacatacattcatacatacatacatacatacatacatacatacatacatacatacatacatacatacatacatacatacatacatacatacatacatacatacatacattcattcatgtatatttgcttcttagttcattgcttgtttctttatttacatcgttaacttattttacttgctctcttctttgtttcgtttgctttcatttgcttaactcggttgcttgtttaaattttacatacgtcctgctttgtttctttgatctttgcctactcaatcgcttcattcatttcttaacttgtttacgtctttcttttctcaacgttttaatttatttactaaccatggttattatttaaatcatgttatagtttataactatttaaaaaccatcagctttaattttaaaaagtaaatactactttttattgtggatgtattacgaatgtataaactcttgtattcaatttgaaatcaataaatgaatgagatgttatataaaaaaaaaaaactactctaatagctacttaaaatctagtgtaaattgataaaatttggaaatgacactagaaatggaagaattttatctctttacatttaatggaataaattgtcatcaatttaagtatttattactttaactttagtaaatgtgatgatagcattatcatatgttatattctaccgctttttgtaaggaccaatatataactacacatatttttatgatgaaacgatagtcgcttttgtattcacaagttattggaaaaagacataaaaaagattttttttttgttaaagagagtacattgttgaaagcattatatattttgttttgccctttttaatccgatttgtacccaaaataatatattaaaccgagttttatgcaatctgaaattattgaaaaataacgttttaaacaattacttcaaattgaatcggaaccgaaacttcaaccacatatcattagtccttacaatcatatcaccgcatcagtaactccggtgacacaacccaacacagtcaaagcgcggtcgtctcaactgccaacaacttcacctcaccctcatcaaaagctctctacgcgcatagcaagcatgacattcaccttcataacttgctatatataatgctatgttaaatatacacaaatttataaattcacgttttgtaatacgtccaaaaccgttgggacgacgttcaatgagtaaagcaaatcgaaacatagtccttcattcattaaaagaaatgtcattgatcatttaatgttcaaaaactagatacatcaaatatctttaatgtccatcatctatacatgcaatacacttgtctagaatcaagctatgtgctcttccttctctctgtacatgcagttcacttttgaagttgtgcttcaccctagcttttcggatagagttgccacgagatcttcctgagctttctctaaggcacttgagagattttcgggctttctttccaccacctcctccgccacagagcttagctatgggggcaataattttcctgcttgaactcctagggagactattccaggactaaatgcagcaactaaactaaccttgtctttctctggagatgaacctagtaccacaacgactggatcatccaatgtgcttatcaaatgctcagctgcactctttaatgagtcagcatcggtgtcatccatagactcgacgagcactccaaaggaattaaacattcacagtagttgacatattatagtgttagatcatgtgtcaattcatctgaacatcattatcatatcaagcattgtaagcaggaaacaatagattaccttatcgtctttgaagttcctacagtaaatgcgttgttcgatatgacagatgctttatagaccgctgcttttgaacgcaagtcggaggcttcttttctatcagcacgcagttcctctaaagattctccactctgtttgtaacttcctctgctttcacttttagattaaaaccaaacaacaataggtcgtcattagtaactactaccttgaaagcagcaaatgggtagcttgtttttttttccgcattcaaacatggaatggataagcagaataccttttattttcgtaaaacacatatcaatgggctttatagtttgggcctaactgttttatttatttattgcgctctgtatttattttgaaaattaggatgctgctatttgagagttcctcctaggtcaagcatatgaaaaggcagttatcatcaaaccaccggagaattc

SEQ ID NO: 1008 - DNA, 141753 bp, Arabidopsis thaliana
  modified_base (1)..(5): a, c, t, g, unknown or other
nnnnngaattccacaagttctttatctcgttgtcggttctcccgggaagcctcgcagcaatttgcgaccatctgatacaagataacaggggatttcagaaaatactctgtttcagaaacagagaataattgtaattgtgattgttacctgtttccaagaacagcatgaagctcgacaatgagattctgttcctctgaagagaaagctcctctctttaaatcaggtcttaagtaattgatccatctgagtctacagctctttccacatctctcgagacctatagaatcatacaactctggttctgtaaatgacttaaggaacaaaaacacaattttaggcctttttcggagaagagagagttttacctgcgagtttagggacagaactccagcaaccatggccatgtttggtaatgtaattgagaagtttctcatcttcttcaggagaccaaagaccttttctcagcttttgtttgtaacaacaagaatgtctcttcatgttgcaatgctgtggaaaagaacaatgaagaaaaactctggtttcttggtaatgtattgatgaaagagaaagattaatggattgtgaaaaaggttgagaaaatgaagtaagagatgtgcagagactaatacataaatagagaggctatggaaccgacgaaaaaaaagaaaaaggaaacaaagtcactttcataagaagacttttgttgaattttatggtttctttttctgtatttaactttcagagaaaagagacaatatgatgtgcttagctgggaccaaagactactcatgtataagtcatgagactcgtgtcttttctttttttcgagtgtgggtgtggaatctatagaaactaaatcttgttttcaatttcattatactttattcaattaggtttaaattttaactataggtgctattcgaaggtaactagtttgggtcattttgactaaacctatgagaaaatgaaaaatgcgttgtatattgattggacttctcgttttgacaacctttcatgtcacctaattgattgtagtcgactatgcaaatttttctcttttcgattgggtttagattactcataccgccctaagaaatcgactaaagagttgattttcgaaaaacttttatcgatacctatggctggtttgaggcttattagtttcaacgagacttgtgatgatggttaatgtttggaatgtttaaactttgaacttatgtttatttagttttgaagagatttatgatgataaaaacaatgatctatttcataaattataattctaaaaaatttcattcaaaagatttctctaaatttgattttttttttgaccgggcatgttaattaattagagtgagaaatatattgtacttgaacttgtaccttgagatggcggttgaaatacaattgtttcaaactttatttcttttggttataagttgtttatggattttttctttattcttcgttataatttttttttttcattttaaataattgagcatttgacgagggaatctcttgatgcaggaaccaccaagaagcatgaagtagctagacaatttatgttggttaatcggttaacaaaaaaattatgttggttaaaataaagatcgacaagacatatctcataatcaaacacaataaaaaaatagggctacttgattctattgtatgaaatcatgtaataacgaagctgcctttaaggtacttcggattaaaaattcatcaaatgattgaattatattggaaaatcatataattcattgaaaagactttcgaatcgaaattgcagacatacaagcttttaacgagtatcttttgcttatactattaaattaagtcgaacaacacgttattgaaaaaaatattatgctatatactaatattatttcctcccaaaaaaaatcatcatcctcttcatcaatcatatcataattagcatgacaatgatccgccgtaagccttccattatatgaagaaggtcggattttgaggtattgattttgattagattcgaatgatgcatgcaattataatatttttggtttatggagcaaaaactttgctttacttttttcactgttcaaaaggattcttataatgaacttcataactatttttctgagggtggaattatggtttctaacataaacctagatggtaatttgtggtgttatccatgttatatatatttgtactttaatattaggagatgataattaattattttggcttttcatttcgaatctcaattccttttgtattggttatgcaagtttgttttgcagctaccatgtaagtaaaaatgtcatacgaactttagtcaaaactacttttaaatttaagtctttgcaatttaactagttgtgtatataggaaaaaaaaacactacttaattgatactgtaaactgttttaataattgaagatatcaaaatattagtggatgttatattggccattttttttttatatccgcaaagtttggaaccaaactccgtagattttcataaaccaaagtgagtgaattcaccgcttcacaaatgaaacttaaactagagggctctaggatgaccctagtttatttgctactagaccgagcaacacttgatattgaactaaacttgataaaacagagattttgatacactcaacatatacttttatgttgagtgtatcaaaatctctgttttaagttggtgaagcgtgtacccgacagtttcatgtccacatagctcaacattgttgtatttattgatttatgtgggcgtttcaataatctgtgtaaatccaagatatcattgtcgtaaaaaaaggcgagggtcagatttgtatagcgacactccccgtgaaacagttgtgcaattttacatgtttacatagaattccaagtatttaaagaccaaccctttggccgatatatgtataattgtacataactaaattctataaaacgtagacgataaaatcataatgtggattttatgcatgtcgttaaatggtatggtgttatttaacttgttcatatatgtttttttattaacgagtttacttgataaatgttattcacttatttcacgtaatattacggttattatacaagtttaacaatcacatggaaatatgtactatttacgattttttcatcgcattttttgtcaaacaaaaaggtagaattaagttataaaaaagccctacatatcaaaaagttatattgctgaagacgaacgaatagttgccatgcttaacatgcattgcattggaatggtcaaatagagatgctatgaatatatgagctgtcctctcaagtcaattgttcaataactcgttatattatatgtaatttataagctaatcatcactgtccttttcgtttgtctttgtcataagattgacagaaccaataaaatctgaggacgattaaattaatatataaagaaactagagatttaatattttgaactgaataaaagttatatagattacatgaaggatcgttgtcattatcactaccacaaaactttaacatcattcaccgacaaatggaaaacattaagctgttcacttaattaacacgcatctcatatattatttccctcgtatatattaaactttatagatgagatttaatttctttcaactacctatgcaaaatttattttatttgatgttttgtgacaattatattaatctttgataattagttttggttaaacttttttttttattatccatttttgtcaaccacgtaattaaattaaaaaaatatatcttaatagattatctaatatgaaagaaccgagtttacgaaatttcatttttaaattagttttgactaatgggtctctaagttattacacccgactaaatatgtggagtcgataagtgatagcaagttagatttacttgttctaagctaaactaacaaatatagataagttaagtagattaaaacttacataattgaatatttacatgtttggaaaaaaaacttgagtaaaagaaaaaaaacttgataaaaatcactaaaaattatgtttacacttgagttaaaagcaaacattttatctacataagatgatactaatacaaactaatggcctatatatatttgtaatccatgaaatttaattttatttttgtaacagacattatgattgtaacattttaatttctttgcccaaaaacaaaacattttatttttaagttattcgacttcttatttgtgttcatcccatttttttgtttccaaccgatgaacaacggaaggttgcgtcaaaacgcaaagggttgtgttgtttgtgttgaagtggagctccttcattttaggaacaagcagaggacgttacacaatcaaactcagtttcttcccttatttaacgtaaccactaattctattttcttgttcttttacaaagttcataaatggaaatgaacacgtaagaagaaataaaacaaagttcaaaactaagaaacagaaaaacaaaaaaaaacataaaaaaacatataaaaaaaacataaaattacagaagaaaaaaatgggtagcttccttgaggttctttgtgcaatcttcatacctcctgttggtgtgttcctcagatatggccttggggtaaatttttttcattcataaatcataaaaatatatgacacatttgacattaatggtcaaagtaagatcaaatctcttgtttttttgtttctttgtatatgtgtttgcagttggagttttgggtctgtttgcttctaacgttattcgcttttatccccggactgatatatgccatctacgttctcaccaagtaggaataaccaatcaaaaacactggatcctttttttattttataactttttctttttccaacaatgtttgcttttttagattttttatgttgtatttaaggaatcagttttgtaatctagcaaactttttgctatgttagatgtatgtaaattccagcagtttccaaattgctgttgttctagtttgcagaggttatggatacattttacggatcataaacagatttggaagattgatgatattattatatgcgtgatataaattttgaattgtagtaatactacatctaaagagtgatcaaattattagtaccattaggaactataaagttctgatagagatattacatggagtcatcgatacacacagtttacttatgcgtataacgataaatataaacctgtgtacatacatttataattttatatagcttctgcaattccgatttgaagattgcttgaatcgaataccgtgtggtataggctcccatgaagacgttcccaataatccctgcatatacaaattctttacctcaaagtggtaagcaaaaaatgtaaacaaaatctattgaaatcgtcccatcttaccaaagaggatcaattggtatagtcaatgctctcccataatgaaaaaaattatgagctacttggttacaacaacgattcgaatgagaaaaatattattttctaaccttaaatatccaagatatcggtgtaaattccgataatagatgcgtctattaatccattgttaatgctgtcaattaaggttttttgcaatcccctctaactctctaagtgtacctcggtgaaacctcgaatctactttacactaacttttaattagttcgtactaattaacgaaaaaaaaaccttttaattaattcagaaagacagaaaccaactccttgaaaaaacaaattgtttttccgagccacgtgtatcacttggatccgacgattattgtgtccggcccattaagatagttaacacttattgggcttccaaatatcagctaattagacacgtggatctgattctcttctccgtcttcttccgacaagctcgacggcgacacagccaaagaaactacgcatcaccggtaacgacagagattgcttttgcttctggtatttatgtaccaattctgctctcttttttactgcttagatcttaacccatatagagttattatatctgttgctcgtttttgaagttgcccttatactgctcgatgaaatgcctcagtgaatatcttaatcacaaaaccgaatagtttcgtttctcttatacttaaattaatttggtgttgttattacagagagaaatggcgttaaggcagaagttaggatggtcagaaggagatctgatgagatcagatgctaagccatgttcaagactgatgaaacaaacagctgccattttcactgttggtggagctcttggtttctgggttctttgcagacttcactatggtaaacaaagttctctcctttctaatcagtgatttgcgtttccatcaaaaggttgttctccatatagctattgaatccagtgctctgcataattgattgttagaaagatttcttgtagccttatgaaaacataccaatgcgtattaccattctgttttctgttctgtagtatccgtttcttatgagaaaaatgaatccaaaaggagctttgattgaatagtttgatgtggtgaaagattggatctttacacgttttgggaagcaatacacttgttctttgattcctattgtcatgaaaaatgattcttggggttggtttgttgtttatgtggttttaagagtaaaaggaacgtagaatagaatagttgagtcaattctaagatagaacggttataaaagcaaatgttttctttgggaaatgtgtaggtccaaggatcacagtgccaaggagtctgcggtgggctgggtgtggtgctttgtccgtaagcacatcaactgcaatgcttgtccgtctcttcagccctgaatgtgaaccacaaaacattgctgcatatgataacatcaaaacccctcaagcttcactcccttaaaccccatcataatctggctttacctatgatgtgtatggacctcatcttctgtacattttcttgcagtacatgaatttaggtaactatttataatactaccaaattctgtcactttttgtttcctttagaaattatggtgtattttttcatatagcctttaggttgatagagttaagagtatcatcctatgctcctctctcattttcgtgtgtgtttgattatgagtgtagtgtaattggccattggtcacactcttttgggagagtgtttagctttctaaagcttttgctgtcgaagggaagacctttggatttatttggagggttgggtctcactatcccctcaaactagtcataggtggaatatccacaccgaggttgtgacttcatggagatgcctgctagttaaatatgtgtaggaatatgtttgatcaccaacaaacctaatgctaccatttctcgagcataattaattaattaattataatcgacatcaatgtgttttgaatgtgagtaaagagctaggatttcagtgatattgtcatatagacacagcatataagcctgtggtattataatgtcatggagaacataacttaatcaagtgaattctgcaagctatggaggccaaagatctagctttttggaacggaggttgtttctttgcatttcgaatgaaaacaatagttgaagcagaacatccttaggtcaatagtttgaatccggtagggtcagatcttattttctaaagcttgtttcattccattttcagtgttctttgacaagagtattacaacaaaatcgttatcaaaagagaactcaataagagaaatgcatacatgtcaagttttttttttttggtaaaaggttaagttacgttacatgccaagtttgttatagggaatgagtggaaatgtcagaggttactttcactatacttgacaccttatgatgtttgaaccattgactaggcagactacaaaaccaaaagatccatccacatgtggtttttgcacagttcttggcgcaaagaaacaacctcctgtctaccaactgagcgaaggtcgaactgtactattgcatttgatacatgtgtaaaattataacaatatatgaacacaatgattttgcagtactttagaatatacagagtgattcctctttaagaaattgtaaacaaagttagaaattagaatgcatatcaacaatatatgcaaacatgcttcttggaaaaatctggtagatattcgaaagtgatggctacaactcgaacggtttaaatatcctccggtgcccaaggcctaccagttgataacaccacgtttaaggcgtcaatcacctcccaaatggtcgatgattgttaatattcttggaaaattaaagccatgaaaatcgtgcaacaaagtgggaaagggtatttcactacacttgaatgaacattgacaacttataggcacaacccacaagctattgaatagaattattcatacacattcttttttcattgcaaaactcaataactataggttgggttgatcaaagaaaattagaaaactcattgttttaagtaatttcaaatattttcttatcgcatcaatattgaaaaagctaaaattacggaacatctacaacttcgagcaaaacttttcgtgcaacaaagtgggaaaaggtatttcaccacccttgtatgaacgttgacaacttataggcacaacccacaagcatttgaatataattatgcatacattttttgttctttttaaaactctaaaactaaatgtttgtttgaccaaagaaaattagaaaactcatagtttttagtcacttttaaatcatttttcatcgtatcaatattgaaaaaagctaaacatacggatcgtttaagaattcgagcaaaacttttcggtatgtttaattgtcgaccaccatataaccgtttattataaaatttaaaaaccttaatgtcacaacgaaagaaaaataaaaagatctcgtgtgggagcaaattccgacctaccggattcgaaccagtgacctaaggataatctgcgtctactacagtcctccgctctaccaactgagctaaggtcggattgtattctatttcatgcatgtgtactgatctaaatattctatcaacacaatgatttgtattaagttagcatactcatagtgagtctctattacaaatttgtaaacaaagtttgaatttataaaaacattatattagaaaaacacttaatatcttgcctaaagctcgtaaatatacgaaaatgagggtttacccttaaacggtttaaaatacagtgaaaattacttcgagatttcccactcatttctgataatacaatcaatagctatgcaattctcttaaaccaatttctcatagaaaaacgagtttgtagttatactcttgtctaagcactttgaaacgaaatggaaaaaaaaaactttcaattttaatgatccgacctaccgaattcgaaccagtgacctaaggattatctgcgtcaactacagtcctccgctataccaacagagctaaggtcggttttgtattataacactttatgcatgttgatgattcgagagaaactttttaatcaaatttaaacttatcaagaagaggagtagaaagaaagttgacttcatatctttcatgctatcttgttttttaaagttttttttatcaatactaaattttactgaaaacagtaacatgatggaaaactgttcaaattctaaaacgatccataaaacacaataagtaattttaaaaacttaccaacactcaaaataaaaacgtaaacggcatgattcgaacctgcgcgggcaaagcccacatgatttctagttatgcccgataacaccactccggcatgtccactttttctctaaactaaacttttatttcaaaatagactaaaccgtataccattctctatcctaaattttgatcatgagtgagaagtagaagattacaaggatgacccagtttatgaacaaaataaaaaagattagaaccataaacctatttggctgtcttgattttttagaatttttataatattttctcaattcaaaaataaattatttctaaagagcaactttgatgatatatttatgcatgtaatattgagattgtgctatgattgtttatattcttgaaaataaagccaaacaaatcgtgcaacagagtgggaaagggtatttcactacccttgtatgaacgttgacaacttataggcacaacccacaagcatttgaacataattatgcacacattttttgttctttttaaaactttaaaactaaatgtttgtttgaccaaagaaaattagaaaactcatagtttttactcacttttaaatcatttctcatcgtatcaatattgaaaaaagctaaacatacggatcatttaagaatacgagcaaaacttttcggtatgttgaattgtcgaccaccatataaccgtttattataaaattcaaacaccttaatgtcacaacaaaagaaaaataaaaagctctcatgtgggagcaaattccgacctaccggattcgaaccagtgacctaaggataatctgcgtctactacagtcctccgctctaccaactgagctaaggtcggattgtattctatttcatgcatgtgtactgatctaaatattctatcaacacaatgatttgtattaagttagcatagtcatagtgagtctctattacaaatttgtaaacaaagtttgaatttattaaaacattatatttgaaaaacacttaatatcttgcctaaagctcgtaaatatacgaaaatgagggtttactcttaaacggtttaaaatacagtgaaaattacttagagatttcccactcatttctgataatacaatcaatagctatgcaattctcttaaaccaatttctcatagaaaaacgagtttgtagttatactcttgtctaagcactttgaaacgaaatggaaaaaaaaaaactttcaattttaatgatccgacctaccggattcgaaccagtgacctaaggattatctgcttcaactacagtcctccgctctaccaactgagctaaggtcggttttgtattataacactttatgcatgttgatgattcaagagaagctttttaatcaaatttaaacttatcaagaagaggagtagaaagaaagttgacttcatatctttcatgctatcttgtttttttaaggtttttttatcaatactaaattttactgaaaacggtaacatgatggaaaaccgttcaaattcaaaaacgatccataaaacacaataagttattttaaaaacttaccaacactcaaaataaaaacgtaaacggcaagattcaaacgtgcgcgggcaaagcctccatgatttctagtcattcccgataaccactccggcacgtccactttttctctaaactaaacttttatttcaaaatagactaaaccgtataccattctctatcctaaattttgatcatgagtgagaagtagaaaattacaaggatgacgcagtttatgaacaaaataaaaaagattagaaccataaacctatttggctgtcttgattgttttgaatttttataatattttctcatatcaaaaaataaattatttctaaagagcaactttgatgatatatttatgcatgtaatattgagattgcgctataattgtttatattcttgaaaataaagccaaacaaatcgtgcaacagagtgggaaaggttatttcactacccttgtatgaacgttgacaacttataggcacaacccacaagcatttgaatataattatgcatacattttttgttctttttaaaactctaaaactaaatgtttgtttgaccaaagaaaattagaaaactcatagtttttagtcacttttaaatcatttttcatcgtatcaatattgaaaaaagctaaacatacggatcgtttaagaattcgagcaaaacttttcggtatgtttaattgtcgaccaccatataaccgtttattataaaatttaaaaaccttaatgtcacaacgaaagaaaaataaaaagatctcgtgtgggagcaaattccgacctaccggattcgaaccagtgacctaaggataatctgcgtctactacagtcctccgctctaccaactgagctaaggtcggattgtattctatttcatgcatgtgtactgatctaaatattctatcaacacaatgatttgtattaagttagcatactcatagtgagtctctattacaaatttgtaaacaaagtttgaatttataaaaacattatattagaaaaacacttaatatcttgcctaaagctcgtaaatatacgaaaatgagggtttacccttaaacggtttaaaatacagtgaaaattacttcgagatttcccactcatttctgataatacaatcaatagctatgcaattctcttaaaccaatttctcatagaaaaacgagtttgtagttatactcttgtctaagcactttgaaacgaaatggaaaaaaaaaaactttcaattttaatgatccgacctaccgaattcgaaccagtgacctaaggatgcgtcaactacagtcctccgctataccaacagagctaaggtcggttttgtattataacactttatgcatgttgatgattcgagagaaactttttaatcaaatttaaacttatcaagaagaggagtagaaagaaagttgacttcatatctttcatgctatcttgttttttaaagttttttttatcaatactaaattttactgaaaacagtaacatgatggaaaactgttcaaattctaaaacgatccataaaacacaataagtaattttaaaaacttaccaacactcaaaataaaaacgtaaacggcatgattcgaacctgcgcgggcaaagcccacatgatttctagttatgcccgataacaccactccggcatgtccactttttctctaaactaaacttttatttcaaaatagactaaaccgtataccattctctatcctaaattttgatcatgagtgagaagtagaagattacaaggatgacccagtttatgaacaaaataaaaaagattagaaccataaacctatttggctgtcttgattttttagaatttttataatattttctcaattcaaaaataaattatttctaaagagcaactttgatgatatatttatgcatgtaatattgagattgtgctatgattgtttatattcttgaaaataaagccaaacaaatcgtgcaacagagtgggaaagggtatttcactacccttgtatgaacgttgacaacttataggcacaacccacaagcatttgaacataattatgcacacattttttgttctttttaaaactttaaaactaaatgtttgtttgaccaaagaaaattagaaaactcatagtttttactcacttttaaatcatttctcatcgtatcaatattgaaaaaagctaaacatacggatcatttaagaatacgagcaaaacttttcggtatgttgaattgtcgaccaccatataaccgtttattataaaattcaaacaccttaatgtcacaacaaaagaaaaataaaaagctctcatgtgggagcaaattccgacctaccggattcgaaccagtgacctaaggataatctgcgtctactacagtcctccgctctaccaactgagctaaggtcggattgtattctatttcatgcatgtgtactgatctaaatattctatcaacacaatgatttgtattaagttagcatagtcatagtgagtctctattacaaatttgtaaacaaagtttgaatttattaaaacattatatttgaaaaacacttaatatcttgcctaaagctcgtaaatatacgaaaatgagggtttactcttaaacggtttaaaatacagtgaaaattacttagagatttcccactcatttctgataatacaatcaatagctatgcaattctcttaaaccaatttctcatagaaaaacgagtttgtagttatactcttgtctaagcactttgaaacgaaatggaaaaaaaaaaactttcaattttaatgatccgacctaccggattcgaaccagtgacctaaggattatctgcttcaactacagtcctccgctctaccaactgagctaaggtcggttttgtattataacactttatgcatgttgatgattcaagagaagctttttaatcaaatttaaacttatcaagaagaggagtagaaagaaagttgacttcatatctttcatgctatcttgtttttttaaggtttttttatcaatactaaattttactgaaaacggtaacatgatggaaaaccgttcaaattcaaaaacgatccataaaacacaataagttattttaaaaacttaccaacactcaaaataaaaacgtaaacggcaagattcaaacgtgcgcgggcaaagcctccatgatttctagtcattcccgataaccactccggcacgtccactttttctctaaactaaacttttatttcaaaatagactaaaccgtataccattctctatcctaaattttgatcatgagtgagaagtagaaaattacaaggatgacgcagtttatgaacaaaataaaaaagattagaaccataaacctatttggctgtcttgattgttttgaatttttataatattttctcatatcaaaaaataaattatttctaaagagcaactttgatgatatatttatgcatgtaatattgagattgcgctataattgtttatattcttgaaaataaagccaaacaaatcgtgcaacagagtgggaaaggttatttcactacccttgtatgaacgttgacaacttataggcacaacccacaagcatttgaatataattatgcatataaccgtttattataaaattcaaacaccttaatgtcacaacaaaagaaaaataaaaagctctcatgtgggagcaaattccgacctaccggattcgaacctatgacctaaggataatctgcgtcttctactgtcctccgctctaccaactgagctaaggtcggattgtattctatttcatgcatgtgtactgatcaaaatattctatcagcacaatgatttgtattaagttagcatactcatagtgagtctctattaaaaatttgaaaacaaagtttgaatttataaaaacattatattagaaaaactcataatatcttgcctaaatctcgtaaatatacgaaaatgagggtttactcttgaacggtttaaaatacagtgaaaattccttcgagatttcccactcatttctgataatacagtcaatagctatgcaattctcttaaacaatttctcatagaaaaacgagtttgtagttatactcttctctaaactctttgaaacgaaatgaaaaaaaaaatctttaaacttttatgatccgacctaccggattcgaaccaatgacctaaggattatctgcgtcaactacagtcctccgctctaccaactgagctaaggtcggttttgtattataacactttatgcatgttgatgattcaaaaaaagctttttaatcaaatttaaacttatcaagaagaggaatagaaaaaaagttgacttcatatctttcatgctgtcttgttttttaaaagttttttatcaatactaaattttactgaaaacggtaacatgatggaaaaccgttcaaattgaaaaacgatccataaaacacaataagttattttaaaaacttaccaacactcaaaataaaaacgtaaacggcaagattcaaacctgcgcgggcaaagcccccatgatttctagtcattcccgataaccactccggcacgtccactttttctctaaactaaacttttatttcaaaatagactaaaccgtataccattctgtatcctaaattttgatcatgagtgagaagtagaagattccaaggatgaaatagtttatgaacacaataaaaaagattagaaccataaacctatttggctgtcttgatttttttgaatttttataatattttctcaattcaaaaaataaattatttctaaagagcaactttgatgatatatttatgcatgtaatattgagagtgtgctatgattgtttatattcttgaaaataaagccaaacaaatcgtgcaacaaagttggaaaaggtatttcaccacccttgtatgaacgttgacaacttataggcacaacccacaagcatttgaatataattatgcatacattttttgttctttttaaaactctaaaactaaatgtttgtttgaccaaagaaaattagaaaactcatagtttttagtcacttttaaatcatttttcatcgtatcaatattgaaaaaagctaaacatacggatcgtttaagaattcgagcaaaacttttcggtatgtttaattgtcgaccaccatataaccgtttattataaaatttaaaaaccttaatgtcacaacgaaagaaaaataaaaagctctcatgtgggagcaaattccgacctaccggattcgaaccagtgacctaaggataatctgcgtctactacagtcctccgctctaccaactgagctaaggtcggattgtattctatttcatgcatgtgtactgatctaaatattctatcagcaaaatgatttgtattaagttagcatactcatagtgagtctctattacaaatttgtaaacaaagtttgaatttataaaaacattatattagaaaaacacttaatatcttgcctaaatctcgtaaatatacgaaaatgagggtttacccttaaacggtttaaattacagtgaaaattacttagagatttcccactcatttctgataatacgatcaatagctatgcaattctcttaaaccaatttctcatagaaaaagagtttgtagttatactcttgtctaagcactttgaaacgaaatggaaaaaaaaaactttcaattttaatgatccgacctaccaaattcgaaccagtgacctaaggattatctgcgtcaactacagtcctccgctctaccaactgagctaaggttggttttgtattataacactttatgcatgttgatgattcaagagaagctttttaatcaaatttaaacttatgaagaggagtagaaagaaagttgacttcatatctttcatgctatcttgtttttttaaggttttttatcaatactaaagtttactgaaaacggtaacatgatggaaaactgttcaaattcaaagacaatacataaaacacaataagtaattttaagaacttaccaacactcaaaataaaaacgtgaacggcaggattcgaacctgcgcgggcaaagcccacatgatttctagtcatgcccgataaccactccggcacgtccactttttctctaaactaaacttttatttcaaaatagactaaaccgtataccattctttatcctaaattttgatcatgagtgagaagtagaagattccaaggataaaatagtttatgaacacaataaaaaagattagaaccataaacctatttggctgtcttgattttttagaatttttataatattttctcaattcaaaaaataaattatttctaaagagcaactttgatgatatatttatgcatgtaatattgagattgtgctatgattgtttatattcttgaaaataaagccaaacaaatcgtgcaacagagtgggaaaaggtatttcactacccttgtatgaacgttgacaacttataggcacaacccacaagcatttgaatataattatgcatataaccgtttattataaaattcaaacaccttaatgtcacaacaaaagaaaaataaaaagctctcatgtgggagcaaattccgacctaccggattcgaacctgtgacctaaggataatctgcgtcttctactgtcctccgctctaccaactgagctaaggtcggattgtattctatttcatgcatgtgtactgatcaaaatattctatcaacacaatgatttgtattaagttagcatactcatagtgagtctctattaaaaatttgaaaacaaagtttgaatttataaaaacattatattagaaaaactcataatatcttgcctaaatctcgtaaatatacgaaaatgagggtttactcttgaacggtttaaaatacagtgaaaattccttcgagatttcccactcatttctgataatacagtcaatagctatgcaattctcttaaacaatttctcatagaaaaacgagtttgtagttatactcttctctaaactctttgaaacgaaatgaaaaaaaaaatctttaaacttttatgatccgacctaccggattcgaaccaatgacctaaggattatctgcgtcaactacagtcctccgctctaccaactgagctaaggtcggttttgtattataacactttatgcatgttgatgattcaaaaaaagctttttaatcaaatttaaacttatcaagaagaggaatagaaaaaaagttgacttcatatctttcatgctgtcttgttttttaaaagttttttatcaatactaaattttactgaaaacggtaacatgatggaaaaccgttcaaattgaaaaacgatccataaaacacaataagttattttaaaaacttaccaacactcaaaataaaaacgtaaacggcaagattcaaacctgcgcgggcaaagcccccatgatttctagtcattcccgataaccactccggcacgtccactttttctctaaactaaacttttatttcaaaatagactaaaccgtataccattctctatcctaaattttgatcatgagtgagaagtagaagattccaaggatgaaatagtttatgaacacaataaaaaagattagaaccataaacctatttggctgtcttgatttttttgaatttttataatattttctcaattcaaaaaataaattatttctaaagagcaactttgatgatatatttatgcatgtaatattgagagtgtgctatgattgtttatattcttgaaaataaagccaaacaaatcgtgcaacaaagttggaaaaggtatttcaccacccttgtatgaacgttgacaacttataggcacaacccacaagcatttgaatataattatgcatacattttttgttctttttaaaactctaaaactaaatgtttgtttgaccaaagaaaattagaaaactcatagtttttagtcacttttaaatcatttttcatcgtatcaatattgaaaaaagctaaacatacggatcgtttaagaattcgagcaaaacttttcggtatgtttaattgtcgaccaccatataaccgtttattataaaatttaaaaaccttaatgtcacaacgaaagaaaaataaaaagctctcatgtgggagcaaattccgacctaccggattcgaaccagtgacctaaggataatctgcgtctactacagtcctccgctctaccaactgagctaaggtcggattgtattctatttcatgcatgtgtactgatctaaatattctatcagcaaaatgatttgtattaagttagcatactcatagtgagtctctattacaaatttgtaaacaaagtttgaatttataaaaacattatattagaaaaacacttaatatcttgcctaaatctcgtaaatatacgaaaatgagggtttacccttaaacggtttaaattacagtgaaaattacttagagatttcccactcatttctgataatacgatcaatagctatgcaattctcttaaaccaatttctcatagaaaaagagtttgtagttatactcttgtctaagcactttgaaacgaaatggaaaaaaaaaactttcaattttaatgatccgacctaccaaattcgaaccagtgacctaaggattatctgcgtcaactacagtcctccgctctaccaactgagctaaggttggttttgtattataacactttatgcatgttgatgattcaagagaagctttttaatcaaatttaaacttatgaagaggagtagaaagaaagttgacttcatatctttcatgctatcttgtttttttaaggttttttatcaatactaaagtttactgaaaacggtaacatgatggaaaactgttcaaattcaaagacaatacataaaacacaataagtaattttaagaacttaccaacactcaaaataaaaacgtgaacggcaggattcgaacctgcgcgggcaaagcccacatgatttctagtcatgcccgataaccactccggcacgtccactttttctctaaactaaacttttatttcaaaatagactaaaccgtataccattctttatcctaaattttgatcatgagtgagaagtagaagattccaaggataaaatagtttatgaacacaataaaaaagattagaaccataaacctatttggctgtcttgattttttagaatttttataatattttctcaattcaaaaaataaattatttctaaagagcaactttgatgatatatttatgcatgtaatattgagattgtgctatgattgtttatattcttgaaaataaagccaaacaaatcgtgcaacagagtgggaaaaggtatttcactacccttgtatgaacgttgacaacttataggcacaacccacaagcatttgaatataattatgcatataaccgtttattataaaattcaaacaccttaatgtcacaacaaaagaaaaataaaaagctctcatgtgggagcaaattccgacctaccggattcgaacctgtgacctaaggataatctgcgtcttctactgtcctccgctctaccaactgagctaaggtcggattgtattctatttcatgcatgtgtactgatcaaaatattctatcaacacaatgatttgtattaagttagcatactcatagtgagtctctattaaaaatttgaaaacaaagtttgaatttataaaaacattatattagaaaaactcataatatcttgcctaaatctcgtaaatatacgaaaatgagggtttactcttgaacggtttaaaatacagtgaaaattccttcgagatttcccactcatttctgataatacagtcaatagctatgcaattctcttaaacaatttctcatagaaaaacgagtttgtagttatactcttctctaaactctttgaaacgaaatgaaaaaaaaaatctttaaacttttatgatccgacctaccggattcgaaccaatgacctaaggattatctgcgtcaactacagtcctccgctctaccaactgagctaaggtcggttttgtattataacactttatgcatgttgatgattcaaaaaaagctttttaatcaaatttaaacttatcaagaagaggaatagaaaaaaagttgacttcatatctttcatgctgtcttgttttttaaaagttttttatcaatactaaattttactgaaaacggtaacatgatggaaaaccgttcaaattgaaaaacgatccataaaacacaataagttattttaaaaacttaccaacactcaaaataaaaacgtaaacggcaagattcaaacctgcgcgggcaaagcccccatgatttctagtcattcccgataaccactccggcacgtccactttttctctaaactaaacttttatttcaaaatagactaaaccgtataccattctctatcctaaattttgatcatgagtgagaagtagaagattccaaggatgaaatagtttatgaacacaataaaaaagattagaaccataaacctatttggctgtcttgatttttttgaatttttataatattttctcaattcaaaaaataaattatttctaaagagcaactttgatgatatatttatgcatgtaatattgagagtgtgctatgattgtttatattcttgaaaataaagccaaacaaatcgtgcaacaaagttggaaaaggtatttcaccaccctcgtatgaacgttgacaacttataggcacaacccacaagcatttgaatataattatgcatacattttttgttctttttaaaactctaaaactaaatgtttgtttgaccaaagaaaattagaaaactcatagtttttagtcacttttaaatcatttttcatcgtatcaatattgaaaaaagctaaacatacggatcgtttaagaattcgagcaaaacttttcggtatgtttaattgtcgaccaccatataaccgtttattataaaatttaaaaaccttaatgtcacaacaaaagaaaaataaaaagctctcatgtgggagcaaattccgacctaccggattcgaaccagtgacctaaggataatctgcgtctactacagtcctccgctctaccaactgagctaaggtcggattgtattatatttcatgcatgtgtactgatctaaatattctatcagcaaaatgatttgtattaagttagcatactcatagtgagtctctattacaaatttgtaaacaaagtttgaatttataaaaacattatattagaaaaacacttaatatcttgcctaaatctcgtaaatatacgaaaatgagagtttacccttaaacggtttaaattacagtgaaaattacttagagatttcccactcatttctgataatacgatcaatagctatgcaattctcttaaaccaatttctcatagaaaaagagtttgtagttatactcttgtctaagcactttgaaacgaaatggaaaaaacaactttcaattttaatgatccgacctaccgaattcgaaccagtgacctaaggattatctgcgtcaactacagtcctccgctctaccaactgagctaaggtcggttttgtattataacactttatgcatgttgatgattcaagagaagctttttaatcaaatttaaacttttgaagaggagtagaaagaaagttgacttcatatctttcatgctatcttgtttttttaaggttttttatcaatactaaagtttactgaaaacggtaacatgatggaaaactgttcaaattcaaagacgatacataaaacacaataagtaattttaaaaacttaccaacactcaaaataaaaacgtgaacggcaggattcgaacctgcgcgggcaaagcccacatgatttctagtcatgcccgataaccactccggcacgtccactttttctctaaactaaacttttatttcaaaatagactaaaccatataccattctctatcctaaattttgatcatgagtgagaagtagaagattccaaggatgaaatagtttatgaacacaataaaaaagattagaaccataaacctatttggctgtcttgattttttaaaatttttataatattttctcaattcaaaaaataaattatttctaaagagcaactttgatgatatatttatgcatgtaatattgagattgtgctatgattgtttatattcttgaaaataaagccaaacaaatcatgcaacagagtcccaaaaggtatttcactacccttgtatgaacgttgacaacttataggcacaacccacaagcatttgaatataattatgcatataaccgtttattataaaattcaaacaccttaatgttacaacaaaagaaaaataaaaagctctcatgtgggagcaaattccgacctaccggattcgaaccagtgacctaaggataatctgcgtcttctactgtcctccgctctaccaactgagctaaagtcggattgtattctatttcatgcatgtgtactgatcaaaatattctatcagcacaatgatttgtattaagttagcatactcatagtgagtctctattaaaaatttgaaaacaaagtttgaatttataaaaacattatattagaaaaactcataatatcttgcctaaatctcgtaaatatacgaaaatgagggtttactcttgaacggtttaaaatacagtgaaaattccttcgagatttcccactcatttctgataatacagtcaatagctatgcaattctcttaaacaatttctcatagaaaaacgagtttgtagttatactcttctctaaactctttgaaacgaaatgaaaaaaaaaatctttaaacttttatgatccgacctaccggattcgaaccaatgacctaaggattatctgcgtcaactacagtcctccgctctaccaactgagctaaggtcggttttgtattataacactttatgcatgttgatgattcaaaaaaagctttttaatcaaatttaaacttatcaagaagaggaatagaaaaaaagttgacttcatatctttcatgctgtcttgttttttaaaagttttttatcaatactaaattttactgaaaacggtaacatgatggaaaaccgttcaaattgaaaaacgatccataaaacacaataagttattttaaaaacttaccaacactcaaaataaaaacgtaaacggcaagattcaaacctgcgcgggcaaagcccccatgatttctagtcattcccgataaccactccggcacttccactttttctctaaactaaacttttatttcaaaatagactaaaccgtataccattctctatcctaaattttgatcatgagtgagaagtagaagattccaaggatgaaatagtttatgaacacaataaaaaagatcagaaccataaacctatttggctgtcttgatttttttgaatttttataatattttctcaattcaaaaaataaattatttctaaagagcaactttgatgatatatttatgcatgtaatattgagagtgtgctatgattgtttatattcttgaaaataaagccaaacaaatcgtgcaacaaagttggaaaaggtatttcaccaccctcgtatgaacgttgacaacttataggcacaacccacaagcatttgaatataattatgcatacattttttgttctttttaaaactctaaaactaaatgtttgtttgaccaaagaaaattagaaaactcatagtttttagtcacttttaaatcatttttcatcgtatcaatattgaaaaaagctaaacatacggatcgtttaagaattcgagcaaaacttttcggtatgtttaattgtcgaccaccatataaccgtttattataaaatttaaaaaccttaatgtcacaacaaaagaaaaataaaaagctctcatgtgggagcaaattccgacctaccggattcgaaccagtgacctaaggataatctgcgtctactacagtcctccgctctaccaactgagctaaggtcggattgtattatatttcatgcatgtgtactgatctaaatattctatcagcaaaatgatttgtattaagttagcatactcatagtgagtctctattacaaatttgtaaacaaagtttgaatttataaaaacattatattagaaaaacacttaatatcttgcctaaatctcgtaaatatacgaaaatgagagtttacccttaaacggtttaaattacagtgaaaattacttagagatttcccactcatttctgataatacgatcaatagctatgcaattctcttaaaccaatttctcatagaaaaagagtttgtagttatactcttgtctaagcactttgaaacgaaatggaaaaaacaactttcaattttaatgatccgacctaccgaattcgaaccagtgacctaaggattatctgcgtcaactacagtcctccgctctaccaactgagctaaggtcggttttgtattataacactttatgcatgttgatgattcaagagaagctttttaatcaaatttaaacttttgaagaggagtagaaagaaagttgacttcatatctttcatgctatcttgtttttttaaggttttttatcaatactaaagtttactgaaaacggtaacatgatggaaaactgttcaaattcaaagacgatacataaaacacaataagtaattttaaaaacttaccaacactcaaaataaaaacgtgaacggcaggattcgaacctgcgcgggcaaagcccacatgatttctagtcatgcccgataaccactccggcacgtccactttttctctaaactaaacttttatttcaaaatagactaaaccatataccattctctatcctaaattttgatcatgagtgagaagtagaagattccaaggatgaaatagtttatgaacacaataaaaaagattagaaccataaacctatttggctgtcttgattttttaaaatttttataatattttctcaattcaaaaaataaattatttctaaagagcaactttgatgatatatttatgcatgtaatattgagattgtgctatgattgtttatattcttgaaaataaagccaaacaaatcatgcaacagagtcccaaaaggtatttcactacccttgtatgaacgttgacaacttataggcacaacccacaagcatttgaatataattatgcatataaccgtttattataaaattcaaacaccttaatgttacaacaaaagaaaaataaaaagctctcatgtgggagcaaattccgacctaccggattcgaaccagtgacctaaggataatctgcgtcttctactgtcctccgctctaccaactgagctaaagtcggattgtattctatttcatgcatgtgtactgatcaaaatattctatcagcacaatgatttgtattaagttagcatactcatagtgagtctctattaaaaatttgaaaacaaagtttgaatttataaaaacattatattagaaaaactcataatatcttgcctaaatctcgtaaatatacgaaaatgagggtttactcttgaacggtttaaaatacagtgaaaattccttcgagatttcccactcatttctgataatacagtcaatagctatgcaattctcttaaacaatttctcatagaaaaacgagtttgtagttatactcttctctaaactctttgaaacgaaatgaaaaaaaaaatctttaaacttttatgatccgacctaccggattcgaaccaatgacctaaggattatctgcgtcaactacagtcctccgctctaccaactgagctaaggtcggttttgtattataacactttatgcatgttgatgattcaaaaaaagctttttaatcaaatttaaacttatcaagaagaggaatagaaaaaaagttgacttcatatctttcatgctgtcttgttttttaaaagttttttatcaatactaaattttactgaaaacggtaacatgatggaaaaccgttcaaattgaaaaacgatccataaaacacaataagttattttaaaaacttaccaacactcaaaataaaaacgtaaacggcaagattcaaacctgcgcgggcaaagcccccatgatttctagtcattcccgataaccactccggcacttccactttttctctaaactaaacttttatttcaaaatagactaaaccgtataccattctctatcctaaattttgatcatgagtgagaagtagaagattccaaggatgaaatagtttatgaacacaataaaaaagatcagaaccataaacctatttggctgtcttgatttttttgaatttttataatattttctcaattcaaaaaataaattatttctaaagagcaactttgatgatatatttatgcatgtaatattgagagtgtgctatgattgtttatattcttgaaaataaagccaaacaaatcgtgcaacaaagttggaaaaggtatttcaccaccctcgtatgaacgttgacaacttataggcacaacccacaagcatttgaatataattatgcatacattttttgttctttttaaaactctaaaactaaatgtttgtttgaccaaagaaaattagaaaactcatagtttttagtcacttttaaatcatttttcatcgtatcaatattgaaaaaagctaaacatacggatcgtttaaaaattcgagcaaaacttttcggtatgtttaattgtcgaccaccatataaccgtttattataaaatttaaaaatcttaatgtcacaacgaaagaaaaataaaaagctctcatgtgggagcaaattccgacctaccggattcgaaccagtgacctaaggataatctgcgtctactacagtcctccgctctaccaactgagctaaggtcggattgtattctatttcatgcatgtgtactgatctaaatattctatcagcaaaatgatttgtattaagttagcatactcatagtgagtctctattacaaatttgtaaacaaagtttgaatttataaaaacattatattagaaaaacacttaatatcttgcctaaatctcgtaaatatacgaaaatgagggtttacccttaaacggtttaaattacagtgaaaattacttagagatttcccactcatttctgataatacaatcaatagctatgcaattctcttaaaccaatttctcatagaaaaagagtttgtagttatactcttgtctaagcactttgaaacgaaatggaaaaaaaaaactttcaattttaatgatccgacctaccggattcgaaccagtgacctaaggattatctgcgtcaactacagtcctccgctctaccaactgagctaaggtcggtttgtattataacactttatgcatgttgatgattcaagagaagctttttaatcaaatttaaacttatgaagaggagtagaaagaaagttgacttcatatctttcatgctatcttgtttttttaaggttttttatcaatactaaagtttactgaaaacggtaacatgatggaaaactgttcaaattcaaagacgatacataaaacacaataagtaattttaagaacttaccaacactcaaaataaaaacgtgaacggcaggattcgaacctgcgcgggcaaagcccacatgatttctagtcatgcccgataaccactccggcacgtccactttttctctaaactaaacttttatttcaaaatagactaaaccgtataccattctctatcctaaattttgatcatgagtgagaagtagaagattccaaggatgaaatagtttatgaacacaataaaaaagattagaaccataaacctatttggctgtcttgatttttttgaatttttataatattttctcaattcaaaaaataaattatttctaaagagcaactttgatggtatatttatgcatgtaatattgagattgtgctatgattgtttatattcttgaaaataaagccaaacaaatcatgcaacagagtgggaaaaggtatttcactacccttgtatgaacgttgacaacttataggcacaacccacaagcatttgaatataattatgcatacattttttgttctttttaaaactctaaaactaaatgtttgtttgaccaaagaaaattagaaaactcatagtttttagtcacttttaaatcatttttcatcgtatcaatattgaaaaaagctaaacatacggatcgtttaagaattcgagcaaaacttttcggtatgtttaattgtcgaccaccatataaccgtttattataaaatttaaaaaccttaatgtcacatcgaaagaaaaataaaaagctctcatgtgggagcaaattccgacctaccggattcgaaccagtgacctaaggataatctgcgtctactacagtcctccgctctaccaactgagctaaggtcggattgtattctatttcatgcatgtgtactgatctaaatattctatcagcaaaatgatttgtattaagttagcatactcatagtgagtctgtattacaaatttgtaaacaaagtttgaatttataaaaacattatattagaaaaacacttaatatcttgcctaaatctcgtaaatatacgaaaatgagggtttacccttaaacggtttaaattacagtgaaaattacttagagatttcccactcatttatgataatacgatcaatagctatgcaattctcttaaaccaatttttcatagaaaaaaagtttgtagttatactcttgtctaagcactttgaaacgaaatggaaaaaaaaaatttcaattttaatgatccgacctaccggattcgaaccagtgacctaaggattatctgcgtcaactacagtcctccgctctaccaactgagctaaggtcggttttgtattataacactttaagcatgttgatgattcaagagaagctttttaatcaaatttaaacttatgaagaggagtagaaagaaagttgacttcatatctttcatgctatcttgtttttttaaggttttttatcaatactaaagtttactgaaaacggtaacatgatggaaaactgttcaaattcaaagacgatacataaaacacaataagtaattttaagaacttaccaacactcaaaataaaaacgtgaacggcaggattcgaacctgcgcgggcaaagcccacatgatttctagtcatgcccgataaccactccggcacgtccactttttctctaaactaaacttttatttcaaaatagactaaaccgtataccattctctatcctaaattttgatcatgagtgagaagtagaagattccaaggatgaaatagtttatgaacacaataaaaaagattagaaccataaacctatttggctgtcttgatttttttgaatttttataatattttctcaattcaaaaaataaattatttctaaagagcaactttgatggtatatttatgcatgtaatattgagattgtgctatgattgtttatattcttgaaaataaagccaaacaaatcatgcaacagagtgggaaaaggtatttcactacccttgtatgaacgttgacaacttataggcacaacccacaagcatttgaatataattatgcatacattttttgttctttttaaaactctaaaactaaatgtttgtttgaccaaagaaaattagaaaactcatagtttttagtcacttttaaatcatttttcatcgtatcaatattgaaaaaagctaaacatacggatcgtttaagaattcgagcaaaacttttcggtatgtttaattgtcgaccaccatataaccgtttattataaaatttaaaaaccttaatgtcacatcgaaagaaaaataaaaagctctcatgtgggagcaaattccgacctaccggattcgaaccagtgacctaaggataatctgcgtctactacagtcctccgctctaccaactgagctaaggtcggattgtattctatttcatgcatgtgtactgatctaaatattctatcagcaaaatgatttgtattaagttagcatactcatagtgagtctgtattacaaatttgtaaacaaagtttgaatttataaaaacattatattagaaaaacacttaatatcttgcctaaatctcgtaaatatacgaaaatgagggtttacccttaaacggtttaaattacagtgaaaattacttagagatttcccactcatttatgataatacgatcaatagctatgcaattctcttaaaccaatttttcatagaaaaaaagtttgtagttatactcttgtctaagcactttgaaacgaaatggaaaaaaaaaatttcaattttaatgatccgacctaccggattcgaaccagtgacctaaggattatctgcgtcaactacagtcctccgctctaccaactgagctaaggtcggttttgtattataacactttaagcatgttgatgattcaagagaagctttttaatcaaatttaaacttatgaagaggagtagaaagaaagttgacttcatatctttcatgctatcttgtttttttaaggttttttatcaatactaaagtttactgaaaacggtaacatgatggaaaactgttcaaattcaaagacgatacataaaacacaataagtaattttaagaacttaccaacactcaaaataaaaacgtgaacggcaggattcgaacctgcgcgggcaaagcccacatgatttctagtcatgcccgataaccactccggcacgtccactttttctctaaactaaacttttatttcaaaatagactaaaccgtataccattctctatcctaaattttgatcatgagtgagaagtagaagattccaaggatgaaatagtttatgaacacaataaaaaagattagaaccataaacctatttggctgtcttgatttttttgaatttttataatattttctcaattcaaaaaataaattatttctaaagagcaactttgatggtatatttatgcatgtaatattgagattgtgctatgattgtttatattcttgaaaataaagccaaacaaattcatgcaacagagtgggaaaaggtatttcactacccttgtatgaacgttgacaacttataggcacaacccacaagcatttgaatataattatgcatacattttttgttctttttaaaactctaaaactaaatgtttgtttgaccaaagaaaattagaaaactcatagtttttagtcacttttaaatcatttttcatcgtatcaatattgaaaaaagctaaacatacggatcgtttaagaattcgagcaaaacttttcggtatgtttaattgtcgaccaccatataaccgtttattataaaatttaaaaaccttaatgtcacatcgaaagaaaaataaaaagctctcatgtgggagcaaattccgacctaccggattcgaaccagtgacctaaggataatctgcgtctactacagtcctccgctctaccaactgagctaaggtcggattgtattctatttcatgcatgtgtactgatctaaatattctatcagcaaaatgatttgtattaagttagcatactcatagtgagtctgtattacaaatttgtaaacaaagtttgaatttataaaaacattatattagaaaaacacttaatatcttgcctaaatctcgtaaatatacgaaaatgagggtttacccttaaacggtttaaattacagtgaaaattacttagagatttcccactcatttatgataatacgatcaatagctatgcaattctcttaaaccaatttttcatagaaaaacgagtttgtagttatactcttgtctaagcactttgaaacgaaatggaaaaaaaaaatttcaattttaatgatccgacctaccggattcgaaccagtgacctaaggattatctgcgtcaactacagtcctccgctctaccaactgagctaaggtcggttttgtattataacactttaagcatgttgatgattcaagagaagctttttaatcaaatttaaacttatgaagaggagtagaaagaaagttgacttcatatctttcatgctatcttgtttttttaaggttttttatcaatactaaagtttactgaaaacggtaacatgatggaaaactgttcaaattcaaagacgatacataaaacacaataagtaattttaagaacttaccaacactcaaaataaaaacgtgaacggcaggattcgaacctgcgcgggcaaagcccacatgatttctagtcatgcccgataaccactccggcacgtccactttttctctaaactaaacttttatttcaaaatagactaaaccgtataccattctctatcctaaattttgatcatgagtaagaagtagaagattccaaggatgaaatagtttatgaacacaataaaaaagattagaaccataaacctatttggctgtcttgatttttttgaatttttataatattttctcaattcaaaaaataaattatttctaaagagcaactttgatgatatatttatgcatgtaatattgagagtgtgcgatgattgtttatattcttgaaaataaagccaaacaaatcgtgcaacaaagttggaaaaggtatttcaccacccttgtatgaacgttgacaacttataggcacaacccacaagcatttgaatataattatgcatacattctttgttctttttaaaactctaaaactaaatgtttgtttgaccaaagaaaattagaaaactcatagtttttagtcacttttaaatcatttttcatcgtatcaatattgaaaaaagctaaacatacggatcgtttaagaattcgagcaaaacttttcggtatgtttaattgtcgaccaccatataaccgtttattataaaatttaaaaaccttaatgtcacaacgaaagaaaaataaaaagctctcatgtgggagcaaattccgacctaccggattcgaaccagtgacctaaggataatctgcgtctactacagtcctccgctctaccaactgagctaaggtcggattgtattctatttcatgcatgtgtactgatctaaatattctatcagcaaaatgatttgtattaagttagcatactcatagtgagtctctattacaaatttgtaaacaaagtttgaatttataaaaacattatattagaaaaacacttaatatcttgcctaaatctcgtaaatatacgaaaatgagggtttacccttaaacggtttaaattacagtgaaaattacttagagatttcccactcatttctgataatacgatcaatagctatgcaattctcttaaaccaatttttcatagaaaaaaagtttgtagttatactcttgtctaagcactttgaaacgaaatggaaaaaaaaaactttcaattttaatgatccgacctaccggattcgaaccagtgacctaaggattatctgcgtcaactacagtcctccgctctaccaactgagctaaggtcggttttgtattataacactttaagcatgttgatgattcaagggaagctttttaatcaaatttaaacttatgaagaggagtagaaagaaagttgacttcatatctttcatgctatcttgtttttttaaggttttttatcaatactaaagtttactgaaaacggtaacatgatggaaaactgttcaaattcaaagacgatacataaaacacaataagtaattttaagaacttaccaacactcaaaataaaaacgtgaacggcaggattcgaacctgcgcgggcaaagcccacatgatttctagtcatgcccgataaccactccggcacgtccactttttctctaaactaaacttttatttcaaaatagactaaaccgtataccattctctatcctaaattttgatcatgagtgagaagtagaagattccaaggataaaatagtttatgaacacaataaaaaagattagaaccataaacctatttggctgtcttgattttttagaatttttataatattttctcaattcaaaaaataaattatttctaaagagcaactttgatgatatatttatgcatgtaatattgagattgtgctatgattgtttatattcttgaaaataaagccaaacaaatcgtgcaacagagtgggaaaaggtatttcactacccttgtatgaacgttgacaacttataggcacaacccacaagcatttgaatataattatgcatacattctttgttctttttaaaactctaaaactaaatgtttgtttgaccaaagaaaattagaaaactcatagtttttagtcacttttaaatcatttttcatcgtatcaatattgaaaaaagctaaacatacggatcgtttaagaattcgagcaaaacttttcggtatgtttaattgtcgaccaccatataaccgtttattataaaatttaaaaaccttaatgtcacaacgaaagaaaaataaaaagctctcatgtgggagcaaattcaaacctaccagattcgaaccagtgacctaaggataatctgcgtctactacagtcctccgctctaccaactgagctaaggtcggattgtattctatttcatgcatgtgtactgatctaaatattctatcagcaaaatgatttgtattaagttagcatactcatagtgagtctctattacaaatttgtaaacaaagtttgaatttataaaaacattatattagaaaaacacttaatatcttgcctaaatctcgtaaatatacgaaaatgagggtttacccttaaacggtttaaattacagtgaaaattacttagagatttcccactcatttctgataatacgatcaatagctatgcaattctcttaaaccaatttcttatagaaaaagagtttgtagttatactcttgtctaagcactttgaaacgaaatggaaaaaaaaaactttcaattttaatgatccgacctaccggattcgaaccagtgacctaaggattatctgcgtcaactacagtcctccgctctaccaactgagctaaggtcggttttgtattataacactttatgcatgttgatgattcaagagaagctttttaatcaaatttaaacttatgaagaggagtagaaagaaagttgacttcatatctttcatgctatcttgtttttttaaggttttttatcaatactaaagtttactgaaaacggtaacatgatggaaaactgttcaaattcaaagacgatacataaaacacaataagtaattttaagaacttaccaacactcaaaataaaaacgtgaacggcaggattcgaacctgcgcgggcaaagcccacatgatttctagtcatgcccgataaccactccggcacgtccactttttctctaaactaaacttttatttcaaaatagactaaactgtataccattctctatcctaaattttgatcatgagtgagaagtagaagattccaaggatgaaatagtttatgaacacaataaaaaagattagaaccataaacctatttggctgtcttgatttttttgaatttttataatattttctcaattcaaaaaataaattatttctaaagagcaactttgatgatatatttatgcatgtaatattgagagtgtgctatgattgtttatattcttgaaaataaagccaaacaaatcgggcaacaaagttggaaaaggtatttcaccacccttgtatgaacgttgacaacttataggcacaacccacaagcatttgaatataattatgcatacattttttgttctttttaaaactctaaaactaaatttttgtttgaccaaagaaaattagaaaactcatagtttttagtcacttttaaatcatttttcatcgtatcaatattgaaaaaagctaaacatacggatcgtttaagaattcgagcaaaacttttcggtatgtttaattgtcgaccaccatataaccgtttattataaaatttaaaaaccttaatgtcacaacgaaagaaaaataaaaagctctcatgtgggagcaaattccgacctaccggattcgaaccagtgacctaaggataatctgcgtctactacagtcctccgctctaccaactgagctaaggtcggattgtattctatttcatgcatgtgtactgatctaaatattctatcagcaaaatgatttgtattaagttagcatactcatagtgagtctctattacaaatttgtaaacaaagtttgaatttataaaaacattatattagaaaaacacttaatatcttgcctaaatctcgtaaatatacgaaaatgagggtttacccttaaacggtttaaattacagtgaaaattacttagagatttcccactcatttctgataatacgatcaatagctatgcaattctcttaaaccaatttctcatagaaaaagagtttgtagttatactcttgtctaagcactttgaaacgaaatggaaaaaaaaaactttcaattttaatgatccgacctaccggattcgaaccagtgacctaaggattatctgcgtcaactacagtcctccgctctaccaactgagctaaggtcggttttgtattataacactttatgcatgttgatgattcaagagaagctttttaatcaaatttaaacttatgaagaggagtagaaagaaagttgacttcatatctttcatgctatcttgtttttttaaggttttttatcaatactaaagtttactgaaaacggtaacatgatggaaaactgttcaaattcaaagacgatacataaaacacattaagtaattttaagaactaaccaacactcaaaataaaaacgtgaacggcaggattcgaacctgcgcgggcaaagcccacatgatttctagttatgcccgataaccactccggcacgtccactttttctctaaactaaacttttatttcaaaatagactaaaccgtataccattctctatcctaaattttgatcatgagtgagaagtagaagattccaaggatgatgcagtttatgaacaaaataaaaaaattagaaccataaacctatttggctgtcttgatttttttgaatttttataaaattttctcaattcaaaaaataaattatttctaaagagcaactttgatgatatatttatgcatgtaatattgagattgtgcttatgattgtttatattcttgaaaataaagccaaacaaatcgtgcaacagagtgggaaagggtatttcactacccttgtatgaacgttgacaacttataggcacaacccacaagcatttgaatataactatgcatacattttttgtatttttaaaactctaaaactaaatgtttgtttgaccaaagaaaattagaaaactcatagtttttagtcacttttaaatcatttttcatcgtatcaatattgaaaaagataaacatacggatcgttgaagaattcgagctaaactttttggtatgtttaattgtcgaccaccatataaccgtttattataaaattttaaaaactttaatgtcacaacaaaagaaaaataaaaagctctcctgtgggagcaaattccgacctaccggattcgaaccagtgacctaaggataatctacgtctactacagtcctccgctctaccaactgagctaaggtcggattgtattctatttcatgcatgtgtactgatctaaatattctatgaacacaatgatttgtattaagttagcatactcatagtgattctctattaaaagtttgaaaacaaagtttgaatttataaaaacattatattagaaaaatacttgcataaatctcgtaaatataagaaaatgagggtttacccttgaacggtttaaaatacagtgaaaattacttcgagagttcccactcttttctgataatacagtcagtagctatgcaattctctaaaacaaattctcatagaaaaacgagtttgtagttatactcttctctaatcactttgaaacgaaatgaactaaaaaaaactttaaacttttatgatccgacctaccggattcgaaccagtgacctaaggataatctgcgtcaactacagtcctccgctctaccaactgagctaaggtcggttttgtattataacactttatgcatgttgatgattcaagaagagctttttaatcaaatttaaacttatcaagaagaggagtagaaagaaagttgacttcatatctttcatgctatcttgttttttttagaggttttttatcaatactaaattttactgaaaacggtaacatgatggaaaaccgttcaaattcaaagacgatccataaaacacaataagtaattataagaacttaccaacactcaaaataaaaacgtgaacggcaggattcgaacctgcgcgggcaaaacccacatgatttctagtcatgcccgataaccactccggcacgtccaccttttctgtaaactaaacttttatttcaaaatagactaaaccgtataccattctctatcctaaattttgatcatgagtgagaagtagaagattccaaggatgatgcagtttatgaacaaaataaaaaaattagaaccataaacctatttggctgtcttgatttttttgaatttttataaaattttctcaattcaaaaaataaattatttctaaagagcaactttgatgatatatttatgcatgtaatattgagattgtgcttatgattgtttatattcttgaaaataaagccaaacaaatcgtgcaacagagtgggaaagggtatttcaccacccttgtatgaacgttgacaacttataggcacaacccacaagcatttgaatataattatgcatacattttttgttctttttaaaactctaaaactaaatgtttgtttgaccaaagaaaattagaaaactcatagtttttagtcacttttaaatcatttttcatcgtatcaatattgaaaaaagctaaacatacggatcgtttaagaattcgagcaaaactttttggtatgtttaattgtcgaccaccatataaccgtttattataaaatttaaaaaccttaatgtcacaacgaaagaaaaataaaaagctctcatgtgggagcaaattccgacctaccggattcgaaccagtgacctaaggataatctgcgtctactacagtcctccgctctaccaactgagctaaggtcggattgtattctatttcatgcatgtgtactgatctaaatattctatgaacacaatgatttgtattaagttagcatactcatagtgagtctctattaaaaatttgaaaataaagtttgaatttataaaaacattatattagaaaaatacttgcataaatctcgtaagccttgaacggtttaaaatacagtgaaaattacttctagatttcccactcatttctgataatacagtcaatagctatgcaattctctaaaacaatttctcatagaaaaacgagtttgtagttatactcttctctaatcactttgaaacgaaatgaaaaaaaaaaatctttaaacttttatgatccgacctagcggattcgaaccaatgacctaaggataatctgcgtcaactacagtcctccgctctaccaactgagctaaggtcggttttgtatcataacactttatgcatgttgatgattcaagaaaagctttttaatcaaatttaaacttatcaagaagaggagtagaaagaaagttgacttcatatctttcatgctgttttgttttttttagaggttttttatcaatactaaagtttactgaaaacggtaacatgatgaaaaaccgttcaaattcaaagacgatccataaaacacaataagtaattataaaaacttaccaacactcaaaataaaaacgtgaacggcaggattcgaacctgcgcgggcaaagcccacatgatttctagtcatgcccgataaccactccggcacgtccactttttctgtaaactaaacttttatttcaaaatagactaaaccgtataccattctctatcctaaattttgatcatgagtgagaagtagaagattccaaggatgatgcagtttatgaacaaaataaaaaaattagaaccataaacctatttggctgtcttgatttttttgaatttttataaaattttctcaattcaaaaaataaattatttctaaagagcaactttgatgatatatttatgcatgtaatattgagattgtgcttatgattgtttatattcttgaaaataaagccaaacaaatcgtgcaacagagtgggaaagggtatttcactacccttgtatgaacgttgacaacttataggcacaacccacaagcatttgaatataactatgcatacattttttgtatttttaaaactctaaaactaaatgtttgtttgaccaaagaaaattagaaaactcatagtttttagtcacttttaaatcatttttcatcgtatcaatattgaaaaagataaacatacggatcgttgaagaattcgagctaaactttttggtatgtttaattgtcgaccaccatataaccgtttattataaaattttaaaaactttaatgtcacaacaaaagaaaaataaaaagctctcctgtgggagcaaattccgacctaccggattcgaaccagtgacctaaggataatctacgtctactacagtcctccgctctaccaactgagctaaggtcggattgtattctatttcatgcatgtgtactgatctaaatattctatgaacacaatgatttgtattaagttagcatactcatagtgattctctattaaaagtttgaaaacaaagtttgaatttataaaaacattatattagaaaaatacttgcataaatctcgtaaatataagaaaatgagggtttacccttgaacggtttaaaatacagtgaaaattacttcgagagttcccactcttttctgataatacagtcagtagctatgcaattctctaaaacaaattctcatagaaaaacgagtttgtagttatactcttctctaatcactttgaaacgaaatgaactaaaaaaaactttaaacttttatgatccgacctaccggattcgaaccagtgacctaaggataatctgcgtcaactacagtcctccgctctaccaactgagctaaggtcggttttgtattataacactttatgcatgttgatgattcaagaagagctttttaatcaaatttaaacttatcaagaagaggagtagaaagaaagttgacttcatatctttcatgctatcttgttttttttagaggttttttatcaatactaaattttactgaaaacggtaacatgatggaaaaccgttcaaattcaaagacgatccataaaacacaataagtaattataagaacttaccaacactcaaaataaaaacgtgaacggcaggattcgaacctgcgcgggcaaaacccacatgatttctagtcatgcccgataaccactccggcacgtccaccttttctgtaaactaaacttttatttcaaaatagactaaaccgtataccattctctatcctaaattttgatcatgagtgagaagtagaagattccaaggatgatgcagtttatgaacaaaataaaaaaattagaaccataaacctatttggctgtcttgatttttttgaatttttataaaattttctcaattcaaaaaataaattatttctaaagagcaactttgatgatatatttatgcatgtaatattgagattgtgcttatgattgtttatattcttgaaaataaagccaaacaaatcgtgcaacagagtgggaaagggtatttcaccacccttgtatgaacgttgacaacttataggcacaacccacaagcatttgaatataattatgcatacattttttgttctttttaaaactctaaaactaaatgtttgtttgaccaaagaaaattagaaaactcatagtttttagtcacttttaaatcatttttcatcgtatcaatattgaaaaaagctaaacatacggatcgtttaagaattcgagcaaaactttttggtatgtttaattgtcgaccaccatataaccgtttattataaaatttaaaaaccttaatgtcacaacgaaagaaaaataaaaagctctcatgtgggagcaaattccgacctaccggattcgaaccagtgacctaaggataatctgcgtctactacagtcctccgctctaccaactgagctaaggtcggattgtattctatttcatgcatgtgtactgatctaaatattctatgaacacaatgatttgtattaagttagcatactcatagtgagtctctattaaaaatttgaaaataaagtttgaatttataaaaacattatattagaaaaatacttgcataaatctcgtaagccttgaacggtttaaaatacagtgaaaattacttctagatttcccactcatttctgataatacagtcaatagctatgcaattctctaaaacaatttctcatagaaaaacgagtttgtagttatactcttctctaatcactttgaaacgaaatgaaaaaaaaaaatctttaaacttttatgatccgacctagcggattcgaaccaatgacctaaggataatctgcgtcaactacagtcctccgctctaccaactgagctaaggtcggttttgtatcataacactttatgcatgttgatgattcaagaaaagctttttaatcaaatttaaacttatcaagaagaggagtagaaagaaagttgacttcatatctttcatgctgttttgttttttttagaggttttttatcaatactaaagtttactgaaaacggtaacatgatgaaaaaccgttcaaattcaaagacgatccataaaacacaataagtaattataaaaacttaccaacactcaaaataaaaacgtgaacggcaggattcgaacctgcgcgggcaaagcccacatgatttctagtcatgcccgataaccactccggcacgtccactttttctgtaaactaaacttttatttcaaaatagactaaaccgtataccattctctatcctaaattttgatcatgagtgagaagtagaagattccaaggatgatgcagtttatgaacaaaataaaaaaattagaaccataaacctatttggctgtcttgatttttttgaatttttataaaattttctcaattcaaaaaataaattatttctaaagagcaactttgatgatatatttatgcatgtaatattgagattgtgcttatgattgtttatattcttgaaaataaagccaaacaaatcgtgcaacagagtgggaaagggtatttcaccacccttgtatgaacgttgacaacttataggcacaacccacaagcatttgaatataattatgcatacattttttgttctttttaaaactctaaaactaaatgtttgtttgaccaaagtaaattagaaaactcatagtttttagtcacttttaaatcatttttcatcgtatcaatattgaaaaaagctaaacatacggatcgtttaagaattcgagcaaaactttttggtatgtttaattgtcgaccaccatataaccgtttattataaaatttaaaaaccttaatgtcacaacgaaagaaaaataaaaagctctcatgtgggagcaaattccgacctaccggattcgaaccagtgacctaaggataatctgcgtctactacagtcctccgctctaccaactgagctaaggtcggattgtattctatttcatgcatgtgtactgatctaaatattctatgaacacaatgatttgtattaagttagcatactcatagtgagtctctattaaaaatttgaaaacaaagtttgaatttataaaaacattatattagaaaaatacttgcataaatctcgtaaaccttgaacggtttaaaatacagtgaaaattacttctagatttcccactcatttctgataatacagtcaatagctatgcaattctctaaaacaatttctcatagaaaaacgagtttgtagttatactcttctctaatcactttgaaacgaaatgaaaaaaaaaaatctttaaacttttatgatccgacctagcggattcgaaccaatgacctaaggataatctgcgtcaactacagtcctccgctctaccaactgagctaaggtcggttttgtatcataacactttatgcatgttgatgattcaagaaaagctttttaatcaaatttaaacttttcaagaagaggagtagaaagaaagttgacttcatatctttcatgctgttttgttttttttagaggttttttatcaatactaaattttactgaaaacggtaacatgatgaaaaaccgttcaaattcaaagacgatccataaaacacaataagtaattataaaaacttaccaacactcaaaataaaaacgtgaacggcaggattcgaacctgcgcgggcaaagcccacatgatttctagtcatgcccgataaccactccgccacttccactttttctgtaaactaaacttttatttcaaaatagactaaaccgtataccattctctatcctaaattttgatcatgagtgagaagtagaagattccaaggatgatgcagtttatgaacaaaataaaaaaattagaaccataaacctatttggctgtcttgatttttttgaatttttataaaattttctcaattcaaaaaataaattatttctaaagagcaactttgatgatatatttatgcatgtaatattgagattgtgcttatgattgtttatattcttgaaaataaagccaaacaaatcgtgcaacagagtgggaaagggtatttcaccacccttgtatgaacgttgacaacttataggcacaacccacaagcatttgaatataattatgcatacattttttgttctttttaaaactctaaaactaaatgtttgtttgaccaaagaaaattagaaaactcatagtttttagtcacttttaaatcatttttcatcgtatcaatattgaaaaaagctaaacatacggatcgtttaagaattcgagcaaaactttttggtatgtttaattgtcgaccaccatataaccgtttattataaaatttaaaaaccttaatgtcacaacgaaagaaaaataaaaagctctcatgtgggagcaaattccgacctaccggattcgaaccagtgacctaaggataatctgcgtctactacagtcctccgctctaccaactgagctaaggtcggattgtattctatttcatgcatgtgtactgatctaaatattctatgaacacaatgatttgtattaagttagcatactcatagtgagtctctattaaaaatttgaaaataaagtttgaatttataaaaacattatattagaaaaatacttgcataaatctcgtaagccttgaacggtttaaaatacagtgaaaattacttctagatttcccactcatttctgataatacagtcaatagctatgcaattctctaaaacaatttctcatagaaaaacgagtttgtagttatactcttctctaatcactttgaaacgaaatgaaaaaaaaaaatctttaaacttttatgatccgacctagcggattcgaaccaatgacctaaggataatctgcgtcaactacagtcctccgctctaccaactgagctaaggtcggttttgtatcataacactttatgcatgttgatgattcaagaaaagctttttaatcaaatttaaacttatcaagaagaggagtagaaagaaagttgacttcatatctttcatgctgttttgttttttttagaggttttttatcaatactaaagtttactgaaaacggtaacatgatgaaaaaccgttcaaattcaaagacgatccataaaacacaataagtaattataaaaacttaccaacactcaaaataaaaacgtgaacggcaggattcgaacctgcgcgggcaaagcccacatgatttctagtcatgcccgataaccactccggcacgtccactttttctgtaaactaaacttttatttcaaaatagactaaaccgtataccattctctatcctaaattttgatcatgagtgagaagtagaagattccaaggatgatgcagtttatgaacaaaataaaaaaattagaaccataaacctatttggctgtcttgatttttttgaatttttataaaattttctcaattcaaaaaataaattatttctaaagagcaactttgatgatatatttatgcatgtaatattgagattgtgcttatgattgtttatattcttgaaaataaagccaaacaaatcgtgcaacagagtgggaaagggtatttcaccacccttgtatgaacgttgacaacttataggcacaacccacaagcatttgaatataattatgcatacattttttgttctttttaaaactctaaaactaaatgtttgtttgaccaaagtaaattagaaaactcatagtttttagtcacttttaaatcatttttcatcgtatcaatattgaaaaaagctaaacatacggatcgtttaagaattcgagcaaaactttttggtatgtttaattgtcgaccaccatataaccgtttattataaaatttaaaaaccttaatgtcacaacgaaagaaaaataaaaagctctcatgtgggagcaaattccgacctaccggattcgaaccagtgacctaaggataatctgcgtctactacagtcctccgctctaccaactgagctaaggtcggattgtattctatttcatgcatgtgtactgatctaaatattctatgaacacaatgatttgtattaagttagcatactcatagtgagtctctattaaaaatttgaaaacaaagtttgaatttataaaaacattatattagaaaaatacttgcataaatctcgtaaaccttgaacggtttaaaatacagtgaaaattacttctagatttcccactcatttctgataatacagtcaatagctatgcaattctctaaaacaatttctcatagaaaaacgagtttgtagttatactcttctctaatcactttgaaacgaaatgaaaaaaaaaaatctttaaacttttatgatccgacctagcggattcgaaccaatgacctaaggataatctgcgtcaactacagtcctccgctctaccaactgagctaaggtcggttttgtatcataacactttatgcatgttgatgattcaagaaaagctttttaatcaaatttaaacttttcaagaagaggagtagaaagaaagttgacttcatatctttcatgctgttttgttttttttagaggttttttatcaatactaaattttactgaaaacggtaacatgatgaaaaaccgttcaaattcaaagacgatccataaaacacaataagtaattataaaaacttaccaacactcaaaataaaaacgtgaacggcaggattcgaacctgcgcgggcaaagcccacatgatttctagtcatgcccgataaccactccgccacttccactttttctgtaaactaaacttttatttcaaaatagactaaaccgtataccattctctatcctaaattttgatcatgagtgagaagtagaagattccaaggatgatgcagtttatgaacaaaataaaaaaattagaaccataaacctatttggctgtcttgatttttttgaatttttataaaattttctcaattcaaaaaataaattatttctaaagagcaactttgatgatatatttatgcatgtaatattgagattgtgcttatgattgtttatattcttgaaaataaagccaaacaaatcgtgcaacagagtgggaaagggtatttcactacccttgaaaataaacaccatattgatgagctttaaacctaagcacctctaccctacccacttgggccgggcctgattggaaatcttcaaaatacatcttggtcacgataaacaaacatgaaggatcttgcgtctgttttccgagaaccagggttgcctcttttagtgtttccactagatttcttacaccttcttacgaaaaggcatttgtaggtgttttactttctatatcttacgagctatcaggcattgacgtgcttattagtcttgtacaaacccttgacgccatatcttagtaagctggcatagtggcatgtgtcgaacttgctgatatactctatatttaccgctttatcacggtttttaatatcattttttatcgtattttattggtattttccttatgttttgtctatttagagtccaagtgagttttcttccattttagaagttctatagtgtttttgtgtgtcttttcgtgtgttttgtatgtttttgtaagttattccaggacaaaataaaaaaggacatacatttggatactatttctttaaagataataatcatcaaaaaacagtcccagactcggatgaaggtgtacccttgggatttgtttcctcgaaggtccttacgaaagtcaatagaaacttgagttagcttttcagtggaggtcattgtgggttaatccgagctgtggttaaagagttatggccggttaactgaaaatgtatcaatttgatgccagtgtcggtcttgtcatttttcggggaggctttttaaactgttaaattttctatattttgctaattgtgggttataaaaaaaaaaaattcacaatgaaacaaaatgctattttatttttactaaaatgggcttaaattctttcatttatttttaagatactcttaagacactattaatattttagacaaaatgggccacgaaattagaggcccaatacctatatgttatatgtatgtgtcaagggcaggacctgggtgtagagggacattctcacgatccaaagtccatgatcagacccagatctgttatgtgtcgatccggaaacttctctactctaaaagttgatttagatccaacctcttcttttgatatgagctttcatatctggaaggcgtttgtgaaaatagacttgttattaatgctcattgatcatatagacaaacataattagattatttgtgaagttgttagtgtcacggaagtggaattagtcatatttgtgagtttcatgttctggttaaacgtcttacttcattgcatgattgttaaattcattttcatgataataaaactcatagtttaatgcttttatcttattttacttcttgcattttctctatattagtttgaagctcgcatatttagtgttgcaatctttattcctggtgggatcgatttctaaattactataacggttgcgcttgcacttgggtgatttagagatacaaattttataacttgtgttttgaaaccaaaaatatttctacaacatttgctatgtattaggaaacctctatggctctatcgatggtaatttctctcgaggcttgtaaggtcctcgttggatgaaattcacaatgtcacaactatttaatactctccaccttctagtgattaacttttttttttttttttggggcaaaacctgtcatgcaaaattttggttttcgatcgtctatacatgttcctgtgcaaaattttggagcacagttaaaaaaaaaatatactagaatttgatttgcaattttcatctttctaagaataatataattctctatttaagactcgtctttactaattattcactacactttattctgctgttatgttttctttttttgaccatgcagtgcaataaacctgacagttacttctggtaactaaaacatcatcatcgtcctcacatgtgaaccttacacattcccatgatgttctgaataatgtaattgactaattgtaatgcaaggcaagacatctctcctttgtctctctcaccataaaaattaaagaaaacaaataaaaacacttaaaaaacctttcactacctaacacttgataactctatctcttcttcttctcttattaccttccaccagatctcactccccacatttcaaagttttctccctttttgtcgatttccttctcttactcatattaaacccaaaacttaataaattctcttaaattatctattcactggctgggccagagtgtttatttgaatatgttttattacagttttagtgtagttgttgtagttacatgacagctccttacaagcttagatctctccacagttctttcgttatcttccttccacattgacacttgccttaagaagagggccaaagaaaggtctcttgtctctttgtctgagctgttcattttcttgattttcttgcatcttggatttgcttcattacattctttctcctgaaattttatttagtgtttttctcacttctctcaaatttggttctaggatctggaattctttcttcttcaagatttgtaaatgggtgttagttcttcaaagatctaaaatatcaagatcaggtaattaaacattaaattctcatctgctttggtacttactctgtatgtgttgtctgtttatatttattttaagaccaacattattgcttgtgttctttattatgtccttgattttagctacttcagttgtcctctagtgtgttttcctgggaaatttttgtctttctatgagtaaatttcaatgtggataaacttgggaccacaaaacaaattcgagactctatcattaagctcattgcattttcatgtatcaacttggactctgtttatatcaacctgattttggagatttatttgtaaagtttaggaagaaatgggaggtgacttgaaaagccagctatctagagagagccatgtgtttggacttaaggtgtgggaagtaattggtatagctgttgcattgctcatcatagctatcctctctgttctttcgtgttgtcttacttcgaaaaagaaatcaagaagatcgaaaaccggtcttccggttatccaaactcctccggtggtctccaaagagatcagagaagtgagagttgagcatgtctcagctagtaactttgctcctggtgaaggcattcttctaacaattcaggacaaaaataacaaagactcagaaaaagtcatggttcatttggatatgaggaagaagagaagtagtagtggccggtcagggtcgtttcatcatttagagatcatagataaacattctgactctgctgaagaagtttctgcttcttcatcattgtataatattgcaactccatctccattgtctggtttgcctgaatctcaccttggttggggacactggtttactttgagagatcttgaaacagcaactaacagattctctaaagagaatgttataggtgaaggcggttacggtgttgtctacagaggagagttaatgaatggaactcctgttgcagttaaaaagattcttaaccagttgtgagtatcggattgtaaaaagattttcatacctttttatggtttgagttttggttgattgatagattttataggggacaagctgagaaagagtttcgagtcgaggttgatgctatcggtcatgtgcggcacaagaacttggttcggcttcttggttactgcattgaaggcacacacaggttggtgaaaaaaattccaacttaggaaccaaatttgtgagttactaatactaaaagatcaatgtgaattgctactaggatattggtttacgaatatgtgaataatggaaacttagaacaatggcttcatggagcaatgagacaacatggatatctaacttgggaagcaaggatgaaggttctgatcggcacatcaaaagcgtaagcaaacaatgtaatttcctttttattaagttcttcttctcacatactgatcattattcctctgtgtagtcttgcatatctgcatgaagcaattgagccaaaagtagtgcatagagacatcaagtcaagcaacattctgatcaatgacgaattcaacgcaaaggtttcagattttggccttgctaagttgcttggtgctggaaaaagccatgtgacaactcgagtgatgggaacatttgggtcagaggcttataaactgaaaaataatcaagaagtctttagtattaaatctaaatgcttttgtggacgttttgtaggtacgttgctcctgaatatgcaaactcagggttgttaaatgaaaagagtgatgtctacagctttggtgttgttctcttagaagcaatcacaggacgagaccctgtggattacggacgtcctgctcatgaggtaatcaactattttcatttagtttaattagtttcatcgcggttcgcggaccaacacgagattattgtaggtgaatctagtggactggttgaagatgatggttgggacaagacgatcagaggaagtagtggatccaaacatagaagtgaagccaccaacaaggtcactgaaacgagctcttttgacggctctaagatgtgttgatccagattcggataagcggccgaagatgagccaagttgtacgtatgcttgagtctgaagaataccccattccaagagaggttagtgttctaaagagctgataaaaccaaacatagaccataacaggtgatggttataactggaattatgtttctttcaggaccgaaggcgttctagaacgcgagaagggagtatggagataaactcagacactgacatgagtactccagtttcaagatcacagagcaagagacaataatttatcaatctgcgtaagctttcaacgcgtttcatgattatgagctattctttgaacttgttcttatgcattttctgtttgtttgtttttttttggttttgaattgagatgagtagagaccatagaggattgtttgtacatatgaactggatttgtgtttagagctcctacatcaaaataatatattggtgtgtacagtactattgcatcagctgttcagatctctaccacataccatacaacaacaaagtaacatagaaaccactgaaagcaaattagctcactaaccaaaatataacagtaacaatcaacactagtcaatgagaagactaaaatcccaataacactagcatcgatggagactagtatttttatgttgaacgtgcaaaatcattgagaataacaaactctcatcgaaaaatccttagacatgccaagttgttgtaaataacaaatccaatatttcataatttgagaaagagatgtaagatataaagaaattagctcttattggtgtaaataatatattgtatatttgttcattttaatcattaatctcatatttattttgaagtttataaaacactcataatatggccatctcgggtgttgtaaagtccatttcctgtaccagtctaatgattgcatgttcaaaacttggattcagtgtcagattcaccaaaagtctcgtgaaaggacaatattatcgatggagtatcaaatgcttctgatgaaattttgtttgatttgtgtgaacaaattaacaagtaaccttcgtcaagtagaagatcatatggtttcaattttcaagtgaagttttatttaataataatgttttaatcttgaagacttaaaatttgtactgatttgagtatttatgagtttttttctatagagtttattgtgatcaaatactctatcaaaataatgaatgtacatttaaaaaaaataaaagtaatattagactaaaaactcccaaattctcttcaaaattccgtttttcctcgtatgtttttttttttttaaattcataccataacaaatacacatagttaacaaacatcactgaaagcccataaggcccgtcgataccatcacaaggtaaaaaaagagttatctctacccaaaacgtatcgagagatattggagtataacaatgccaagtgttgcacaagaaagtgatatgcttttccatcatcctctgccacttggactctgattccggtgaataaaatcaataccggagaaacacgacacaaaaagaaaatattgaaaccagccaccgtctatgaaaaccgactgatggtggaaaaggaaccgggccttgtccgggcacaaagcggaaatgaaaaaccggatataaatggaattggaaattaaatagaatcaaaaatcaatttgcttagccacacttttggacttcagaggcggaagaatgggaaaaggtggactcgaccacacctataagacaagttgaaattaagagaaaagtgaagctaacatacttatcataggtttttaggggttgggactgaagagccttatacaaacaaaaaaattgtccaatacttgtgagttgtgaccacatttcacaaattcacaaaaccaagttacttcggctattttgctaatccgtcattttcatgttgttgaactctttaaaaatactaataaaattaagggctggaaaatattgtaataaaaagtagacaaccaaaattaaggaagtaatttgcaagttgcacccttatcaaaaaaggacataaatagtcttttctcttgcgaaataacattggcatcaggtaacaaattaacgccgaagtaatgtaaattcgtttatttcacttactattagcaaaaaataaaagatatcaatttattcgataacatattattttatataacatattattttatatgatatgaaattaatatatgttgacatgatgcacggtatattttcatttggtagacaaatgttactttacacgatgacgctatacctaataaaatagcaacaaccatggttaccaaatttagcttgaaagtaattaatgatatttcatgtatgaactaatataatcaaaataaaaataaaaactgctaacacttgtgtgttgagaccacttaggtaatctatcttatgaatgtaaaatatagatctacatatatagatagatgatgcataaaacgtcatatatatcaccgatgaaaacaaaaccatgcataatatatcctggctcaactcagtcaataaactatctcagtttcttttcagaaaataagaagtcttagttcgaatattttaatagtgatatcgtagaagatatgtttcctaagaatttatctctaatctcaacatccctttttaccgctacttgctagtctaaagatactatatatagttccaatatttcatttttaggctctattttttatgtgagtatgagacctcttaattcatcgcatgtgagatttggctaacctattacctataaacccctaaagtagattattgtagaatctatgtttagtacaagaatgtatctctaacctcaaaaacccttttttatcgctagcctcaagatatatatccttactagataaggcccgcctatttaggcgggtgtatccgaaattttcaaatattcgaacgggtctaaacttgaaaacccgaaaaactcgaacccgaacccgaatagatatccaaacatatctcaaatataagtataagtataactaatatatacttatacataaaaaatattaggacttttttgatattttagttatttttgtgtatttttagatatattcgagcaaaactactcgtgttgttttgggaatttttgaaattttcaagtaatttaatagatttgcacacacaatttgatatttcaatatataaataaactcgaacccgaacccgaacccgacccgaaatcttaaattacccgaacgggtcctaaacttctaaactcgaaaacccaaacccgaaatacccaacccgaatacccaaacgcctagagctaataattaatagaaaaacagaaatccacaaaaatatttagaaaccaaacattgttgaaaatataattttatatatgccgtaatcttgtaagttaattttaacatcatgcaaatattaaatgagttaaaattaataaatgaaaataattgaaaaggtaaatcctataagctaagctatttttctcaaaatgttctattttcacttatgattacatgagttaaagacaaatttgttaattttccttttattgaataaatgttaattgtttataaatatatagacatataaattagtatatgtaaatttgtttactttttaagattttctattctttttaaaaaataaaaaagttaaattttaaatgacacatgtaaacatctgatcgtttgacttgacacgtggcacgatcctatgagttagcaactttgaaaaccatactttatataataagattactagtccaaaagatagcattacctcttcattcctcgcgtgtaagacgatttggctaaacctatgaaaccctaaagtctaccacatacatacataggaataggataatgatgtccattactctttttatagtttattctctttgtataccttcaccactgatgtatatatatacacatgtatatagctcatcattcttcatctcctaagacattcacaaaaaatgtcattacctaattcactcttctatacatttttcttgatcttattctcaacgattcgaattgctcaaagcatatatttaagtccatcaccggctccaaatccggcttacaatgataacgacaatattgcgccaaccgtcttcgacgtgacttcatttggagccatcggcgattgctcgaccgacgacacgtcagcattcaaaatggcatgggacgctgcatgtatgagtacagggcctaagtcagccctgcttcttgtcccttacactttctgtttcttggttaagccaaccaccttcaatggtccttgcagaacaaatcttgtactacaagtaagctaatttcataatcatactttaatgttctgtatatagtttttcatgtacggaaattttcttccttatagatcgacgggttcattgtatcgcccgatggaccgaggtcatggccatcgaactaccagaggcagtggatgatgttttacagagttaatggattatcaattcaaggctctggtgttatcaacggccgtggtcagaaatggtggaatcttccttgcaaaccacacaagggccttaacggaacgactcaaaccggtccttgtgacagtccagtagtaagccatcgcctcagaatcacactttttcttgttatgaaaaaattagtgaattacatttgctaaaaatgtcattttgattcgatatcaggcgattaggttatttcagagctcaaaagtaagaatccaagggattaacttcatgaacagcgctcagtttcatgtaaggtttgacaactgcagtgacgtcgtggttgattccgtgataatcaaggcaccagcttctagtcctaacactgatgggatccatattgagaatacacacaatgttcagattcgcaattccatgatttccaacggtatgttttcccgttttcgcagttgcttaatagtaaaatttcattgattccaatcagttttatgttacttatttggttataacaggagatgattgtatttctatcggagccggctgctttaatgtcgatattaagaatgttacgtgcggtccaagccatgggattaggtatcacattcataacttgcattaatatttccatctgccaaactctatgcgcctctcttatagaggaggctttagattcccagcctttaaggctctgtttctcagaaagttttgtttttttggtttgaagtgtgaacaacgaacctatgggtaatgttgcagcataggtagcctcggagtccacaactcgcaggcctatgtctcgaacataacagtgacaaactcaaccatatggaactcagacaacggtgttcggatcaagacatggcaaggagggtcaggctcggtttcaagaattgtgttcagtaacattttgatggtcaacgttcgtaaccctataatgatagaccagtactactgtcaaaccaataactgtgctaaccaaaccagcgcagtcattataagcgatgttctctatgcaaatatcaaagggacttacgacctgagaagcccacccatacattttggttgcagcgactctgtcccctgtactaacctcacactcacggaagtcgatctgtttccttccaaaggccagcatttggaaaacccgttctgctggaacgcgtatggaagcatgaagattacagtaccacctgtttattgtctactcgatgcacctccggacttctaacagaaaaagatatgttcatcgcagttcaccaacttgtattcagattcagaaccaagtatgaacacaaaaatgtgagggtagcttcaatatcagtaaagagtatcgaagaacttagtctaaaggttagacattaccctaaaagtatgtaattttttaggatgcacactatatacagttgtgataggctcaaagaagtcaatctagtttgtaacataaataaataaaaagtactttgagaaacagaagaagacccttaaatcagattcatacattgaattttcctcaaaatgattagtactttgagcagaaagattgcatatttccaaatctcattgcattggcaccactggcaagtaggcatatatcatttttcatttgataccacttttgaagaagaaaatgaatctagtttatgaaacttgaatgcaatgatgcatatatgaagaggagatagtagagaagtgaacttatattccatttattgataagcgaatttttcccgtggggagacaatcggtccatgatgcacatttcatgaataagaatagccacatttgggataacattacttgcaaatagaagcgagtacctccagcagagaaacagtgaatctcatttgggtttcttcatccacggcaacgaaaagaggaacgtgaacaaagagtgatctggtcttattctgctctgcaaatctcagagaatggtaatagacatagttacacacaaatcgacctgcatcatctgatgttatcacttcaaagccattcttctccaacgcctttgttatctcttcaacaggaagattagtctgcaaatcataaacaagattcaacacaaaaacaagaatggccaactctgcagaatcaggagacaaagtcaacatacctttcttacagttgagattggaccatcagagggaacaattggcaaattctgcagaccacaagaatgtttcatggaactaaacaacttatcaaacaaaaacaaccaaaggggagtgaacaaaaacctgaggtttccaacccaattcatcaggacaacgaaaagtcgcttcattcacagcttgttgctcaattgcaaattttgtagcgccactattaactccaaagtgaacctaaaagagacatcacaataacttcagagaaacttcatcatatagaatcaaatcagaaatcacttggcttaactaactaactaacccatatggtttttccggtcaacgactctgactcttttgtgttaaccgcggattgtagcaactgatagagagaagcaagagctccttgaccagcagtctcaagcacagtacaacttccaagattcacatctttcgaaacacaattcttagccaaatattctttcaaattgttagccattttctctgtaggattctcagctactccatggaacttcttgaaccctgtgatatgaatcgtcacacccgttggtccttcagaacccatcaatacaactgaaaacaaaaagctgtttctgtcagatatattagattacaggacactgacagtgtcacagtgactctatcctattaacaatctaaaacaccagccagatttagaacaatcagacaacactctatactcaaatgacaaaaacgaatccagatctcaacaagtttaacataaagttaataactttatcaacattaagaacaaagtttgcagcttttttctatttccgtacgaacccagacgataaaaagatcaaaaattaaaaattctaaaaaaacctaactttagatcaaacccagttcaataagatgatcaagaaacgtaaaaatcgaaacttttacctcaaagagacagatattgaaaacctgagacgacgaacacaattacacaacaaccagtcttcgagtgaaatcgatttgcctgtaaaatctgagagagagaggaaatgtgacacaacaaccagtctttgtccttatccaatcaattgaaacctaactttaatcatgttccactttggacggaagtttgataaatcacaaaacaagacattaagacaagaggtacatatgttttgtattcttttattccatataacaaaagtggtaggtcacttctcaaagagataataacaacaaatcatcatcaatgattcaattattaaaacgaataatgttaagatgataattgagtggtgcattgatatgtgtgaaacattctcttcttataaaacaatataataatacagacatctcaaactaaaccaatagaagttgaaccgaaataaaccaatagaaatagaccattctcaccagtagtctctacaagaacactctccattgttgaaatgatggaatctgtttgcatctcttagaatgatctctctttctgtgactttagaaatgagtttaatggcggcatgacaatctccacagactctaaggttcttcatgactcgaataggtactccttcgggtagctttaagagtccataagctaccgcgagtctttcactgtgacggcttaaactatcaactttctcttcctcgtctacatcgtgtaagacatggctgcaatcaggactataaccagcttctcttaataatccatctgttttctccaacatcattagtatcatcgcttgctcgggatggtttttgatacctccgcgagtgaacatgtgcactttcttccctacctcaatccaactacaaccagggaatttacttacattgtttgtcctcatgttttttcttactactgcaacatccccccacttggatcgagatgcatttatgctcgatagcaaaacgtatgtaccagcgttatctggttcattctcgaaaagtttctttgcagcaacttcagctaaatccaatcgtgagtgagttttacacgctcctaacagagcaccccaaactgtagcatctggcttaatagtcatactttcgatcaactccattgccttatctacctgtcctgcacgcccaagcatatccaccgtgcaagaataatgctcaaccgttggagtcacgcaaaactttgattccattgattcaaatatctcaagcccttcctcgagttttccagcatagctacatgctgtcagaattgcaattaaggtcactttgtttggcatggtaccagatgatggcatctcgtgaaaaatcttaagagcttcctctcctagaccatgcgacgcatagccagaaatgattgaattccacatgataatgtcctttgaggaaaacctgtcgaatactagctttgcttttacaagctcaccacatttgacatacatggtcatcaaaacagaggcaacatagacatcatcatcaaactgacatctcaccaaatgagcatggacctgtctaccatattgtagacttgctaaagtggcacaaaccgaaagaatactgatcaaagacggaaaactcggtctaactccttgtttctgcatttgagcaaacaaatcaagagcctccaattcaaaaccttttctttcataagctttaatcattcctcgccaagtcgcattatccctatcctccattagatcaaaaaccctcctagctttcgatatctctcctacctcaccaaacccaacaatcatagcattacacgcaataaccggcttcatcggcatcacctcaaaaaactcctcagcatcctcaattctcccactcaaagtataccccaaaagcatagaagtccacgaaacttcagtcttctccggcatcacttcaaacaacttcctagcaacatccactcgattattctgcctgtatccagtaatcatcgtagtccaagtaacaacattcctctccctcatctcatcaaaaatcaaccttgcctcatcaactcttccttctctacacaacccaccaatcatattagtactcgctacaacatctttaacaggcatcatatcatacaacttccttgctttatcaatacgtccatcatcaatcaaaccaccaaacatcacagtccaagaaacctcattcctctcaggcattctccaaaacagcgactccgcttcaccaaccataccttcttgcatgtaacctttaaccatcgcggtccacgacacaacattcctctcaggcattagctcaaacacattcctagcttctacaatcatcctattcttaatataccctgaaaccaacccgttccaggaaactacatttctctcagacatttcgtcgaacagttggcgtgcttctttcggtaacccgtttgagaaatacccagatacaattgagttccatgaaccgattgctttaaactgtaacgaatcgaaaaactttcgtgcttcattgattttcccgattcgtgagagacgtgagatctcaaaactgcaattcactccagtgcttgtcaagtaagttctgcgtaagattagctttaaacgcttcattaatcaaactgattctaatgagagtgattcaaatgtggtttaaagataataatcatgacataaaatgaggcgcgaaagctctaaagctgacaattttgggcagagcgtttgtataagggtttttagaatttataataattgaaattatttattcagctttaatggaaaaatcaagttaataaattggatcaatttaattaaccggttactgattcgtctttaatgtagatcaaatatggagaatcttttaatggcgtcgtactatgtctttaaatgaaaaaaataaaataaaattcgaattgttttgatttttcagagatcatcacaacaacaacgacaaatggtttatcttctaaagtaatagttttgagtaatcaagtgaaattctattatttcaaactgttctttctaaatccaacattgttattccattatccgtttggtgaaagacaaaaaccgttaaatattgtagccttgtatttttgaaggatttgttcagccaaaagctatataatttttggaacgaaataacaaaatttaaaaacatgttaaattcataatggaacataaaaagtttgttcataataaatcacaatcaatatcatataaatgaattatgttgaaatttttcttctcttcataagacagtagatttataaagaattctcatatagaaagagatattcaaaaaaaaaaaaagattttcaaacaacatgtgggttttggtggctaaacggcccttgcaaacttcctaagagtttcagctcttacaacttcaatgatggctcgtgtggtaaaagcgagagcgttgctacatcttcaacatacgtgaggtttttgtcactgtagtcaaatgtttaggagactacaaaggaatggtagttaaccgcgagatcacggccatattagctaacttctcttacggagctggaggtaagttacaatactacatttgggaaccatttattgctggttgagcctcttcagtaaacgtggtccattgcgatattagcatttggacattcatgatgttccacatgccacggttcaacactcttcttcgcaatgtctcatttctcattctgaatttaactgtcgtgtcatcgacaacaaatacgtctatcaaagatgatttatctctcgattttcaaatcttgttcactatcatgtgaattttctccacttgtggagggtttgcattgacaaactgcccaattaaaaaatcttcccatagaggctttgcatccataaacacatcttttgggacaacaactcttttctgaccatcaacttttgatacctcaaacttctgctttgtgtgagtttgaccttagcaacattcacccaagattctttaacgacttgctcaaaatccatcttttcagtattaaaattggaacgatacataaaaaaatcttataaaacgagactaaaaagtattatcatagtcattcattaattaaattaaaatcaattgaatctatttttacaaatttcaagtaaattttaaacataaaaaaaaatcatgaggcgaatatacttttttaaacatcaatttattggattataaattatttacgtagttattaaataaaacagtccttaaaaaaatgaaaggataatagtaagcaaatgtgactgtctgggcaagtactttacatatatgtattttgcaatgcatgtgacgatagtatgatattttagggccaactagttagacattttagactttttgggtcaacaaggtacatcgggatgtgactttgtattgagatttggtatcccttagatacatttttagatatgagagctggatctgagattgggggtagagacatgggcagacacaagtagtaaggaggaaatactactcttttttttggataaataattttagaactggttaattatattatcaagaataaaaattcaaataatcgtttgttgcgcacactgtatagttttaaatagtgaatcttattagtaagatgtttctctacaatgaatattgttaacgattgtttagtttttcttttcgaaaaagatgctctggatcgtcacataacagagacgactgtccatgctcgtagtctcggtgaaggtgtcagttggcatagtatcctagagtcttacattttttgttaacaatgaatatctactgttgcctctctggtctccatcaaatagcacaatgaaaccaagtattttaaattgtattttcaaatttgttcaaaaaaattctatacgtgtttaattaaaggactatagactatagtaatagtaaattaagactaattacatatttgaccaaatctacttcaaactgaccaatgtttcactacaaatacgttcacaaaccatcatcatctcttcacccccttccttcaaatatagaaaatatggcaacacaaaacaagattcagaaaaactctctcatcattttcctcttcaccttagtcgtcatcgcccagaccgctacctctcagaactgcctcaccattggttgtcctggcattaacgagtgttgtagccatacgggttactgcggcaccaatgtagagcactgcggcttttggtgcctcagcggcccttgccaactttctaagagttccagctcttacagactcaatgatggcccacgcgggaagatcgaaagcattgttacacctgcattattccacagactcatgcgtaaagtcggaagtaattgcacgggaaaaggtttctacacccgtgaggctttcatcacagcagtcaaatctttcgaaggctacaagggaacggtagctaaacgcgagattgcggccatattggctcagttctcttacgaatctggaagtaagttagttactatactaaccattaatttattttttcttaaatgtataataatgttaagaaattgtgttatcttaattaattaatgtgacacattcgagtagctgagccaatgccattggactaatccatttttttcatgtacagatttttgttacaaagaagaagtaacgagtgagacatattgctcgtcaagcaagacatacccttgtcaatcgggaaagaagtactatggtcgcggtctcttgcagtcaatcaaatggaacgagttctatggtgaggcgggaaagtaccttggcctccctctattgaaagatccagatatggtggctcgtagtccggaagtggctttcaaatttgcaatgtggttttggaagaccgaagttggtccatcactaagactaggatttggagcgaccacgatgaggatcaatggcatagagtgtggtggtatgagttggaatgctgaggctatgcagaacaggattaaccaatacttggagatctgcaagtggtttggggtgaatcctggtaaagatctatattgctaaaaggcattccatgtgatagtacgtttaacttaatttaagttgtcgattgtaatgtttccaataattaaaggtttcgattgtggtgtttccagttttaaagattaaaagtcatcaggtgagaatataatatgtaataatatcacaaatggaaaaaaataaaataatggctacaagtattgatactgtgatacatgtgccaacggatatatggaaggcaaccaggctagggtgggcataatatccgaatccgatcacccgtccaaaacccgattgaatctaaatcgaatccaaactcaaacccaaacttgtatccaaacatacccacaatttaaatacatagtaataatataataatctaagtgtccaaaatattttgatttttggaatacaaaacaataataaacgactaacaaatgtgtcgattttgatttgataatcaatgcaagaagccaagaacgttcgaatttgaattcacttcggatctcttatagactttctctctcagggtttataatgggcctcaattgtctttcctcgataagcagccttctgcgagttctagactgaactttcgggttcccttgtctagagggggaatatggtattttgtacaatttacagagtgtatttttgacctgaaaaaatttgtagagtaaattccaacacatactcaaacttgatatttagtgttatttcaatatcgtaattaatgggctgatgagtcagctaacacgtgtttaatgacgtagagttggtttgtaggtgtaagtaacagtttttaactaaacacataaatcttaactaaaactttggcacatatcaatcttagtaagatgagaagcttgataggagttcaagacatgactaaggccaagttatagcttacgaggcaaaatgttggataagattcaaatattgcttgcaacctaagatttctctaacaagattggttaggataagaatataagataggttttatgcatgtaatagaattaagagttatctagttctaatagaaatatgaatagcaaagatgtacaactactatgtatatcagtgttgacttgtgaagttgagaataagagcttttggtgttttgtttttgagctagttttctaaacataagttagtacgtttgatatatttcttttgaattggtaccagtgcctaggtcgaaaaaggttggcatagggaggtgcgcttgggttgcatgttcggtgtgggaggagtgttgggctgtgtggccttagcccatttatattgtatagattaactaggtctaaacttatcgtgtatataaaggcattgcctcttgccgtaatcaataagaatcttcttttcacaacctcgattgattcttgacatggtatcagagcacaatacctaactactaaaaggtttttgtgatcgattctgtgatctctccttccgctataagagatcgctttcttattccttctaacttctctacttaatacttgcatcaaactctccgttcatcatgagtactgaattggctctcgctagctccaccacaccagctaggactgaaacaaggcgtacaatctcgccatatgatctcacatccggtgataatcccggaactctcatctccaaaccgttgcttcgtggacccaactacgacgaatgggccacaaatcttcgtttggcgttgaaagctagaaagaaatttgggtttgctgatggatctattccacaaccagttgagacagatcccgatttcgaagattggactgccaacaatgctcttgtggtttcatggatgaagctcaccatcgatgaaactgtttccacatctatgtctcatctcgacgattctcatgagctctggacacacattcagaaacgctttggtgtcaagaatggacaacgtgttcagcgactcaaaacagagttagcaacctgtcgtcaaaaaggagtggccattgaaacttactacggccgtctctctcaactgtggcgtagcttggcggattaccaacaagctaaaaccatggacgacgtcagaaaagaacgtgaagaagacaaattgcatcagtttcttatgggacttgatgaatctgtgtacggagctgtcaagtcggctcttctctctcgagtgccactaccttctctcgaggaagcttacaatgctttgacacaagacgaagaatccaaatccttgagtcgcttacataacgagagggttgacggtgttagcttcgcggtccaaactacttcacgacctcgagattcttcagaaaacagagtctgtagtaattgtggccgtgttggtcatctcgccgaacaatgtttcaaattaatcgggtatcctccttggctcgaagaaaaattgcgtcttaaaaacactgcatcttcttcacgtggtggtttaagttcgttcaaaggaaaacagagtcatggtcgtggatcttctattaatcatgtcgcttcttctggaatggctgccaatgttgttacgaattcatcgctcacttctccattgacatcagatgatcgcataggacttagtgggctgaatgattcacaatggaaaattttacaaacgattcttgaggaacggaaatctacctcaaatgatcatcagtctggtaagtattttcttgaatcttggataattgattctggagccacaaatcatatgactggttctcttgcatttctccgtaatgtttgtgatatgcctcctgttttgattaaacttcctgatggacgttttacaaccgctacaaaacaaggcagtgttcagttaggctcttctttagatcttcaagatgttctgtttgttgatggtcttcactgccatctcatctccgtttcacaactgactagaacacgtcgctgcatttttcagatcactgacaaagtttgcattgtccaggaccgcaccactctgatgctgattggagcaggtagagagctgaatggcttatattttttccgaggagtggaaacagcagctgcggtgactagtaaggctttgccgtcttcacagttatggcaccaacgtttaggacatccatcctcgaaggctttgcatttgttacctttttctgatgttactagtagtacttttgattcaaagacttgcgaaatctgtattcaagctaaacagactagagatccttttcctttgagcagtaataagacgagttttgcttttgaattagtgcattgtgatctctggggtccgtatagaaccacttcaatatgcggctctcgttattttcttactctagttgatgattattctcgagcagtatggttatacctcttaccatcgaaacaagaagctccaaagcatctcaaaaacttcatcgctctagtagaacgacaatacactaccaacatcaagatgatccgaagtgataatggttctgagtttatttgtctctcggatttctttgcacaaaaaggaatcatacatgaaacttcttgtgtaggtactcctcaacaaaatggtcgcgttgaacgcaaacaccgccatatccttaatgttgctcgtgctctccgatttcagtctggtttacctattgagttttggagttattgtgctcttactgcagcatatctcattaacagaactccaactccattacttaagggaaagacaccatttgagctcatatataatcgtcctccaccactgcagcatattcgcatttttggatgtatttgttatgttcataatctgaagcatggaggagataaatttgccagtcgtagcaataaatccatttttcttggttatccatttgcaaagaaaggatggagggtctataatatagaaactggtgtggtttcagtttcacgtgatgtagttttccgtgaaacagagtttcatttccctatctctgttatggattcgtcaccatcacttgatccggttctcgttgattcatctgaattagaagaaatctctatgactcctccggtcactccgtcttctccggctactccatcttctccggtcactccgtcttctccggttactccgtcttctccggttagtccgtcttctccggttactccgtcttctccggtcactcctgtatcttcaactacaacctcagctgcgatagacaccattgaggatattaccactgatcttgaggattcaacctctatggatttttttcctgatgatgaagatgagttttctcccactgctacagaatctcctgcttcatcgtcatctcctgtacaccctccagcagttcaactagagcttctcggtaaaggtcatcgtccaaagagacctcctgttaaacttgctgactacgtcacgactcttcttcatcaaccattcccttccgcgactccgtatcctttggacaactacatctctagttcacgtttctcagataattatcaagcatatattctcgctattacatctggaaatgagcctcgaaactataacgaagctatgcttgatgatcattggaagggtgcggtttcacatgaaattggttcgcttgaaaatcttggtacttggacagtcgaagacttgcctccagggaagaaagctcttggttgtaaatgggtgtttcgtctaaaatacaaatctgacggcacacttgaacgacacaaagcacgtttggttgttcttggtaacaatcaaaccgaaggtcttgattacacagaaacttttgctccggttgcgaaaatggtcacagtccgcgcttttcttcagcaagttgtttcacttgactgggaggttcatcaaatggatgttcacaacgcgtttctccatggtgatcttgacgaagaggtatacatgcaatttcctccgggatttcgtactggtgacaagacaaaagtatgtcgtttacgcaaatctttgtatggtctcaaacaagctcctcgttgttggttcgcaaagctcacatcggcattgaagaactacggttttattcaagatatttcagattactctttgtttatctttcacaaaaacggagttcgacttcatgttttagtatacgtggacgatttgatcatcacgggtactactattgctgtgattacagagtttaaacattacttaagctcttgtttctatatgaaggatcttggaattttgcggtacttcttgggaattgaggttgctcggagtcctgaaggtatctacttatgccaacgaaagtacgcacttgacattatcacagaaacgggtctccttggtgttaaaccggcttcttttccattggaccaaaatcataagcttgcttttgccactggtgaaacaatagatgacccacttcgataccgtcgtctagttgggcgcattatttatcttgcgactacgaggcctgaattatcatatgttattcatattctctcacagttcatgcataatcctaaaccggctcattgggaagctgctcttcgcgtcgtcagatatctaaagtctagtcctggtcaaggtattctcctacgtgctaatacacctttggttctctctgcctggtgcgattcagactttggagcatgtcctcattcagatcgatctctcaccggttggtttattcagttgggtggctctcctttatcttggaagacacagaaacaaaatgttgtttcccgctcttctgccgaagctgaatacagggctatggcagaaacagtgagtgaaatcatatggatccgtgaattacttcccgctctcggtattccgtgtactgctcctaccacactccattcagatagtttatcagccataagtcttgctgctaatcctgtctatcatgctcgcactaaacatgtgcgtcgagacgtccatttcattcgcgatgagctcgtcaatggcactatcgctactaagcacgtctcaaccacttctcagctagcggacattctcactaaagccttaggacgaaaagagtttgcagactttcttgccaagcttggtatctgcaatctccatataccagcttgaggaggggtgttgggctgtgtggccttagcccatttatattgtatagattaactaggtctaaacttatcgtgtatataaaggcattgcctcttgccgtaatcaataagaatcttcttttcacaacctcgattgattcttgacaaggagccctcaatgtaacacgaaaaagaaatataattccggtttgggaaatataattccacctaaaaccagattggtgcgcttggtttatacagaaatatatagagatgttatatcgttatttgttatatcaattcacataattccgtctcaaaacccttacaacattataatattttgtttcagcaaatcggagataggtttttttcataatggtacaaattataacagttgtataagaaactattacaacacactcttctattatttccctagtgatttgattacaactagaaagttttactattaaaaaaaatcgtccaagttagaaataagcaaaagaataataaatttggttcttagcgacggcagaagaaatggaacggagttggtggcttagagtaatgcattgaaagaactttcatggctacaatggcattagctgtctcggtgtaatgaatcccatcccagcttatgaaacgcgacccttcctcacatacattagagcctttgtgcccacatgttatcttcacattgtagttgtatggagtccctccgtatccacaacacgccatcaacggactcttaaaacctgtattgagctaagtaaagttaagatataaccatctcatttatctactaatggtacgggtaaatagtaactctacttaaccgtattggttggagtttgcaataagactgtatttgatagcgtatatgtcaatatagattatggtggcatctcgtagttcggtcctcagctcctcacacatatgatccaatccttggttaaacagagttgctgccgagttgtaactgactaagcaaccgtgctggtcgagatctttgctcttaaccatagaaagtttttgaggtagacaacccaatggaccagtgttgtgaatccagaatctccttcctccttcatcatacaatctctggagaccataaaacccatttttaaaggttacatggtgcatactctaaagttatattaaggcgaataaactcacctttatgctgctttttatttccgtaataatttgtggaatcaacttaaccgtctgagaatacgagttgcctctagcgaatgaacgcgcaatgtcgttctgtccaatatcgatcatgtacaacgcgtttttgaatccattgttgcttatgaacatgccctttaatgaatctagaaaacacaaatgctaactctagtcaagatcattaactgattaagaacttaggataaataataatgatttgggatgaggtaggtttacttgaactagaagcgagctcgagtgatcgggatttgaaatggctgaactgcttgacctgaatgttaagcgagaaagggacgtttttgggaagagttggggatccagcaattgcaaaatttgcaccattttgaaaccttgttctacccaatgaatctaagtatggcctcaaaagacttgtattcaaactctgacctgcatatgcattattccattgctagtacatccatttaccagatttaaatgaataacacgaacataaatatataaatttggttcgcatataaaaaattatctatatgataattgaactaacttgagctatatatttttgttgaattacgttaacaattgtttgtatgacccgttatagaaatctcaatatcaaattatgctaaccaaaactaaaccaaaaccaaattttgtgcaatcaaatcgaattaacaattatttattagaattaatatgtttgaatacataagatttttttttataagatatactaaaagtttacagcattaacgaaaataatgagttatttttatttattttggttatactattttatctaaaacgaaactgaaataaactcaaatcaaaccaaaccaacaaatttcaactaaaacaaaccaaaaatttaattgactcttaacccaaactaaatctaaactcaaaccaaaccgaatcaacaaatttcaactaaaacaaaccaaaaaaaataatttactctgaaaccaaactgaatctaaactcaaaccaaaccaaattaacaaatttcaaataaaacagaccaaatgtaattatgaattgacgataaaaccaaactgaatcgaaactcaaaccaaaccaaaccaaaccaaaccaagaaattcaactaaaacaaaccaaaacataaattgacttctaacatgtgctacatggaacccactttgttctactagattctgattttcaatgaccgatttttttttgttttttcttatggatcacacctgcgacgcaccgacatttatgtcttaacacaatctggaccgtacatccaaaagtaaacgtacggtagagatcactatcatttatcaaaaacaagttttttgttctacttacataggaaatcgatgagaagacgtccgtcggacaaacgaccggtagatcgccggaaaaataagcgtccatttgggaagccaatggggtaaccaagtccagcaacaagtcctcctgtatctgaattagaatctccaaagttaaaaatcaccggccgagctgtacaactcgccgccctagagggttgccggagaattagaagagctaacgacacgagtgtaataaagaagaaggaaaatgtgttagagtagagaaagagagtagccattggagaaactttggtagtgaagagagtttacctctataacttttatatttagtgtggtccaaagaatattaaaaaatgaactataagagtggtgtagatttgcacagattattctctctgacaaaactattactccatcgtttattgtggttatttataggacgagaatcttttatgacttggaaatatgtttttttttttcttttgaattataaaacgtttatatgttgtttgatatgaattaagtgaatgatttacagttcaaatctttgatatgatctaagtaaatgatttatgttcatatttatttgatatgaatttcggtatacttttatttattatgtctaaaacccctaatcggagatctagacgatttaaagcgtaaaactatttaagattgtttaaatctgtttaatactaaaaatgtataattctaaatgcataaaatataacttttatggtttagacgttacctgccgcgtaggtctaaacaatcgttttgactgtttttcagaacactggaaaaggatgtgaaaccacacggttacaattttacaaactaagatacaaatctggatgacacatttaaatcccagagacaagctggtgaaagaaaaaaatttcctcgatccagaaacaaaattacaaatctaaactaaatcagctaaaagaaaatatatgtttacgttaataaaattttgatacatgaaatatagaaaataggaaatatgtatgtgaagtatgttgaccgcaaggaacgaaatggtaacgtgaaataggctttatctttggaaatcacagttctcatgtctcctttgcaaaatgaaattaaggaccacctcttcttttctttgtcaagtctagagaagatgtttgcctatgtttataaaagcttttgatgagttttcattaccattaatatcacattctatcatccaaattttttttatggtccatgcctcctttgatagtacttaaggcaagcccgcaaacatagcatattaacaatatccatctaatcggttgagccaactgaatttggtttgaaaaatctagctttatatcgatagattatgcaactttgtaatatatcaaagaaaacatatattatttagccagaaaaaaactttgtaatatgtcacaactcaacataaaaggaaaaggaaaaaaaaaatttaagttaagtgcaaatgtaccaagagacatgtagccttagcttctctgtggatgttgccaagtccatattatcaagttcagttacataacattaagctgctcccatcatttttttatgttccacaatcatcacatcattgctctccctctgcgtctttaatctgattctcgatttctgccttctcctccattaaggctcctattttttcatcgatcttcgccaacttcgttttcagcttaccgatgtcattaccacccttctttttcttcacatctttgtctttcttttcttccttagcttttgacccttctattttaacgtccttagaatcatctttcttctcttcttcgtcctccgtcattttcggttcctttgtatctttcttcttgttcttctttttatctttcttcttctttttcttcccctcttcactctcacccccttctactttagatttcttcttctcttcagtatcatcttcttccttcttctcagcttctggttcttctaattttatatctcttgacatcacttcagtttcaaggggattctccttcttcttgtcttcctttacatctttttcgcccttttcgctcttcttctcctttttcttattctttttctgcttggtttctccttcatcatcatctttgtcttttgtttctttctcacatacctcatcgatgacggtttccttcttcttcgccttatctttattcttctttttctttccctccttatgatcggcggcttcatcatccatctcttgctctgttgcatcatgttctttcgtcttctttccttcatcttctttttcaggcttctctccctttcctttctttcccttcagcttcttgtcttccttctcagtagattcgtctttctctttcttctctttatcgggcttcttctttttttcctccgcacatgattcatctttctctttcttcttgttctttttactatctttttctttcatctcttgatctgtttcatcatgttctttcttcttctcttcatcttctttctcaaggtcacccttctctcccttttccttctttcccttcacctttttgtcttcattactcttagattcttctttttgtttcttttctttttttggtttcttctttttctcctctgtacctgattcatctttctctttcttcttgttctttttaccatcttcctcttctaactcttccttttcttgtgatacatcctcatgtttcttctctttatctgccttcttatttttttcctctggacccgactcatccttctcttttttattcttcttctttttaccttctttttcttcttctaactcctcgtgtttcttctctttgcccttcttgtgttccttctcatgctcttccactttcacatcgctctctttaacctccagatctccatggccttcttcatgtttcttggagaccatttttccatctttctttttgtcatcatctttatcttcttttacctctgagtccacgtttttgccctttttcttttctttgtccttcttggattttccactactctcttcatctttctttgctttaaccttctcaattgactttgccttcacttccatctccacctcaacattttcccccttctcttttggatccaattcctgcgtctttattttgacatggagtttctcttccttggcattttcttggttcgatgacataattctctgctagaaaatgaaacaaaaaaaaaaacacttttcttataacgaaattcattatgaaaaagagctacactttttctatttaaaagcaagtggactaatagtttctgcctatggtccttttcgtttgccagcaattagcgctagcgaccaacaaccaaaataatcttcgttttatggttatggctcaaccacatatttggataaccaaatcatattcagtgttttataatcattggttcaccattttatttagacaaaacatcgtcaaaccagaatttactacatttgattttttttggtagctaggcgtggaaacctatcacataaatgtcttgttgaaccaaccaatacaataaaaacatgatcggtgatctctggtagctcaacgactattatacaaaacataattacaacgactaaatgaacatgttatacacctatactctacaatcctctctgcaccgagattcaataaactaaatgtaggtcactatatattagcaagcactactactcgttgaaaaaaaaaaaaacaagaatgtcgaattctccaatgttattttttttttttcctaatgataaagaggaaaatcaccaattatagtcaattatagaacaattgtttccttttcttgtaagagagaggctagagcaaacagattaattcaccatatagaagatgagaccaaaaaaaaaaaaaaaagtctacaaagtcaagggcactaaatcataaaaaacccaaaatctcagatctatcaagaaaacgactattccaaaaatggaaattataagaacaaaattctttggacagagatcaaacaagaaaggaacgagaaaaatgaactttaggtaccttagattatccaaatttgtagctgcaaaagttgttcctgtgttcaagaaagaaagacctgtaaaatgatctggatgtgtttggttatatatataagaagacttaaaagataatgacttaatctcgtaacgagtcacacggacgtgacgctgaaactcacacacgttggtgccacgtctttgtctttcctcttttgctctacttttttctcctcataggtgataggtcccataagcaatgaaataaaaaaaatggtaattgacttttctccaaacattttcgaatctgattttctttttcaaggttttataacctctacattccagaatatgactaatgacatcattatccaattattttttatactgtaaactcattattatgaatattctttatttcaaaaaattaccattgatttataagtttattagtataatatataacatatggaataaaacttttatttaaaaaaaaatatttttccccaaaaaaagtaggattaataacctgattaataaataaaaagtgttatatttttaagcattgtatgcatttactttatcatagttgtcttgtttttaagagttaaaaaataatgatgaacaatttcacggacaacgattccacgataaagctttccctgcaacactcagattttctaaagacggttttgcattgcgttttctgggattcgaaacccaaacatgatgtacaagtattaatgaactcttagttaaccattagattaaaaatattttcactattaattttctcttaaaaatattaataattttttgaaatcaaaaattatagttattttattttaataaacgagaaacactacaaaaaaagttaactgcatttagataatttaataaactaaaatatccacataaaaatttcaaatttatcaaaaataaaacatcaatttgttttttgttttaaattaaagatttgctattgattgcataaggaagaaaactttacaaagccgaaaggcctaagagcccaacacacacaaaagaagaaccattttggatcaagggaaccgaccatgggtattagaagtagtggtataaagcccatcatatcccaacacataacccacgaatgtttaatattaaaagtttgttgttcggctcatgattagcgatgatcatacagaaagtttgtatctaatacgtgccttgaattttatgtgtacaacaaacaaattaaattattcaaaaccataaattataaaaaataattacagaaataaaactatattaagagcgagcctaccatccggtgtgcaactttctagtttatatacagtggcggatcaacgttaatgaggcaaattggttcaaattcatctaaataagactagagttcacaggttcgattcctccttataacaatttgctcccaccaattttttttgctgggtccgcccctggttatatatatacttctacaccaggtttgggttcgagtccacacataattaacgacacaattatagtgcacgatagaatgaactaaaacagctagagcgtagagggctcattgtctataaaaatccttcgttaacttgcaagaaaccaagagtagagggctcacacttaagtctcctacatgacgattatatttcgtcaaaaagaagcaattagttagctttacagcatatcatttcgcctaggttttccatcgtacacgtaaattttcatgcaagaaagcagaaatatacaaatactaacttttagatactgaaaaatgagatcagattctagtcaaattttgttaaaagtatttataaatttaaattgcaagtcctcaaaaagtacgactaaaaatgcttttcttagaaaatgataataaaccggcgttttatatataagtgtttctttttctcttctgtccagaagtaaatcattaagaaccaatatggcttttcttaaactaatctccgtgataatcaaatctttgatcattctccacacaatcccatcaacaacatcgatctcactagatgcaccaacaatgattctaatcggcactactaactatagagatagttgtcccaaaaaaaaaaaaaaaaactaactagagagataaatcatattcaatacatgtactatttctactatacttaagaaaatttgtataccactatcttaactcttaacactgaacatactatacactatcttaactcccaactcttgtaaaagaatatctaattttaagaaaagacttcaaatgcttgttaaatttctagtgaagatgcacattctaaaaactggtaaaatggtaagaaaaaaatatataaaaaaatagccttattaaaatttatatctcctatttctctatccaaactacacggatgaagcttattgttattcatccaccctttttctcaattctgtcctatttcttgtgcatgaaacttctccatcttgtaatcggataaatcatacccaaattttttctttctgaaaacatatatacccgaacattaattactatcgtcctttctcctaattttgttaagaaacatgtttgtttgtttttagtactgaaaaaggatggagatacttgctagatcctatgaaccttttctctctaggacaaatcagtaaccaaacaataacttagcaaattaagcacgacagctaatacataaaatgtggatatcaaacatgcacgtcacttccttttttccgtcacgtgtttttataaattttctcacatactcacactctctataagacctccaatcatttgtgaaaccatactatatataccctcttccttgaccaatttacttataccttttacaatttgtttatatattttacgtatctatctttgttccatggagggttcgtccaaagggctgcgaaaaggtgcttggactactgaagaagatagtctcttgagacagtgcattaataagtatggagaaggcaaatggcaccaagttcctgtaagagctggtatgttatttacgaacacacacacactaaccgacacacacacacacaaatatgaatatctataatcactaccaatagtcttcgttctctctattttctattcagaaaattgattaatacccggtattaaaaaaaaaaaaaaaaatttgtttaaatgagtacaaatcattgttacaacttctttatgctgtttttacatgctattaaaggttgtgcatgaaaatttcttttgctgttcgtatttgttttacacctaaacgaagatttttacttaaaattaaagaaaaaaaattatactaattttagttacgttgcgtattgctagcttctcctataaagtcgttcaaatttttacacgcttgtcttcttgtaaatgaattcgtgggaaaattttgtatgaacacgtgtttctgtgttggaacagttctttatttttattggtgtgcatagattcttcctgataaaatatatagaaggagacaaataaaaaacagtcttagtatgtaggtataatcaaagaatcaattattggttttgtagggctaaaccggtgcaggaaaagttgtagattaagatggttgaactatttgaagccaagtatcaagagaggaaaacttagctctgatgaagtcgatcttcttcttcgccttcataggcttctagggaataggtattaattgttacctcgatactacttaactcggagagtcgtcataagttaatactaataacatatgtatattttcttacaattgttaggtggtctttaattgctggaagattacctggtcggaccgcaaatgacgtcaagaattactggaacactcatctgagtaagaaacatgaaccgtgttgtaagataaagatgaaaaagagagacattacgcccattcctacaacaccggcactaaaaaacaatgtttataagcctcgacctcgatccttcacagttaacaacgactgcaaccatctcaatgccccaccaaaagttgacgttaatcctccatgccttggacttaacatcaataatgtttgtgacaatagtatcatatacaacaaagataagaagaaagaccaactagtgaataatttgattgatggagataatatgtggttagagaaattcctagaggaaagccaagaggtagatattttggttcctgaagcgacgacaacagaaaagggggacaccttggcttttgacgttgatcaactttggagtcttttcgatggagagactgtgaaatttgattagtgtttcgaacatttgtttgcgtttgtgtataggtttgctttcaccttttaatttgtgtgttttgataaataagctaatagtttttagcattttaatgaaatatttcaagtttccgtgtttacattttgaagaaaataaaatattaatatattctgaagatttttgtttttttttggttatctacatgacaacagtaaaaatagaaaaaaaatcttattttttgaaaaaggtatgtatccggtgtttagaatactttccgaaatcaaaccgcctatatttctaatcactatgtaaaattgtaaaccaattgggttaaaactcaactaacaaactttctaaataaatgtcatttttgttttcaaatatgattgaactcggatttaggagttttacccttcagtaccaaaccttctctaccgaccatgtatggttgggcaaatgtcatgttttacaatgtttagattactaaacactttggttgagaaggcaatgctttatttatatattctgaagtcatgttttagtgttatttttatttatttttaaatgcatagattgttaacgtgcagattctcatatgggcttagtttctggattttgattatcaaaaccgtattccactcttaaatgattacgacaaaaaaatcaatactactaacaaacctatttcccagttattaattagtcaataacaattgtcaaatttaataacgtacttgctagtaataaagttttaacgacgatcatagataggtttttgaaacccatactcgcagaagttctgatacaaaaatttgtactccctctatttcaaaatattaaatgttttagataaaagcacaatgtttaagaaactaattaatcttgagtttcttacattataaacataaattaatatctattaaaaataatttgaccaatgatataacttacagcataatataaatagttaaaaaaaaactgtttactttaataatttgcataacaactagctagtctggtccaagaacggtagtaggatgagattttagaaggtcgtaatgtgtaagactaataatcatgcgatagacgatcatgcatgaattattttatgtaatacttatatggttccaaaatctataagaaccctcaattataaaagtaatatctattaaatatttaaacgataatttcatacggaaaattaatagataaattcttctatttgtttttaaatatatgtaaatgcgaaagtgtcccatgcaattttatatatttaatcaagtgaaaactcgaaaacaaaaaacttgatgtacttcaaacaagtttttttggcaagtaatacccattctgttccggttggactataaatgcatggaaaagcaccaaaaaaggcatggatactttcgcgatttttgccatttttgtatctttgttcatcgctccgttcaaaagaacctcttgtcgttactataataagttatggaccaacggtattgtcatgtatcaaaataactatgtagcatacgtgtattgtgaatcaatgaagcaatagagagataacatactgaaacgtccacatctcgtttataaaaaaatcgtctacatgcttctctttggctggacatcccaacttttctcaccgtaaccagtgaaattgtattatttggtaagaattacggatggagttagatttattttgttgtgtgtgtataaatcaatacttatacagtttttacgtgtataacggcacgcctcatgggttttgctaataaggtccaagtagtggacagaaaagaacttgtgattgaatagtgttttgtattgaaaggttaaaacgtgtttccaaatggattcaaccaaattccaacatgttcagtgtcgtacatgcgaaaacattatcgagtaaaataagttccattatactttgattttgtattgattccatagagtagaaatgtgtgctttagcttatagttaaacactatcttcaaaggggtaatgctggattcgaagtatttaattagtcctgttcgaccgaatcaaagttcaatcgattttgaaaaacaatcatttcgggtatagcttgaaacatcccaaaccacaagttccaaaagcacacatattatcaccattcaactaaccattcgggtttgataaccggtagttggatgttcaaagatctcatcagatttggtgtcaagaggataattgtgattgagttgtgaacccttgtgatggagatagtttccttgtttggatgttaagttgaattttgggatcatccttgtttcaaaaagactggaaaacacacaaaaaaaaaaaaaaaaaaacttgcaaataaatttaatttttagaaattttatattgtagtgaaaaatgtttgcaaattttagctggagatgtttttccatttggaattttttttcttaattttgccttttattttacattgtatattgctagcttcttcttgacaagaaagaacgatgtcaacctctgatttgtcttcttataaatgaatttgttgaaaattgctgtacgagcaagtgtttttgtgttggaacatgtctctatttctattggtgtgcatagattcttcatgataaaatatataaggagacaaataagaaagcagtcttattaggtaggattgcctaaaatattcgttagattcgcttggatctattattcggttaaattgattcgaaaaatctgaatatccataattttacgaagcaaatcaaatattaaaaattgatattcgttaaaaacagaaaaaataacaaatattaaatttaaataggcggatatcctctctaattcggtatacatgaatatatgtatatgtatatagataagtataaatatatatattaataatcttactctttttatatgtaagttttagaagtttatgttcatcaaattagttatttaactattagtttaaaaaattgaaaagagatattttttccaatgaagttttacttattttggattaaatttctaatttttatgtttttaatttttataattgtttttgagatatacttaacaaatcgaatatctagcaaataactcggattttaacggaatatctggacagccggatattcggttactttcgaaacaaatacgaatcagaaaactaattattccgatatagcaaatcggatcacaaatactaccaaaatccatgatatatgtgtcgtgtccacccctattagtaggtataattaattgtaattagtggttttgtaagactaaatcagcccaggaagagttgtagactaagatgcttatactatttgaagccaagtatcaagagaggaagatttaggctctgatgaagttgatcttcttcttcgccttcccaaccttctaggaaatagtatttgttatactttatactaattaattacttcgggattcataagattattaataacatattattcgtataatgtttaacaacttttagattggctttgattgctggtctattggctggtcagaccacaaacggtgtcaaaaattacttgaacactcaactgagtaagaaacatgaaccatgttgtaagatttagataaaaaaaaaaaaaaagcattacttccaatgctaccatactgggctaaaaatggatgtttttaatctcgaccttaatccttctcatttaacagcagtggcctaccaaaagctctaacatctcagttgctttggactcaaaaacaattatgagcgtatattttgtgactaattagcctttatatatggtttgtacataatatagttgaaaacttttggagtattattaatgtatatatgtatgcttagggttttatgaaaaattttctaatacgttctctataattcttcatttcgtaagcaagcattagagctaaatcatcatctgtaaatcttaagtaaatgtacgattaagtacaatttcgattaaaaggtacaatttcttctgttttctttttgtttgttagaaaagtacgattttctatttttgcgttgaaaagtatgagtagttttctattaaagatgttgagtcttatttgtttcagtaatatatgcgacactgacttttgttagcgcaaaaaaacatgaaagctgttgctgtctttcttataaaaaaaaacaactggagtcatcttctaatcatttatgaagtattttttccaagcaagaaactccattttttaatccaacctctctggaaaatatgttcacgtcgttaaatgaaaaaaagaatgacctctgtcgattatgctaaccacaaacctattagtgtatattgtttcaaatttggccaaaagaaaaaaaaagtgtatatattgttacaattttcttcttctttttttggtgtttcttgaaatcgattaaccccagataacaatatagcatgatggaattagttgactacaaaataaaaaaagcacgagggagtagtctctgcaatgtcatgcagtttatctctgggttacaacttacaaggcttcacactccctagccaagttatagctatatcattacatcaatattgcctagccaagttatagctatatcattacatcaatattcaataatactaacgaaattttgtcagttattagtcaacaattaataataacgaaatattgtttcaatcaacaacaaaaacaactagctagtcttgtccaaaaacgatggtatgtcgagcaacggcgattaaataagcaagtgtcattagctcaattggtaaagatcctagccggagcttagaagttgtcggttcgagtgacgcttgaaacgaaactaatattacatattgtggtttcgggcctgggggattacgggtttcggcctagaatctcctggtattcaaaaaaaaaggatctaataaagtgaaaactaacgattatacaatagataaaacgataacttatgagttattgtatgtggtatatatatatatatatatatgtgtgtttctaaaatctatgaaacttttaattctaaaagaaataataatttatttactgatatagccaatcaatatatctcttttttaagttttttgttttgttttctttgttttcggtaattacttaaatctagaaaataaaataataagttttatgtacttcaagcaaaacttttggcaagtatgatccaatttcttcgggttgaacttattaatgcgtaggacaaaaaacaaagaaaaaaacatggaaattttcgccatatcttaaaagaacgtcttgtcgttactatcataagttatggaccataggtattgtcatgtatcaaaattaactttgtagcatatgtgtatagtgaatcaatgaagcaatagagatctaacattaggaaacgtctatatctctttggcatgacatctcaacttctcaccgtagccgttgaaagtgtattatttatcagaaaaagaaaaacaaaatacattttgtacgtatgtgtgtgtataattcgatacttatacgtgtaacagcacgactcatgagtttctccagtccaagtccaacgagaggacagaaaaggactagccagattctagccaaattccaacatgttcaatgtcgtatatgcgaaaacattaatgactaaattcaattccatacaaaaccgggccttggaggtaatgtgaaacgcacccatgcttggggtcctgtgtgaaatattatttgtttggccaaatcttttttttgtttccaacttttcaatatttatgtttgttttttttagtaagaggaggggagacaatgcctcacccttttattaaaagcaatattaactcttttcttaaaaaaatattaaaaataacatatttatgtatttatgttggttaatgctaaccatttcattaactcttttctgaaaaatattaactaataggtctttaaatattaatgatcttgtgaattttttgatcagaagctttaagatgatctatcaattagcttgtgaaaagaattgtggttattgcttagagaaattaagggactttgagatttaagtattgttaaatgcatgacatcacgagaagagtttgtttatctaaagccaaataacaccttaaaactcaccaaagccactaatattgtatttgacagaggatctcctggactttccgtacgtggtggtaaaagtatacacttcaaatgctgggccctaaaaacaatctaaaagttagatctattttgaggatccgcttagccttcaattcgggtatctggtaataggattcttggtttgggctcaacagcctcaacccatttaactaagagagagttatatgttgatgcacattacaacaaaacatgtcgaatttcgactaattttctgaccagcgaaatggtcataaattgtatcaatcaatttttgaccagttattgcaattcaaaatttggtaacacatgttagttcaaattataaggtaacatgttacacaccaggtcagttaagtttaattatagtcaatatgacaaacctttatcccatgagagggcttacgacattacagtttttcgtgactgcgaattacgtttacgattaattatttgattagtttaagaaaaatattaattcattgtatagaatagtcatggaccctcaatacaaatccaagcgtagagtcgatcacggtattaaatatatttgttgaacattataactacacaattgtatagaaactaatcgtgactttagcttgcatagaaactcttccatgtttcaaagctaaataaacgttgacagtataattaaactacgaaaaacaacaaaaatggttcaacccaaaaattattttgttcttgatccgagagaagccacggttacggatcttatgcgtcttctcttctactcggatctcgagaatagaaagttcgttgatacttcggtagagaatcttgagaatcgtctttgcgaattcaggggacggtggatcatttttgtatccatcgttgttcagaaactcttgattatcctcaggaaacctctctcgttcttgggattcgctcttggcttttggctcaaccttccttcttccaatggtggcttcttcaagatattcctaaatcttgtcaaaggttatattttcttttgactttcttgtttagaacttatagttcggttagacattacttttttttgctaaagggttttcaaagttagacattacattatacatagtgaatatagaattgtatacatactaatttcttcatttcgatagtgatggttactctgaattattcttcaaatcatattatgcgtgactgaggtctgaagtagtaagttgctccaaaagtttttttttttttttttgtcataatctttttaattgattgaatatacagaaacaacatctaggagataatcaaaatgagggtattacttaattatggcaagacacagccattttttaaattcattttggttgtaaatggattacttacgaaaatacaaccatattttctgtgaattatcttcttcttttttttgttgattaatctgtaaattatctttgtatgtatatagcaaattcacaccacttaggtttaaattttgtgtgcatgatctgtcgaataattatcgtatcgtgggtcatgtacctttgtttcacatttatattactttcgtaattttttcaggaaggtttatttggccggaaaaaacatcagcgacatttgcatccataaacggaaacctagaccaaaaagtagagttaggtttaggccggagcataaagataggagatgaaagatacaaaccactgttgtcaattatggcttctaagctggcttacgagaacgaacactttatcagatccgttcttcaagaccattggcaggttttattaactaactctttcatttttattaactatatttttccttgattatttttcacaactctttatacagaaattttccatataaaatacgacaactagtgcagagttattagctgtatctttttagttttttggtcaaacatttagctgttgatcgagttaattaactttgtcttataacttgcaagtatatatgaccatgatcatgcatgttgtctttcattttgaggataataatatcacttatgatcactattatttgtttattttgttgtggcaaagatggacttattgggtttctacagctgtccgaatggtgagattgctttccttttcttatagtataagtataatgtataattaactttgttggaccaaaaatgcagaaatcacgtgaaattaaaacaccgtctgatatgtgggagattttacgttttcttaccaacatgattgattcccatattagtcaaatcaataatgagttaatgacctaagaaattttatatatttatagtatctttcacttgttcgggtttacaaatccattgaaaaaattatttagaagtttattcaacttcgtatattaaatgatttaagtttcaatacaattgtatgattttgggtgaatttaagaaaatgttatgacttgttgtataatttgatatatatttattatccaaatatgacaacgacaattcttaaaagggacaagtgagttaaaaagggatcaatattgtgattctttacttcacttttttttttttcattatttacttctctatatttcgttgatttgttttgtaagaaacatatatttcgttgataaatatatgcattatagttgttttatacttagtatctacgattcttaattcaattttaaaattttgtcttctcctgaagtaataatacttgtttttttatttataatatagttctactttttgtttgggcttttcagattttgatcaaacgaggtcaacagaggtgattgttataagggacacaaaagacaatccgaaccttatcgtcgtcagttttagaggaaccgatcctttcaacgccgatgattggtgtacagaccttgatctctcttggtaatatactgaatacttaggtttaggttggtttaatttttattcggttaggttcgacgttagcttctcctaatcaaactaatgctgatttcaaaaataggtacgagattgttatgaataaaaataggcacaacgttatgaatgtgggaaagatccacggcggattcatgaaagctttaggccttccgaaagaaggatggtatgaagaaataaactctgaccaaacccaaaataaaacaagtcaacttgcatactacacaattttacgtcagttaaaagaggttttcgaacaaaacccaacatccaagtttatcctgtccggacatagcctaggtggagccctagcgatcctgttcacagccgtgttaattatgcatgatgagaaggaaatgttggagagacttgaaggagtttacacatttgggcagccacgcgtaggagacgaggatttcggtatttatatgaaagacaagttaaaggagtttgacgtgaagtacaaaagatatgtttattgcaacgacatggttcctaggttgccttttgacgacaagacactcatgttcaaacattttgggggctgcctctactgtgacagtttctacaaaggaaaggttggtaataaattactcttaatgattttatcgtcttgaattaatcactcttgattagtgtttgaaatttgtttcttaagttttatcgtttcgtatcaaaatattctataaatatttaaagatcaaaatatcattcatatatatatataattttgaatataaatgtatatattgagatatgaaaaacgagaattcttgtcttgtttccgcagagttccatgatgaatttctatttatcccaactgatgataactatttgatataatgttcaggtagaagaagaggagccaaacaaaaactacttcaatatcttttgggttataccgaagataataaacgcggtgtgggagttgataaggagtttcatcatatcttgttggcaaggtagagaatacagagaaggatggttattgacgtgttttagacttgtcgcattgttgattccgggacttcctgctcattttcctaatgagtacgtcaatgttgctcttttgggaaactttcctcctcaggtacctgattctcaaaatttacctgatgatgacctcaatgttgccctcttgagaaactaaaggtggctccatcgtttttacaagatttcgttttataactagtgtgttcacactttatactatctttcttaaacactttcttcgtagttgcttttgttttaatataatgtgttgtttggttttagattattttcattattttccgaaaaataaaacaaaaatatgatcatttttcaataaatgggaaaagtataataaaatgggtagtaattaacgtatttgtttcttctttttttttgggtaaagtgcattatattctcttttgtgttcatcttatcttctcttttgtgttcatcaatagtaccggttttgaagattgaaagatttttacaaaaagctataacatatcaaatctacaaaacattgttcaatagaagtatgagttacgagaactaagataaaaaaaatgaattggataatgtgaagaaaaagaaaacaatgtgatgggatcaaacattaaatatatattacaaaattgcaataaacaagactagctaagtttgatataatggaagaggcgaagagcatacgtttaaaaaaagtaatagaagctgtaatgatagagaagcgaacaagtcagtgcaccaagatgcaaaaagaattgatgaaatactacaatcttaatttactatctcaaaagatttgttatttttggacccaaatttgttaaaattcctaccggtttataataacttataaacacaaattataaattcaattcctaggatttgtgcaaaatattaaattatatttaagtcaaataattatacattttgcagatgaactgatggatggaggtcgtgtagaactcaaattgtggtgccattgtaccatggtatctataattcgtgcaaattctcctcaatgattatatatatggtatatctcttaaagtcttttgagtatttgatttttgggctaaattgagtcctaatgtttacatatgaagagaggattgtttgaaggatttgtgagatttctttggcggttagtttcagatattgttatgtaatcctaatatacttagtttcatatattgctatgttttcctgatatacttaattacatataattcaaattaataataaaaattcgaaattgactgaattttctctattaagttttatttttcaaatttagtctgcaaatgtttcctggtatattcaaatgctcttattcacattttaatttgtgaatttgttgttctttttttcttaaaatttccacctcaatccatttattatggtccagattcactttgatcatatatacaaaataccaaatacataatttaattttgtgctcattttctacatctttctatattttataattaatatgacataaaataataaaaaaataggtaaataatagtaaccttatttatatattttaaattaaagtcttagatagttaatgtttttcataatgactttgacaggtgtcccagtcacctagttataattctgccatttttcgaaagttcatgagacactttttatataaaacattatatactacaaatgtgttgaataaaatattgataaatcctagccaagaaaaaagaagaagaaacaaagaaccaaagaagatggcgagtatgattaagataacaatgataatggctttgatcataatggacgtgagagcaaaaattataactgagtgtcaaaaagcagactgcaagtctctctgtcaaaacataagcgatatagcttgtactaattgtctcttcaaatgcatttctcttccatcttttaactactccaacacaagtaatctctcgtactctattaaaaaaacaaagaatagtttctgaagactccctaaaatcggatttcgtggcagggctaaaatatgttaaacactaattttgaaacatatagttatcatgtaaattgtgcattgtgtaacgttgtaaagagaaagtgccgtacacaaccttttttcttattatatacgatttagatagttgtattcaaaaattatgccaatgatcgttctaatcaatgatgtttaatttacagggccgaaccaattgaaaatgaccccgaagatctgttattatatttgctctggaggttgtggtacagacaaaagatgtgaccatcgctgtaagaaatgttgtggttgggcttagacttgtggaacttttgttagatttttaatcttttgatctagttgtttattgtttttgatgtttttcatgttaggatgtaatttgacaataaaagatttaatataaacatactaaaaaatttaataaggaaaccagtttcttggaaaaatgtgatgtacaggaaaactgctagtatcaaaaactattttcatgtgacatttttcaaccgaagctctaattttttacattttatcaacctacacaagttttaaaaaacaaacctaaactatataatcgtcatttgagaaataatgtaattaaataaacagactaatggactttgagatttgagtatagttaattacatgacataatgccaggtgattgtttatctaaagccaaaactttctacatagatcttgtagactcgctggaccataaatcaatcaggaagttagatatgttttgttttacggggtcaatgaagacgtagctgcacgtaattatttaaacacttccatttctgcagtcaaatttgtttttctttttttttctttgaatactgtaaggctatcgaaataatgtcatgatttaagcgtattaaaaatcggtaagtggctattcgaagattacacttatcctgtaagaattagtggggtaagaaaaatctggaccaccctttgattatcaaaagacaataataataatggtaatacattaaatctttaagcgcatgctctcccatacatatggaaggcccaggccttgtttctaggcatcattaggatttaggatgttatatgtttgtggagttcaagttgatctcagctcaagagtacacttattcgactgtccaagcaaatggacactcactaaaccgaatttgcttgaaaattgtaacatacacttatttgactgtccaatcatgatagacagttatatggtaataaatatatatatatatatatatatatatattttgcgataatatattgtagtgtttatattataattcaccgaattatcaattaagtgtaataccagtgtaatacctaaaaggctaaaagctataatttagacttaaattattgaagagttccaaaactacaaagtttattattgtgcagggagctgacgagttgctaataaagagatattgatcattaacctaaccccccaatttgtacgcaccatataatcaaaatctgttttacaattatcgagcataccaagcacacttgattgatagtgtctcatatccgaataatcacctcggcggtctgccagataagcaccttcgagaagcttttgtacagctctgtacgtcgcaaggcaaagaacaagctggttcttgaccagagggttctctgctatgggaataaatttatctctaatgtaattgcctgcacttgtgatgaggtacactgcgttgaacgctgcgatatcagctatggtcttgatttctgcatgggggttaccgagtttcgagatgatactttgctcacaataatacatgttcttggtgttgacacatatgctatcgattagaatcattgttggggcgtctggtgtgattgagatggatgtggtcgatgggatagtgtgcagaatgatcaaagatgtgatcatcaaagagattcgttgaagaaaacccatattggtgctcgattatattttttgttcatttgagaaaaaaagaaaaggtatactacttatatatatgttataagatattttagtacttgttcaatatcactttctattgaccaacaaaaatagaaaagttgaatatcaatttctataaataaaaaggcatttatgattattgcatttgaatgccttgacaatattttatttgcttttgtagaaggacttgccatataagtttatacatcatttttacaaaatttgactagattgtttcaaaatttggtattattttaattagaatctgatttcacttttcattttcgaaaatatacttatttatatatcttttttgtttcttacggaaatcctacgcgagatgatatataaacttgcttcagaaaaatgatttggttaagaaatatgcattggtcttgagagcaaaatcaaaagatgttcatgaacataacgtggacatggaatcaagtctgtatatccttgcagctatggtgcatatttcgtctcttactatgaggaatccgtattttttactaccatgtgtttgatataaagctaattagtaggcatgctttacaacgacagagacaataacaaaaaatgttccaaatcgtggaaattcaagttcaaagacacgctagagatatagttttccttgaggaacaattatcatatagggaagagtacaaccaaacatgatcttacaagcaaacagcttttggaaggagctattgcaaagctgcgggtatcaacttggtaaattgcagtgtcttagccatcatgtgcaaagactgttttcattcatgttgtgcaaggttgtttgtgttctttgcttgggtagtatgtcttacagatttatggaagagaaagttttgcaagaactggtggtttaagtcaaatacaccacaagctgtatcttcacaacagttgctatttcacagcttgagaacaagctgttttcaaacgggggaatatttttttctttgaaagaatgtaaaattatattcaactgaaaaagactgtttttacaatgaatgcatcatgagtgtacaagaaagaatatagcagaggaagccacacaagtgagagaagcttgaacaaactgatgttggcacgtgtgaataataatgactcgtataaaagaatagtttctcatttgttaggcttttatgcattgtttgatgaatgtctagtgatgtatgtgtccctagagagagagaaagagttatgaatcggtgatgtgccggtggctcaatctcttgtgaaacggcgtaaggagaattgtaactcaaggccttatcagattcataaccatctgactctgcaagtgcctctctatatttttaacttcacaaagatgtgaaaatcgttctacattttacaaccatgtgattctaatttcaaaactttgtcaattaacacgaggtgcctacgaactctccgatctctgtttaaggaacaagagccttaaagctcgtgatcgtgagaaactcagttactcaacaaattgtgacaacttcaaacataagtacaattgtttattttttaagaaatctgtgacaacttcaaacttagagcacaaaattttggaaaactttcaacattagtctccttttttcctaagttatataggacgaaacgattcgaaaaccaaactcaagtcatcaaatattttaggatagttacttttcaagttaatttcacccagtgccggcttaactaggagggcacacagtgcaactaccaggggccataaattaagatggcacaattttttattttatttttgtcggagggaggacaattttatttggattttagtaaaacgggaaaaagtatcctttgtaggaaaaaaaatatttcacaaaaaggggccataaaatttatgcatttctttgattctttctaaacataacgaaattcccttttttaatattgggccaaaaaattgatttacgttaccccaacagttataaaactttaattaatatattaggccaaatttgtgtacattcgaatacaaaagcaagagtttacagttcaccaataaattattaattatcccacaaaacttttcaccttctcacaatgtccctatgatgtgactgaatacggataaagactcaagagacaacaatgaatcatttcgttttggatcttatacaatagtcaattcagttcaagttctctgactctgtttctgtaaacttttcaaattttgactaaatgtaaatatgtgctattttctggatgaattctaaaagcatcctcactaatatctttgaggtttacattgttattttggcattcaaataatcagattcattcctcaaaatcaaggtgctattcttcttttttactttgcatctagattagcatcatgactggacaaaaacatggatgttagaaaagaaaaaaaaagaaaagaaaacaagatgaatagtttgttcaatcactcggagtttttcgataaatttgtgacaagaggaagtccaaatgaaaaaaaaaaaaaaaagatgaatggtttattcaatcactcggagtttttagataaatttgtgacaagagcaagtccaaatgaaaatttattgatttgctcttgtcacaaatttatctaaagagcctcttagtgattgaacaaacaattcatctttttttttttttttctgacatctaggtttttgtctagtcatgatgcaaatctcaaaatatctctcactcacttaatagttttttttagaaatttttatatttttcatattcatttattaatttcatgtctaatctttgtttaatagattttttccttcaaaattgctcagaatatctctcactcacctaatacatgagcttccaatcatccactctattttgttgtgatattttgtagaatgattttatatttttttcaatttcccaacaacaaccctaatattttctcaaaccgtttttaatttctcaaaacttctttgaattgtttaatttttgataacaccgtaactttacctatttttatcgtcattttaataatttttcgataagaggttagtgtgatattcattttcttcaagtatctttctactaatatttagatatttttaaaacagagcaaaacaagtttttgaagacatgacaattttcgtacatataatgtgagatgaaagacttcacaccgatgagaaataaagacgttaatatatcatcactagtttttcaaagactaggcagcatgaggtgagtgtttacaaacattccatcatctctaatagacacaagggtacttacaagattttaatcaaatttctaagtacttgtttgaatatgtcattatattagtttaattttaaaatttcatcaggtttcatttccgaggacatttatcgtactcatctgaagaaaaccagtccaaattatcttcaattttctcagacttgcgctaactacaaatcatgcttaccatttatgccacttcatatctttcatcacgagctcctctaatattggacaacctgataagaaactaacaaacacgtcaacatcaacaactagaatgtcttcaagccacaaggtcttctgacaaggaagatgaataacagcttcatcatctccatttatccaaatcaaacaacggttagttgcttacttcaaaattacaagagtagcttacaaaaacacttttgaactcaattggaaaattccttctataccaattatgctaagcgttggctactatattccattgtccaatggataatctaccaaacgagttacaaatcctccatcgatttcgtcattaagcgtcagcgaaaaactatccaacttatggttgcaacttctcagcctcaacacttgagcacaaatctcactaaatgctcttcctcttgatcatcactaaaagaaacattcagcctttaaagattcacatctcaattgtccattatcctttcataaaaagaagagacacaataaccgatgtcaaggaaataaggatgagtttgatttttttgctttccatttaattttctgaagtgcaaatgttaaaacggatcacttggcacgagatatttatacacaaccgcactatattgtctatataatcaatatttttcaacattgactcatttgagttaatttaataatgtcgaaaaaaaactatataaagaaaatatttagaatatccaaaataaaacaatattgttctagtggagattggttaagattttacggtttcgaacaaatacatattaaaatttatactaataattatattacctaataaaattacataatttgcaaaaaatatttagccaatgaagaaaaaaaaagaaagttaaatacacgtccgacaaaggaaaaagaaagtatatacacgtaataatatctcttaaatactaaaagaacaagaaaaagtagctcctcctcctgtcctcgccgcgtcgaaatgtcgacggctttcaattcccgatcaaatttacaagggaatccgtggtagctctttcaattctcctggctccgccgctcctctggtaatttctccgaggttagctcgtctgctacaatgaaatcggcaatcgtctggggaatcagcagctcctgcgacggccacatcttcgccgtacatccgtggataaggaagaagagattcgaacctggataatctatgaagcgaacaaagacagacagaacttggagcgtcaaatctgtgagtggaattacaggataggaccaactaagtcataacatgtatatagtctgttgttacacaattcacagttttgattttgggtttagttaaatgtctggcttggctaatcatgtggttggttctcaaagactgacaaggaacttcgattgtatatacactggtttaagatgctaggcagtttttcatcaactgttagatttcgatttctctatgtagcactaatatacattttggtagtcttagctgtctgtctttgatcatttcacctgactattatgatgatttaccttgaatatttgtgaccttgttgtaagtcctatccagcaaggatctcatttgatgtttcgaaactccaggcgaccctcgagctatgctcttccacaggtagatagatttcattcggttgcgttcatgacattgacgaccttgtatccgtctcttatcaaatttgactgtcctttgttcataatgatggtctcttttttaatgcttccaggataatacaaaatgtatttgaccttggcttggaagttctgcagaacatttaattgtttttgtagctctctctgtctctgtcttttcttgatgagaccaccggaccagacaccctgctgttaatacatttacctggaagagagtggaatcggaatcatagaatcgcttcagttctcaacgccttgagttactactcttcttgctcataaatcagaagggtttcaatgtacaaggtcgattgatgtttgctcgctccacaaactcagaagcctctattgatgaaattgcagacgattttggaagactcaaatgatgatgattggtggtgaggctacctcgctagtgtatcaattgttttctcaaaagctttaaaacgttgaaaataagcataattccacaggtttatatttgtatttgcacttctctgagaatagtggaggtttcagttgttaatgagtgtatttgctgcctttaatcacaagttttttcttaacttttctaagtaagcattcacagagtttgtaatatatctctttaattacattaccttaagaacaagatgcattttcagagccataaagttgaatcattatatgcacacaaaagactttcaactttggtcacaattactctactacacgcctttgcttaagcttggagtacagatatctgaacatttggggaagcttttccttcaagtctccgaagttcagtggcaatgtcgtaaagagcggtaacgctatcttctgtttgcccatatattttcacttgttggagatgtagcattctcatcaaaaaccaccgtacttgctcaccaaatcgggctgcatcctcagtaacttctcctctctttttcccaacaactccttcgtatatctctaggtgagtaacaggagattttactaggtaagagattgcctgctccatgttcctcctgcagggacacacatcaccacacacatctgtggctaagtggaaaagcccctgaaacataaagacatacagtaacgcatatgttttgcttttaaccataaaatcgattcactaagcagcttggtttcttacctccaagacgagggtttccaaatgtggacatttactaagcagctctggaatcgcatcccagcctagttctttgtcactctgaatagtcaggtgagtcaagtatacgaattcaggaattggaggatcgaagtagtggtgaaggacctgaaacacaacacaagcaaatcaattagtgttgtcttgtcttccaaatctcaaacgtgttatcagacaagaaattctcctacctgaattgtgttcgcatacaaatagagtttccgaacacttgttattcctgtgataaaggctgtggcattatcaccaacaatcacttcttgtccctcatcttcttcctctttttcatctatcatttcaagtctgatcttggcttcaataagggaagaaaatttcagtagtggatattgcccagcaatatgatcagtgtactcaagatacaagacattcggagtgtcaaacaatacactttgagggcatctatcatactcatccatttcaacataatcagtccaaacaattttcaatcttctgagacttgcgctaaccacaaaacaggcttcccaattatgccacttcatatctatcatcacgagctcctctagtattggacatcttgataagagtctaacgaacactttaacatcagcaactaaaacgtcgtcaagccacaaggtcttcaaacaaggaagatgagcagcagctacatcatctccatttatccaaatcaaactacggttggttgctaacttcaaagttacaagagtggcttgcgaaaacactcttgaactcagctggaaatttccttttatatcatatatgctaagctttagcttctctactccattgtccaatggataatcaactaaatgagtaacaaatcctccatcgatctcgtcattcagtgtcagcgagaaactatccaacttacggttacctctctgcctcaacacttgatcaacaaatctcacaaaatgctcttcctcttgatcatcactaaaagaaaacttaagacttgaaagattcttcatctcacttctccaccatcctttcataaagagaagagaaacagtaaccgcggtcttggttggtaaccaagacaatatgtgaggtgcaagacacttgggcaaatcacaaagctccgttttcttcttcttattattcgatgtcatctcaacaaacctgaaattaaacaaacacaaaattaaaatctgtataagagaaaatagaaatctgagaactaaaagcaaaacccataaatcatacaaaaaagtaaaaggacgttgaggaaaaatcgagctacttttcatcaggaacaagtagaaaccaaaaagaaatatgagaactaaagcaaaacccataaatcacacatagagaaatcaagcagaatccattaatcatactaaaaatataaggacgttaagggacaattcgagctactaagatacttctcattaggaacacaactcatggaactaattttcaatttgcttccattttcaaatgactttttctatagattaagaaattaaaagcatgaaatcctccaaaacaacaaagaaacagaacgcacctgtgtgaatcgtggttgagcagatttaaaccctaagcctccttgtgtttattaaatcgaaaaagagatggagaaatgagaggactgagacttttttttttctttttttttgggacaaaacattttcggagaaaatatcactaaaatcctcaagttaatgaaaacgttgatttaaatcctcaattctccacaaaacaaagtaaatatcaaatttatattaaccttccaaataaatatccaaattttgttgacctgatttaggcatactattaagtagattatatatcctattaacggagttaattttttttaacagagaacctttaattcaaaacgttattgtttctaaaaacagagcgatatcgtttggtaatagtgtattaactaaatccccaaattcaatctaaaattcttaaatcaaacaaaaattttaaccctaaattttcatatgatttgaagcttgggatttagttgaaccgttataacaaaaccacaatgttttattgttacatttttaatttatttattgtatcatatgggctaatttgttcttttagaatccataattgatctaattggtgcataaataaaaaggattaaagggagataatcagttaacaaatttgtaaaattccttaaagtaggttatataaatagagagcaaaacaatatactttcaattgtaatcttgtagctaggggtgtcaaaatgggtcaaaattcatgggtcaactcaactcaactcaacccatgaaccctaaaccctaatgagttgaaaattttgagtcaaatgagttgatgggtcaaatgagttgatgagtcaattggtttgatgagtaaaatgagttgggttgtaatggttaatggtttcaatggtttacacaattaacccatcgagttttgtaaaattgaattaaaccaactaaaatctctaaaccaatgccaatttaagtttaaccaacacatctaaaccaatttaataaaataaatatttttccaaatttcttaaatatacaagcgatgaaattgagaaaaagtaaactcgtaattttctcgccaaaaacgcaaacccgtaattttcccgccaaaaacataaacccaagattttcccgccaaaaacgtaaactcgtaattttcccgccaaaaatcgtaaacccgtgattttcccgccaaaaacgtaaactcgtaatttttccgccaaaaacgtaaagccgtaattttcccgccaaaaacgtaaatccgtgatttttcctccaaaaacgtaaacctgtgattttaccgccaaaaacgtaaacccgtgattttcccgccaaaaacgtaaatccgagatttttccaccaaaaatgtaaacccgagattttccctccaaaaacgtaaacccgtaatttttctgccaaaaacgtaaacccgtaatttttccgccaaaaatgtaaacctataattttcccgccgaaaacgtaaacccgtgattttgccgccaaaaacgtaaacccgtaaaatgtagaatccgtaaatatcctaagtttgatgataatgaattaataataattattatttattattgttttataataataattaattaaattattactaaaataggttaacccatttaacaactcaacctataataattaaatgatttatgggttgacccaactcattttgttaaatgggttgggtcaacccataactcatttaaccctaaactcatttgattatgagttgagttgagttggattacccattttggcacccctacttgtagctatactaataaatcatatgaaataaaatgaaaagttcaaaaataataattaattgttaataatacttttgtgtactattttaaattttaatataaagatgttacaatttttttttttttgataatggagttttttcttaagataatagttaacagaaataattaaagagatattattgaagagtgaaagttatcattccgatcagtactaattaaagaactaggaatttcaaaaaaaatgattattccaaaatatacttcactatatagatatatatatatatatatatagatgttacacaaataaataaataatgtacttcaacttgcaggacctttttatcttttgttatactgttatatgattatttactaataaaaaaactgacaattctttatttttttcgtttttttttttctttaacggctatttttttcatttacatggttacgttctaatattaccctcgtttcaatccgtgtttggaaagcgttttaacaaggttatttttttttacaaaatttatggtggctagaatagaaagacataaaaagaacgaatactctgtgctttataaaaaccatgtcttcgaaagttggagaagatacttatgaagaatataaatataactgaactatatacgtttgtattctcatggataacaacttaaacaagtatactttacaatattgtcgggagcattgttcctaatcaacaagctagtatatgataagtaaaaacggatgtggaaatttaaaaaatcctccaaaacccataaaaattaaaatagtaacacaatctcatatagtatatgtataactatatggtcctataaacaagtttcaaactaaagcaataagcaatattatagtcatgaagaggcgtatgcagcaacgagctcgatgattatattgtggctaagctgcagatggagctttgacatactgaagcgcaccggcttcagacaaagcttcgataaactgctgaagtgtctgttgcttcttgtggctgtccccaatgacaacattcttgtaatcaagagactcgtcattgtaaatgtcccaccatttcttgaccagcatcttaatgtcttctctgtccatgttctcttcttctccagtgaatctgatataatacaacaaacaacttttagaaaattcaaatccacaacttttctataaacaaattaatattaaaatagctcatgagaggtatgtttgtgattttaactattttcgttagataaaactttgttagaacatatttctaatgtgaaatttttagatatcccaataaaatttgcaacatttagttctacgacttagtggtactttcaacttattgttagttatatgcaaagatattattttctgatacatcaaattgaatatattaaaattttggcctacagaaataaataaacttgattggacgtcaatatataaacttgattgaaaattatttgaactagtaataatcttacctccaaggtttagcaccagcagcacagtagtgaacaactttgacttggtcaagctctatattctctggatgcctccaaagcattgccaagaccaagttatacactggtggtattggcttgtatatgtccttgaagtacatattcaaaaaatcctataacatattcaaatgattataatttttaagttgtaatatccataattaataactttttgtgggtttctataacttaataattttatctatttacctgttcagcaaaaagagtgggaggcacaattttgaccgtctccaagaggttatgataagtggagaggttaggctcgtaaacgaacataccggcgttgaagtacaaaggcggcttaggaccaagcttggcctctggccatgtcaccttgtccggacactgttggcaataaccgatcttgtactgtggcgagtgactccatgtcttctcgcaaaaacagtccataactgcatagaattggccgtttggaagatcaaacaagtgatctatgttgtcgaacacttgtatgtcaccgtccaagtatatcatcttgttgtactccacgaactgcatccatatataattttattatatataagaaattaaagatataaaaataatcactataaggtctttttttatataaatatcaacttcttttggaacaaacaatgaagtacataataatattttggtcatatatagaatttactttgctagattttatattcttataaataaaaaacttaacaaacaatacatatttatatttgtacctcccagatacgaagcttagagtagttaatgacatagtaagccatagcaaactcggtttgattctccggtggataaaccggctctatctccttaacaacacagccttgatccaccaactgtttccggtgatcctccggtacatccggcaaaaccgccaccacgagtgggtacttgctcttagctttccttagccccttagcaagacccaccacccctttcacgtagtctccagttccagcaaggaaagtcacgtacgccctcttttctccgccggttgctgagtggaccggtacggtgagtttggtattgatctcaggtgccatcttctttgtcttttagaaaatacttctgtgtttgtgtttgtgtttgtttttgtttcgtttagtttgtgtgtagtgtgctgagtatgtgggtgatgcttaatggtgctttatataagattttgtcttaattaattaaaagattaatcgctaattactttggataattaaatacgaccgactactaaacgtttccagagaaagattttgatccaacggctattcaacaatatggtggaatctaacggtttaggatacgcgcgcgaagcttcgttttgaattaactatttacagtgggtcccagtataatccaggtgctgccacggcgttacataacgacacgtgtcagtatctagactgttcgactcatcaaggtttttaaatcgagctcgtggtggttgatcggtcatttttatgtgtttatcaatgggttccacttcagatatacgacgtcgtatggggtatttaatacactatattagtgtgggattttctgattggttattatgtggacacgtgtctacgtggaacgtagtaggcggtgatgatacacgtggacaaggaaaagtcttgttgggcccatttcccgtttggtctattttccatgtttaaatttctttcctatggtagtttgtctgaccgatgaccgaccgactatttacggcatatgtggacgttaaaatcatatatattttttaattgcatgactcaaaaactcataaggttatgtttcgttatttttatttttattttattttagtttgtttctgtcaagtaggtattacttatctgcattcaacaaaaaaaaaaatttgtgttaggttccataaaaaaaaaaaaatgtgtgtagttcctctcaatttgtattttttatagctattaaattaacttttaatctaacattttatcaattatacttttaaatttttcggaaaccaatcaagtctatgaaattactcacatctcgagttttatttttttttcttctagttttcttctttttttggtaattgataggtttcttaaagccaaataaatggattttttattaaataaatgaaaaagtccccattctacatttttataaaatttgccccgatgtaccatgcatccgcaagtggcgttcactacctttaattccccaagtaatttagaaaaaaaaaaaaaaaaaaaacggaaaagtgtcgttgtgatgtaaatttctcaatgggccgaccttgtttactatacggatgacaaaatcagaaaaataggataatgttagtttattatggctttatggagtagaagttagtgtaaggtcacttcaattccttcggttagtttttgtacaaactagtctatccacgactctgagtctttgactaattcttgagtgtagaatattctatggaatcttttttttccaactcgttgtgggatctaaaaaacgaaataggcgagtaatgtcaaatgtgtatgactcttgtaatatgttttttttgtaataataatcataatattctattgaaataaaataataacaaaaataataataactgctatataaaagtttaaagctttttcaataaataaataaataaaagtttaaagcataattgtgttttactcaaaacattcaattaaatttagtagaaggttttttatatatagtagtaaatttttatttttagtattttttcttgttattttatatgatattattatcaaggcatgtatattcaaaaaaaaaaattgtttcattaagacaacatattagatcaacttaactaactaaattgtaaagccacatatggatttggtcacgacatcgaataactatgtgcgtggttctagctagctaggatcaatctatttttcaggccattaaggtagtttataatttgtttcttttccaaaattccctttatcttttgaataattgttagcttattgatccttgaatttgctgtatttgtaaattttcaatgttttatcatcccatttttttagtcttggtttggttaactttttggtcgttttcagattgtttttatctcttgattcaagtatgtgttaatgttttaacttagatgacctaactgctcgcgaaatcccaattaaacactaatgggccgtaacgtgacgctgacactcaagatgacgttgatattaggcccatttgagtgaaaagaccttatcggcgataagctatactcatcgtgacgctgacatgcaacgtacgtaatactaggctcattcacgtgaagagtgacccgcattacatcgactagcgaaaactaagtcttgtttttgtttttgttatcagccaaaaaaaaaaagtcttgtttttgttataaagtttctcgttgcttattaataggaaaatattccccttctatgatttttcttctagatatttactttcttgtgtgacaagttgtgtctacggatgacctgtcctgaatctttgtttctgttttcttattcaatcaatgaaatccaaaaaataaaaagagagtcaaaaactacaaactaaaaaattattgtgttgttcctttatgttttgattgggacctatcaaacacctatatcaattcatcaccagtacaagtgatctcagatcgaccataccggtataatttataaaacagtcgtgaggtacgcaaatcggagacgtaataacacgatgaaaattcaatcctatagcaagccaaagttacaaaaactaaaactaacgttaaaaactatagaaggcccatgatattcattgggcctcgccagaaataaagcccaagagccaagataaaatcatcatttctgtctgggtcagagtattcgaagcctctgactgggtcagagtattgtacttccaagccaaatcccaaaatcgacgaagaagagaagaaagctgagcaattgcagattcacgcatcgaggttagagatgcttcaatgtatctttctcatctccgattctgggttagtgaatcttcaaaccatttctgtcctcagactcagatctaatcagtctgaaatgttggactcaattcatcttctgttgtttggttttgtgtttacagagaggtaatgctagagaagcagcttactggtcatcgcgttgatagatccatatgtgcttggttctgggatcaatatatttctcaaggcgattcctttaaggtactattatagctaaagttgtctttttttgttttttgtcaatttgcaatcttttgtcatttcatctacaaatttgattcaaagttcgagactttatcttatctattgggtcatctttagctcttgattttaactgtgttagtgtgtgtcttatgcttctttgttgtgttttggataggcacttccagtgattgcttcaccaacacattatctatttcaaattgttcgtgacggaattacgttcttagcttgtagtcaagttgaaatgccaccgttgatggcaatcgaggtgaatattttgcttcttctttgtagattctaatgttgtgaagtttttgtaactttgtgaagttttagttcctttgcagagttgctgatgttttgtctgagtaccttggtgggctaaatgaagatctcattaaggataatttcatcattgtctatgaggtatttttgttaaacaatatgcattttatgaatgagcttttttcttaaccgaaactatggtggacattatggtttctcttgtgtgttgtggctcatttgttagttcggtttaccaatttgttcaaagtttgtgatactaataaaggcattttgggataaggtcacagcgtgtcttcgtgtgtttaatcaacttgtagttgttgattctttctatttgatctggagaatacatagtaatggttacaaattctagcttgttttgttcttgttttgctatgttaatatcgtactgtcctcttattcctctagtttcactgtttttggattgctttttcacaaagtagacaattgtaacattttcatccttatgattgattgggaaacaaagttttgctatggaaaatacataattttgttgaggtttactgtgttggtttgagagatttgattattttaccttttatgttggtttgcagtaactgagacttgacaatgtgtgattaatagcttctttgtgtattttatcttttgctatggcctcaccctttcttggattgccttaactgaatagttacacaaatttgtgacttgtagcttttggatgagatgatcgataatggtttccctctcacaacagaacctagtatcctgaaggaaatgatagctccaccgaatctagtcagcaaaatgttgagtgttgtaacgggaaatgcttcgaatgttagtgacacgcttccgagtggggcgggctcttgtgttccttggcgaccgacagatccaaagtactctagcaacgaagtttatgtcgaccttgttgaagagatggatgcaattgtaaacaggtttgtgcttgaagaaaattcacaaaatcttcagttaatctttacgactcatctcactcaaatcatacttttgaatacactgactgattcagggatggagaattggtaaaatgcgagatttatggcgaagtccaaatgaattctcagctcactggttttccagatttgacattgtcgtttgcgaatccatcaatcctagaagacatgaggtttcacccgtgtgtccgctacagaccatgggaatctcatcaagttctctcctttgtccctccagatggagagttcaagcttatgagttacaggtgtgtgttttcacaaccaaacgttattcttacactttcttgaagatttattctaatatctaagtatctctgattcaatatagggtgaagaagctaaagaacacacctgtatatgtaaaacctcaaataacatcagattcgggtacatgtcgaattagcgtgctagtgggaatccgaagcgatccagggaaaacaattgagtcgataaccttgagtttccagcttcctcactgtgtatcatctgcagatctctcatcaaatcatggaactgtaacaatcctctctaacaaggtaatatgctgtctggcttttgctttgaattcagtttccagatttagaaacttacgttttttgattgtggactatgttttgcagacatgtacatggacaatcgggcgaatcccaaaggacaaaactccgtgtttgtcgggaacactagcgctggaaccagggttagaacggcttcacgtgtttccgacattcaaactcgggtttaagataatgggcattgctctttctggcctaagaatcgagaaacttgatcttcaaactatccctcctcgtttgtacaaagggtttcgtgctcagacacgcgctggtgagttcgatgtcaggttgtagctttctaatacggtcatgccatgccggtcaaaagtcttgactttgggctcctgtgaattgtttgtgccaaatggttttatacatccaatggtttttgtgatctaagttatgatattataagggctctcatcgctaacaatccaaacttgatgtaactatgaattctcattccatttttttttatcgaatatttcgattctccgtggcaatgaaagattctgccgatgtttatgcgacgaacttctaaccttatttctagagccgttacctttttttatgatggcttcttgaaacctttttgaagcttgatttgttgtactcttgaggttttaatttacgcatctaatttccatagcttggaacatactacaaagattttgatggacggtctaaatatgtgagttttgccttctatcgatttttttttggtttggcaagtcacctttgtattttcatgtagcttgaagcataattagaaagttgctataataaaaatcaatattagcgtgaattttggccgttttccgttttttcttgtcttctacattatcattatagattatttgatctaatcctaatagaaaatcaatcagatttaatgtacatattgatcatgatagcacatataaaaatcgtccataggaaatccgagtgttgcaaagagagctgcaacttatttattgcactgttcatattgcaataatctaaaaactaaaatagttgaagtaaggagtagtataataacacaaaaataaaatagcatttaacatttgtctcatattcaagtatggtactgttgaatgggcactttatactatcaaaattcaactataattcttgttgtcaaaataaatatgctcatttttcggtatacactgtacatacaacacacctatagagaattgtgatataaatttatagttcggctatatattattaattttgctctccggaataccaattctgatcagactcttcgagtttagtaactgcataccaaacattagattaaacttatgtataaaaataaatattttttcataactaatatatatatatatatatatatatatgtatatatcattcaatggtttgtcataatgttgttgatgtgtcataacttggatccaacatgcataacacatgttgacaaggaaaaaagataaacataaataactttttcttgattcacaaaaaacgttatgtatggttaatatcagtctcgtgcaatcttcatcatagagattaatgaccctaaatctgataatgatgtaatgctttttcaccgttaaatgtttatttttccaactacatttttaaattgatagtccttctattatgattttttaagattgaaagcttgccaaatatagaatcaaaataacattatctatgtaaaaaaaaagaaaaaaaaaagttactttcttcaacatttgtttgttcattaggatagaaatgtgggaattatctctaattccacattcactagatagccaaattcaattttcttattagtaaaaaaggttaatatatcagtagattaatttcaacttatacttctttacgcccaatcaattgttataccacaacatatagttaaaaaattaatgttattttatttgatattaatttttttttatttaaatcacacgaaacactagttaattatggttttgccaccaagttattcgttttgcaaataagcccaaaacatttatctatacaactaacccaaaaaaaaaattcttaaatttatctgtcattctattctatgaattatttagtagtttaaggtatgtttgaataatatttctttaaaatataaaagcatgaaccttacgttagttcatgttggtttctttttcaatacttgaataaatagaaatagactggacgagcaggtatatatggtatggtgaaattttatttcatctatatattaaagcatgaacctcacatgaattcatgtaagatttttaaaattttcaatcatgtatagaaatatatctgaagagtttatggcagtagcatctgcatttcaggacaaagtatttatagtaaaaaataataaactacaacatatatctactacttttttctttcacttggtcaacacacacacacacacacacatatatatatatatatatatatatatatatatatatactactataacaatcaatattttttgttgaataacttgtattttatttgttaacattttatttttatttattttgtcaaaattttccattacttttgaatgcatgttcctatacaactttgtttctatgtagtctaaaatgtatttaacaaaaaaaaaaaatctcaatgtccctatgtgtttcacttatcagctcggtttatatttagaaaggttaacctaattacctgaatataatttaattatattgcaatctcgtgatgtagacgaatatatattgcatacgaaaccatgattcatgtacttttgtttgtttttaatttttcctcacatttgcaagttgttacctcacaatgcgattaaataaggtcaccgtcctacctacaaatgaaaaatgcgatttacacatgtcgatacattattggttatattatgtaacgtttgtctcctcacccaagtcactttaatttaggccataaatctgcccaactgtaaccattaaagacctttacactatctacatgcatcacatttttgttacgaaatttttcttttccatttcaatacaataccccaaatattaaattcatcacctaataaattaatctacctatttttaaaaagctaacaaaacattgacataaatgggtggccatttgaagtaattttttttttcacccttgaaaaatattattttctatttcaatttaattcatcaattttttcacttaacaaattatgttaatccattttttcagaaaatttgctagttagggcaataaataaaattggatgatatcttgatataaatgttttgccatttgtagtaatttcattgtgatgtttctgtttttgcagactgaattttaaaactaaaagactcacacttaaggcaatgatcaactactttttgttgctcaaattgtgcaactttttttaacatcccaaggtccttaaatctttgactttataaccataaaccgttgtaggagctttcatattcttaccctaacacatgtcattaaatttcatacaatggcaaattccgtaattaaatagagaatacaagggtgatttcataccacaccacctataaattaaaaggcaaagatctccacaataaacctaagagacagagagatcttaacacaaaacaaagcaaacaccaaaaaaaacagagatgggtttggttacagatgaagtgagagctagggcagagaaatacacaggagatgagatatgccgtgagaagacaaaggagtttctcaaggaagtttctatgcctaatggtttattgccattgaaggacattgaagaagttggttacgacagagagacaggtattgtctggctgaagcagaagaagagcatcacccacaagtttgaagccattggtaaacttgtctcttacgccaccgaggtcattgcacaggtggaggtcggaaagatcaagaagcttaccggtgttaaggccaaggagcttcttatttgggtcactctcaatgagcttgtcttggagcagccgacaagttcagggaagatcaatttcaggacaccaactggtctgtccaggactttcccagtgtctgctttcgttgttcctgaagttgagaagcctgcaacggagaagaacaatggaaccactgaggtcaaagaagctgttgcagtcacagatgcttagtctctctaatcttattaatcttatccttccaatcatgaattactttctgctatttgctgcttaatttccttttatcaataagatgatacaatttcagatttggaatttatagatatctataaaaatcaatatccttttaatacagcagattccgtattatctaaaaacctatgaaaaaaacaaagttaaggttcttattgtctagactctagatctgaacagcttctgatgttaacatttcaacagaaagcaatatctcagcggttacttcatagccaacgatttcaaaaagtttcttggaagctatcacaagtcacaatctaaacacaagaaagaagagttctactataaatagaccaacaacatttgatccaatgaggcaggttaagattgtcctgatactaaacttatccattacctgatctaaatcgaggtatggtgatgtatgttctttatttagtaggacagtctacaatactatatgtataaatagagccatacctaaaagagatttgtccagatattgtctgtcagattctgtgctcttcaaaatcctctgctgtcattcatctttactcacttgatctttgttagttgtttcttgcgtcatcaatctaaccgataacttaaccacaaacggtagcagagtgcaaatataacttaatctatgtggttcatgttcaagttccgacttcttgatcattaactaaggagtctaattcaggaacatatccagcttctctagtctcttctatcagtaaccccaagactgaatacacggaactcgcattaggacacattttatcgctaacggcaaagctaaaaacttgattttccaccaggatccagctcataccggcttcttttttgttccccatcatcctcatcatcttcctcactctcgcgaaatcgacccacttcccttctgctgcatagatgtatgaaagcatcacataagtccccaccatttttggtttcaactccataacttttcttgcagctaatctacttatcaatccattgtgcttatgcgctttacaagccccaagaatcgctccccacgtggattcgtctggcttaaacggcattctctcaactaattcataagcctcacctattttcccagctcttccaagcaaatccaccacacagttgtagatatctcgatctggatttataccatactcactttccatcacattaaagtacttcaatcctttctccactaaaccagcatggcgacacgcacttaaaaccgccatgaacacaatccggtcaggtctaatacccgaactaaccattttatcaaaaagctcaacagcttctgctccataaccatgtgatccatacccaatcatcattgaagtccaagacaccaaattcctcctatctacaatttcaccaaatactctttgagagtccggtatatttccgcatttagcatacatatcgatcaaagcattagctaactcaacgttcttgttaaaccctcttctaaaaatccttccatgaagttgctgaccacagttcaatgccgctatattggcacaagcagcaactaaactcgtgaaagtgtaacaatttggcacaaagccttgcgattcaaaccgctgaaacataagcagagcttcactactatctgatcgctcaagctcggatattaaagtgttccatgtgattaaatctttatcttccatctcatggaaatagtgtttcgcttctgataaataaccacacctgcaatacaagtccaatatagagttcatcaccgggaggttagactgaaacccacgtttaatcacagacgcatgaatttgcttgccggttgtaactgaatcaatcgaagcggaagctctaaccgctattgttatacagtaaggcgtcacttcagcattctcctgaacacataaaacagatccaaaatgtaagaacttcaatacaaaaacgtcaccaaaaacacgaggaatatagctaaattaccagcaacatttgcttgtacatctttaaaccgccaatgccatcacccaaatgcgtaaacccggtgattagagtagtccaagtaacatcatttttcaccttaatatcccgaaaaatcaaacaagcagcctccattgttacagaacaagtggcgtacatattcatcatcgcattgtcaacataaagagaaccttccatgccaagtttaaccacaactccatgaaccaaagcaccataagccaaaaccttcatgtttctacaagacttgagaacactcgagagcgtgaactcattcgggcttgttccttgcttaaccatctcgtgaaaacactcccaagcacgagcattgtagttggaagaagcgtaaccagtgatcattgcggtccaagctactacgtctctatcaggcatttcgtcgaacagtgagcgtgcttcttcgactaaacctttttcgaaatatgaaacgattagatttgttgctaaaatgtgatgcttcttgggtttatatggaggatactctgtgttttgacttgattcgacgccggcgttgcgtagagagcttctgacaaagtttgggattggtttaaacgcattggagcgtgcaagtttggttatgctcatgttcttgcgtttagaccaaaacgatgtctgatcaaaattggttggagacttctgcgttctttagtaatatcaccattgtcggaacgagaaagctcggaagtcgtgattcttccgaggtagacacggcggatttgggagtgttcggataattcagttatgaaataaagatttttggaacttaaaccgaaacatatcggttcaatctatgatttgctgttcgattcggttcgggttcaaaattgtaaaggaatgttattttggttatttctatgatttgcggttcaattttacttaaatttcattcaatttcgattaaatctttgttaattttggtttaattttactgaattcgggtttagtactaaaatctaaagtggcagactcgaaaagttaaagcattatgagatcaagatcgacgccaagtcgcagattagtaagtaacaaatcgagttccggcacaatttcagataataaccaaaccaaaccgaataacaaaactgcaaaagtgaacctttcagattactttgtataccggagaccgaaccaaattttttggtaggttcaatttaatcaggcctgtgcgtgtagaagcataaattactcagggaaatgcttggtagagataaaatgacaatttggtaaaatctagcataagaaaaactttctttgccaactacgtagctgcaactatataaaactgttgcaatcatatatatatacacacaaacagagataaataataataatatgtgacagtcaagtttctgtaatgattttccaatttctgtaagatctatagcctaaaaagcttattgtgttcgaatgttcagagtagcaaaagagactgttttgcattcatcgaacaagaatctgagtcttggcagcgactcgggagcatttcttccggtcagattttctaagaccacatgcacaaatatcgagaagttcgtaatcttcttcccagaataacagtgatgccatctctggatttgctaggaggagtttagaagtcaagaatccagcgactgtccatgtctggtagaggcgagactgctttccaatgaatttgccagatcgggtgtcgtagtactctggccaacgatctgccaacagtctcttctcagccactgcaagagccttttcagctagctctggtcttcccatcttcatacatgctaatgtgaactgtttcgaaaatcacacacaaaagtctattataaaccagaaatcctcagatgttaaggatgatatgcataaccgaggattgttaatactttttctctaatccaaattactgacatatatctgcatacctgccaaagaagtgttggccaggatccactgttgtgatacgaccaaggcctgcaaagtttaacaagtgttttcagggttgattcaccgaaaaagttcaaggcaaatacatatattgtcacaagcccagggagttcacaaaggagaaagtaaagagtaagcgaaactcacgtgttctttgggtcgcttccagttattatacgccaatcatcgtactctaatgcagggtaacagatcttaagaggcatattcccaataatatcgtcccatttagcttcaattaagttcaatatagcttcattctgctttggtgtagccaaggacgaaacaatagaccaaaagttcccaagcgtgaagaatctgaaatccatgtgtgcaggttgtaggttcccaaggagatacccaccttgctcgggtatccagtccatgagccatggaggaatttgctcaggatagatgttgaacttgttagtcgcatccgtggaatactcttctgtcttgtaacggtatatctcattgatcttttttatgtccacccagtagtattctctgatatgaaaggacaaagcacttaatctattgttaatggctcttacaagatccttagagctatcattaacagaaagcatctcacgggagcatcttagtgctgagtagaataacgactgcaatgaatccaaagaggaaatcatgaatcagtctcataaaaagatatatatcaacgctataaacagaaaatgagacaaaagagttggtacttggatttcgagagggtggccatggatacccatacgacgatcaatcatacaagaaccatcagtgaccaaaagtgttggaaacatatcaaatccatctgctaaacacaagttcatgataagctttatccctgtctgaacatctatcctctcttgtaacgagaaatctccagttatctttccatatgccctcaagagaataatccaccacaaacctataaaggacaaaagaaaccaatcagtaacaaaactcccttagagaatacaatcaacataatattgacactgaccagaatccacaggagcaacacgaccaatagctgattcaccaaaatccggatccaaaacctcttccgtagtgttctcatcaagcgccacagttcttactttaaaacttgcaggcatcaaaccctgtccaggactgtaacagtctacagttttctcccaactcttaagaaaacaaacaaatctccatcaatactataccacacaacatcaattctcaacatctactaaagttcctatatcataatacatacctgaagctgtaatgtatgaaggagaaagttcctaacaatatcaccttcacctttaagcaaaaaagccaaagcagaaggcacaaaatctcttataaaaacttgatcataattcaaaggcatcttatctccaggatcattcgccgccactgtcccaaccggagaaccacaatacctaacaacagcgttttccaaaatcctccacgcttctttctcagcttcactctcttctctcacaactttctcactaccaatagaaactgtttctacttcttcttcgtttttgtgtatcctttctaaaattgcatcactttgaacatgaattctctcgaaactcttgtcactgagattagtttcaacggatgttgagaattgtcttacggagattcccgtcgtcttctcggaaaatcgatttggtaaaatctttgattgggggaaacagtaaatggacgaagagacgaatctctggcttgatgataaatggcgaattgaggtggttcgagataaatctggtggtgaatccttggagaaagtggagaagaagaggcttctgtgaaatcgtgaaggagttttcgtggaaattttgcggaggagatagattgcgctcatggttagagatgagaattcgaagagggaaacggaaatctggagaatggagaaatgaatcaaaatgaagagttagggttttataaattgggggattagatcagttaagcgatggagaagaaggagataaaattgggaatgagtatattcaatttgggaaaataatggggttaaggttaaagtttcgggattggggaagaagacagattaatttctttcctttttaggaaaagcggtcttatatttggattattattttggagtaaacaacaatcaaacgaaacaaaatgaaaactattggcataattagcattcaaggatccaaaggttgatcagatgaactctgagattcaatgaaccaacataaccctagacacaatgagttatgcttcccaaaaagttgtgaattcactagaacgtagcttacgaatgtgtctcgtgttataaccctagagaatgatttattatttccacttgataaaaaaaaagtgaagagttgaaaactaatgatgaaaggatagtcgccacggctgcacatttgacagatacgctcgtggtcgctgcgccagtggccatttgggtggttctctctcttgcaacggaactggcggttcacgtcggccaagtgttggacttctatgacgtcagcaatgatgtcaaatgatgtttaacaataagtaataatgtaagttccaaatcaaaattaggctatacatcaacatatggagtgaagcgaatgataaaacttaaaacataaattcaattatatatatatatatatatatatatatatatatatatatatatcttcaagtataatgaaaggatcaaattattccaaacttgtttaatttcttccgctgattcttgatcttcttcttctccctaaagtcgcccactcttacaagttaaccatatcttcatcattgacgatggattattatattgctgcttgttttttgttttccttacattttgagccaaagataaactccaaaaaccaaaacatgcttttctctttagtcgatcaaaaaaagaaaaacacagaacgagaacttcaatgtcctatcaatatctggagacgattctacgattgcttggtgaaattattagccacacaggccttgaagaaagtaacacttggccaaccacagaaacttggtaaagttgtatcaaaggaagaaaattctgatattggctctaataacacatgtaatgttggagaaaacatggaagaaaaggaaacattatcagtcgatcgagaactagtagagttaagtgtacaaaaagaaaaggctccaagaaaaattgtgagcataaaggatgaagttgatgagatacgaataagttcaaggagaatcaagaggaggacatcgaaaggaagttttagttccttcgatgagcatgaggttatgtctttgaaaccattgaagtcgattctaagaaaggattcaggagtaagcaaagatccatgattacatattggatctgttttaagaaattaaaattccgtatgtaagttacgtaattatgtcgtgattgatatgtaaaattaaaaatttacatactatcccatgcacgtatgcatgggtttaagtaaaactttttaaagtgtaagataaattagattttttttaaaattattgttgatatttaatcaatattttggttttggggacttttttagtttttaggcttataaataatagtgttcaatgtcaattataataatttaatatggacgttttggtatatatatatatttttttttcagctcagattcgtatttaatcaactacgtaaaaataactaatcaaagacacaaactcaagtatcgatctccggttcggtatgcttgtccgacctctctggttacatgcgttgaaactcatcccctaagatttgacgttttcaaaactaaaaagactcattatcatcacagctgactagtattagcacatatcctcaacaacgtttgacatgttcattacgtctatacattcattctccttcttactcaaaaatatgtaccaataataatacgaattttgttaatttgacatagatccaattctttgatttctttaattatttaattttaacttcaaactttccaggctctaccattcctccatgatggttttctcttcaaagttttgataagcataacctcttcaatagggaaaagtacccagagacaataatacctcgaattgtgtttcagtcagatcatattccaaatagctcctcagctcacatggcaaggtatcttcataatcgggaaaggtaatgattgaccggtgttgtggttaaatagctatccgttaaccaataagacagacgaagctgttgataggatataagatttcatattggacttggggaattttgcaagatgactagcagacgaatatatattaagtcttaaaacttttgcatgtttattattgaaggaaataccgatacatttgattagattaattcatcttggacacatatttatcttttaaacatttatatgacagcaacatgcgtagatcttatcacatacgccaaaatcatatttgtttggcaagcttctacaaaaggtagtgcacttgtcgttcccaccaccacgaggacaatattcaaatcctccctcgcaagccacggagtcaaataacattccataacctgtttataattaaacaataaatcattaaaccaatatgcacattaattaattatatcaacaaaatcaaattaaacccataattaaaaagtgaggtataaaaataaagcagcacctgaagttgttgtacgactgtgaacaaaagatatgatgaaaaagatagtgaaaacaaatgccactaaagttctcatggttatggccatttttatgatatttgttcttaagattggtttaatgaatttttctagcttagatgactgattatatatataacacaaacatatgtaaaaaggtaatttttctggtaaaaaataaaaaggaacatgaactttcaatttatttccttatagatatatagtcaaaagaaaatattgtagaattgatttcttacgaaattagtcggtcaatgaccaaaatatattcaatgaatatttcagtagacaaatataatgttcgatggaagaaaaacaattcgaaatattgaaagtgatacatattaaatggttcagtttgaggttgctagagacatctataaatcttggtttctcaaaattagtcattaacataatcacaacatatgttaaacttaaattataacattatatactgtcatttctcaagtctacatttgttaataaatttggcagaaaacacataattacgttttggcgtagaatctctctataaaatagctattgccgtaaaatctcttatatatatgttcactttagctgtagatctttttgctagctttgttggttgtgacttagctattttatccaaaaaagaactatgttagttgtagatgtagatgttatttttttcctttaaatttcaaaattttttaaaaaatatatgattaagagagattaaggattaactgtatatgtaaaaattgttatatatatatatatattttttttttgcatttcatttattaccataaaagttttctcttttaaaggatttttacaaaaactaacatttacaatcccatacgacatttttttgtcagtgtcgtacaactaaaaagtcatttcggaaaaccgatccaaaacttgaagatgatgcatgtacagatgtactcatcaagaacttgtattcgacatctggatcaatactgcaagatgatcaagaaatatggttctgtcaatctgcacgagtgataccaaaaaaaaaagaaaaaaaaacaaagttttgcagtaagattttgacttgaagttaattaaaaaaattaaataatgaactctagtgttacttgtttctttattttgtaataagaatctaattgggttaaataatgaactctaatgttatctttttcattattttgtaataagagtctaattgggatgttgatcttactgccaaggtccgagaggcgttccacaaagaggaggcaaaccactactccccatccatgatcaacgagtggagcagttatgggtcaaatgaaataagctaaatggcgcaaacgaagatatttttgaaagttttaaaatggatatttccgatgcattaaataatgcgggttccgatgagttgtaaaagaaatcggaaaactgattattgtaacattttttttttgtatcaaattgtaatgctttatgattcgatctacacaacataaaacatgataactaattctgaccaaacacatatataataatgtaggttacctcttcacgttgttatagtttaaacaaaacaataacgtagattgagtatctctacacgttgtcattcctgaagagtgtcgttgactttttagttttttgttcttttcctcatattttccaatttttgaatccgatcaaacaacttgtgaaaacttttctttccaaatttgtttccatggcgcagcagagccaacgtccaatctcaaaccgtcacatctctctcctcaaccgtaacggtctcatcctccttctccttctagctctctttgttatcctcggtgtattcttacctttgacaaaatcttccttgttcatgtttccaaacacaacatcttcttctctttctccttcttcttctttatcggtctccgactggcgcgactattcccttgctcaagccgttaagtttgttgctaagaacgagactgtgatcgtctgtgctgttagctaccctttcttgccttttcttaacaactggttgattagcatttctagacagaaacatcaagaaaaagttcttgtgatcgctgaagactatgctactttgtacaaagtcaacgaaaagtggcctggtcatgctgttctcattcctccggcgttggatcctcaatccgcacacaaatttggttcccaggtacagagagagttttcaccttttcgtatccgaagtctgaccctagcttgaaataatatccttaactttaaattcttaaaatctagcttagaaactcgggtttttatgtacatgtgtttttgataatttagatcaaatacttagttttctactttacatagatctttgatctttattagctagatttaacttacatttaagaatattattatatcgagctaaggacacacgtgggatataccgattgctcgggtcataaattgtaaaatgattctgcatcccctgttttatggtatagtcgcttatgggatatgtttgaagttataccacaaagacgctatccatgcatagaccaaactattcttggggtagaatagtatcccatgccagctagtatgtgtttttgtctctaagtggtgttataggatattatggttggaggttaccgatcatacatctgtaatagtatgtcccatattaggtcccatacttctaatctctcttcaattttttccaaaaagtcgatgactattcataactatcacattaacatcataaaagagttagaccaaatgtgataatatatgcaaagaatttgaatactgcaatccgatgttttacctaatttattatattatattagggtttcttcaatctgacatctcggaggccacaacatctcttaaacattttggagctaggttacaatgttatgtacaatgatgttgatatggtctggctacaagatccatttgactatttacaaggaagctacgatgcatacttcatggatgacatgattgcggtacgtaacatatttgcatcttttgcattttaattctagtgtttatgtaattttattcttggtttgatttttgtgctgccagattaagcctttgaatcactcccatgatttaccacctctaagtcgaagcggagttacttatgtatgtagctgcatgattttcttgcgttccactgatggcggaaagcttctaatgaagacatgggtcgaggaaattcaagctcaaccttggaataacactcaagcaaagaaaccacatgatcagcctgcttttaatcgggcacttcacaaaacagctaatcaagtatgtaacgttgctcctccaaattccacatttgctttatctaaaattttcacaagctttctttacctaatcattggctagacttagtaagatttattgttagttttaaattgtgattcggttagtagttagaccaaaactttttggtactttaagattctaattttatctactcctaactcctctaatatactaatggatgtttgattacgactttttggtactcaaatgttatttctttcgtgatcttctattgagcaggtaaaagtctacttgcttccgcaatcagctttcccatcaggaggattgtacttcaggaatgagacatgggttaacgagacaagggggaaacatgtcatagtccacaataactacattatcggttacgacaagaagatgaaacgttttcaagactttagtctatggctagtcgatgatcatgctcttgagtccccactcggaaaactagagtataatttaaatgcaccgaataacatttcctctttttgttgctatctttagaataacatcgatatcaattatttgccctttctttttgcttctcaggatatatcaagagcagaatactactactgaagggaaaaatctgacgaaaatagtgagaaaacagaggaaaaacaggggtaaaaaacacaagttaccctagagaggacttctccttacgtacgacaagtgtaggatctcgaaattgttgcgcggagatttattcaaactcgattacttagatatatgttcaaagtctcccattataatatgatatttatacataaatactcatcagcactatttcattaataacttttatgtaaggtatggtcaatacgaatatccgaattaacatgagattttcttaagaataaaaaatctctatgataggtataatgactaggatcttcaaatcgctttagcaatccaagttaccgtcagtgaacacaagatttgaacaagcaacgtacacaaatagcgtccgttacatttttctattcattctccttcttcccactatgtaacatgaaaaaatttgttacataatttgtcatatatacaaaataccctatcacatatataatccaaaataacataatacaagtcttgttcatctccatatgaagtgagggaacttttactgagctacttactactaacctattatagcaaggaattacaggcatatgttagaaaagatcaaagtagatggagaatttaacaaaagcaaaagagaaaaagaagaaaagaaaaagacagagaaaccatttcttcagattagtagtagcacttatcatcgtcctcttcctcggacggttctcggatatggattcggaatcactgtgttcggcgatatcctcatctttgtctttggttgcttcctcatcttctttttctgacgctccgcaggattcagatttagcgacgctatctttatctttttcttctttgcgtaacgattcgctgaattcatgtatataccagagatcatcttcatctgcagaacccacattgttgtttcgctctgtttcatccgtcaagatctggacaccacattcaacaatgtcgaaatgtttgtgtatgctgctgaattcgagcactatctctctgctagaggggtagaaaaaggacaccgggttcaccatatgaaatataaatagatgttccattcgatatttatagacatccgttagtacaaactccttgtcagtggagtttactgagttgctgatgactatgcaacgacacagtagtcttgaaactatggtagaatctctgtctttatgatcaaactctgtagaaatcacaacgcaaaccttataggaagcagaattaggaattgttaatgaatttcctctggctcgatgatcgaacagtgcaggtacttttcttcctggtaagagagctcgcccatcaacaaaccgttgttgaaaaatcgcttgtcgcgcttgtcgatccaatttgaaacagttgctgaaatcaaggtctgcatttggagtgtttaaaggttcacttactctctccagtgattcacaatggcttgcccgtagccatttgagtgaactaggaagcttcggcaatgacgtgagttttttacagtttgatagagcaaggacacgtagattatgaagacctttgatgcaatctgtaatactctcaataccactgttgtctatgtgtagctctgttacactcgtggggagaagtgttgaaaaggtcttgagatttacactgccacttatatcgaaagactcaatatgcgagaaatgcctaagtgacgcgggaaattctgcaatcgtagtctccattacagagagcctaatgatgttggcaggaatatctggaaaacttttcagtcgtaagcatcccatcatcttgatatcttcgagagataccaagttggtgagagttggaatgacttgtagacgtctgcaatgattcgtctctaagaagtatagtttatgaagattagaaattgaggatggaagctctaacaaagcaacgcattcatgcaaatccagacgctccagatttttagcatttgaaagatttgggagttccttcaaacgagatgacctagagagcttcatcgttttgagatttgcaagcagctgcacgtaaaaatcataatataatcaataagtaccgtttcaacatagtttatatatatttttctatgtgaatattcctaacatcaaatatcagctgtatcgtctcatatcagcacaaataataaataactaacctgagttccttcccatagcttctcgagctggctatccggcatgttgagttcgacgagattttctgggcagaatctacgaggaagggtctttctcgtgtatgcatcccaacgaagtaagcttaggcgaggaagaaaatccatctcctctggaatgtgcacttgtccttttccagtaaaccacggatcgtaaacttttagcaacaaaagattgtgcattctttcaaacgccttagcgcttattgttaatttgttgatctctcctacgtcaaatgatatacctgcgattgatccattaccctaacaaaaaatattccaaagcaaaacttgttattggcaagatctgctttaaacagcagtgaataaacatgatagcgcaaacagaaagcttacttctgcattttccaaaacataagaaatctcttgggtatctacaagaatctggcgtttccaaggctcttgtttggaaatgacttgtctagccattacttttagcaaacggtgcattaccactatacctttagcgccatgacctatatgtataagatgtctattggctaatatttttaacccaagtctaacattcaagttagtttttgccagcatggatgtcacataatcagcatgttgataattgaagaagactgcaatgtagagaaatagagcttggtctttctcatgtaaactttcatagcccactttcaatacactctcaattcttccatcaagacaagtttgcaatcttggtagttcttctatccagtcagaatagttctttccccgcaatgatgaccctaaaacatgcagagccaatggaagataaccacaaagctttgcaacttcagcagcaagattcataaaccgatcaggtggagagagttgtctaaaagcggatagacaaaagatcattaaagcttctttacttgatggaaaacccacgtggtatatatcactgataccatgttgctgtaaaatctctttgttttcagtggtcactatgaccctacttccaggaccaaaccactcgatattagccaaagcatcaagttgatctagactctccacatcatcaagaatgataagaaccttctggtcgtgtagcctctctcgtatcacacctaaatgggctatcctaatgccatctaggttcaaaatctttgaaagaagttgctcttgtaaccgcaacctcaaaccatactcaacaagaccaatcttatagctttcatgaaggttgtccataaaacaattatgctgaaaccgtttagatagtacactatgtaaagctctggcaatggtactcttaccaatgcctgcaggaccagagattccaacaatcttagctccatcataatctaaatcaagcaaagactctatttttctcaaatgagcttcaagtccaatcatgccatcaaaatccctagacggtgtggtattgagtttatctgaaacatcacttgcaatcttctctatcatcttcgcttcattgtccctaaccaaagacaaagaaaaaaagcctattcatgagaaaaacaaaatcaagaattgatactataattcataaactccaattcatcacaattaatatcctacgacataaaagtataaaacgcaaaccagttttggaaatgttctccagcgatgttgcccacataggtcaacgcttggctccatttttgcctctgctcctctgttttacgagcacatgtttcattgaaagcaatcccgaaatctccagtttgtttccttacatcagaaggatgtactccgtagaagacagtcatcacaatctgccctaattgttctttgcaatctaaaatctccaacaactcatccaaacaccaactggaagaagcatagttcttcgagagcaatacgatagcgatccttgattctctaatcgcttccgtgagagctggggcgatgatttggcttctctcgatcctttgatcatcgaacattgtaattccattgtagttaaattgtttgcgtaaatgactgagaaatgttttgcggacgtctggtccatggaaactcgtgaagacattgtatctccaggtgcgacgtgaagaagaagaagaagaagaagccatgagaggttcaaaatcacagattcccagagagcgtgaaatgtttctttggaacgtaaacgaaagtagagaagaaaaattcaaagtcaacgtgacttcgaagaaatgggaatgtgggctccggtaataatgcaaacgcgcaatggaaggtttcttgttgggaagattaatgcatgctatgtgacatatgtgtaaaacagatttatcgttagaaaaaaaaaaaaaaaaacagattttaatctatttagaaatacagctcacaagtggtgaactcgtaaacaccaagttctcttttcaatctcttctttcaccttggctcggtgtgaagaggtgattcagtttcttacaacgagctcaaattcttgtgattcacgtgttgtttctaggttgatattttgaatttgcgttatcaaaactgaacacagagtcacatagaagttctcattatatactgtctagctattgttgatatatatggaatatggttacatgcacaattgatggctcagatgatatatattagagatgggcttatttacttgtacattaggtcaagcctaatatttaaagttttagaagaagattattaagaacacaaaaatttaagaataactctcatattagatatcaaatctaatatgtttattgtgactggtcatttttttctaaaatttataagggtgatttgcatgaataacactttttgagagaaaaattaagaatatagcactatatatgtaattattaagtaattaacttaaggggtaggtaaaatgatctaaggtggtggtggtggtggttccagcgacgatggcggtggtggttccggcgacggcggcgacggtgattccggcgacggcggcggtagtgattccggcggtggtgattccggtggaggtggttgtccggcgatggtggtagttccggcggcggcggttgtccggcgatggtgcggtggttgtccggcaacggcggcggtggttgtccggcgatggtgacggtggttgtccggcgatggtgacggtggttgtccggcggtggcggcgcggttttccggcaacggcggtggttgccggcgatggtcgttatggtggtgattccggcggcggcggttttccggcgacggtggttgtggttgtccggcgacggcggtggttgtccggcgacggaggtggttggccggcggtggaggtggttggccggcggcggtggttagccgccggcggtggttgtagtggtggttaatggtgttagtagtggggataaaactgtaataatatatattacatatgttatattgttaggttgtttttattggttagtttgttaatttataaaaattttaaggttatatctgcaaattatccaattaataatgtatttttgtttttataatttaattaaagttgtatattatttttggaaagatatctttttgttaatttcttttttataagatgaaaataacttggtaattcgatttgaatacgaaagtaacggtatattgaaattagtgacacccatacccgatccaaacctgatgggtggttatccgaatccgatccgagatctataaatatccgaacggatcctatacgtctacacccgaatatccaaaaacctaaaatatccgaaccgaattcgaatgggtatccgaacatccatgcctatttgttacttttgatattttattgacgtttagaagaaaaagaaatattagtagaactggaatttggtaatttgattaggagaaggaaatagtggtattcaattgtaaaaatataaaatcttacatttttaaataaggaattttagtagactcgtaaattgactatataacacttctttttccaaaggcattgtaacgtaatatcttacaaaaaccaagattgtttttaattaggtacttccctaacattaatatagagatttaagaaaaatcaaaaactgccagttaaattcaaaacatatcaacatatcaaaatgtctagagtttctttttgtatattatatgggtcgagacataagatatccagcatgccatcttatgtgtgtacgccgtttgccaaataatcaacctagacaacacttgaatcaaaagaaaatcacataatcgcaccgagtaaggacgaatgaagaggttgagaacagaggttggtgtttatgataatgagttctatcaagatagcttccacgcatgcattaatcttcctaacattttgttaaaaactttcccaaggaaaaaaacattttcgaaccatttaggaagttaagaatataatacctaatatggttgtggtttactctgtaaatgacaaaaattcttcaaaatctcttcgcaatttcttctctcaaaccccacttgttttctaaaaccacatttaactcttctgaaatttcttttactttgcaaagaaacttcacatccatgtctctcttaacaagtgaactcagctttgctagctattttctcgtccgcataatggtaaaagaatgatcctaaacacatctggccaagaatggacagtatatatacaaattgttatgtacgcttcattatgacttttcttttctttctttttgtttttctccatattcgtttgtaataatacatttaaactttcgaaatttctttaactttgcaaagaaacttcccatttctctctctctattaagtgaacactattttcccattcttatccaagactcaaaatctgtgattttgaaccactcaagatcatctctcatggcttcttcttcttcctcacctcgcaactggagatacaatgtcttcacgagcttccatggaccagacgtccgtattaaatttctcagtcatttacgtcaacagtttatttacaatggaattactatgttcgatgacaacgggatcgaaagaagccaaattatcgctccagctctcaaaaaagccattggagaatcgaggatcgcgatcttattgctctcgaagaactatgcttcttccagttggtctttggatgagctattggagattttaaagtgcaaagaagatatagggcaaatagtgatgactgtcttctacgaagttgatccttctgatgtccgcaaccaaaccggagattttgggattgcttttaaagaaacttgtgctcataaaacagaggaggagaggcaaaaatggacccaagctttgacctatgtgggcaacattgccggagaagactttaaacactggtttgtatttagttaagtacagtttatttttcttatgatgaataatggtgttttatgattttatgtgggatgacatgggttgtgaagtttggaatttgattaatctgataaatttgaaacttttaagtatatttgacagggattttgctatggtatgttatagcgtgtaatgaataggagtttgattactatagttataaatatcaattctttaagtatatttgatcaaaatttgttgtggttctaattactgttatatttcgtcgttatgaatatcagatattaattaatatctgatattgcattctattttagagtaggtttaattgttgaggggaaccataaatcggtagtgtccatgcaaggaaacagaggaatggtctctttatgattttttctcatgaattttcttttctttttgttaggcccaatgaagctaaaatgatcgagaagattgcaagagatgtttcagatatactaaacgtcacaccgtgtagggattttgatggcatggttggactaaacgatcatttgagggaaatggagtctttgctagatttaaagaatgatggagttaagattgttggaatctctggtcctgcaggcattggtaaaagtaccattgctacagctttacatggtcgactctctaacatgtttcagcgtacttgttttgtggacaatcttagggaaagctataagattggtcttgatgagtatcgtttgaagttgcacttacaacagcaacttcttgcatatgttttaaatcaggataaaattagggtgggccatttaagtgtgatgaaagaaaggcttgacgacttgagggttcttattattcttgatgatgtggagcatctatatcaactagaggctttggctgatatcaggtggtttggtcctggaagtagggtgatagtgaccactgaaaacagagagattttgctgcaacatggtatcaaggatatataccatgtgggttttccatcagaaggagaagctctaatgatcttttgtctatctgcttttagacaaccctctccaccttatggttttttgaagcttacatatgaagttgcaagtatttgtggtaatcttccattgggtctgcatgttttggggacgttattgtggggaaaaagtcaggctgactggattgaagaactaccaaggttgaaagactgtcttgatggaagaattgagagtgtattgaaagttggctatgagagtttatatgagaaagaccaagctctttttctcctcattgcagtctacttcaattatgattatgttgattatgtgacatccatgctagaaaatactaacgtattggatgttagacttgggttgaaaaaactagctaatagatgtcttatacaaatagatatagaccataatcgcaaaagtagagtcgtaatgaaccggttgctacaagtaatggctcgagaagttatttccaaacaaaaaatttccaaacgaaagattctagaagatccccaggatatttgttatgttctagaagaggcaaaggtatgttttcttaatttaagggggtttgcattacttaccatgttattgtttgagcatattatctctggccactaacaagttgtttggaatatttgttagggtaaaggatcagctttaggattatcattggacgtagcagagatcaaagaattagtaataaacaaaaaggcttttaaaaaaatgtgcaatcttctcatcttaaaagtctttaatgggacggatccccgagatagtaaattgcacgtaccagaggagatggagcttccatctagcataaggttactacattgggaggcatacccgagaaaatcttttagatttggtccagaaaatctcgtcacactcaacatggagtacagtgagctcgagaagctatggaaaggaactcaggtaagttacttacgtgtgttgatgggaaatgagatatttgatgttggcaatagtctaatagcacattttgttctgattttcacgttcagccacttgcaaatctcaaggagatgaacttgtgtgggtcatcttgtttgaaggaactcccagatctttcgaaagcagcaaatctggagagattggatgtggctgagtgcaatgctttggtagagattccatcctcagttgcgaatcttcacaaaatagttaacttacacatggaatcctgtgaaagtctagaagtcattccaactctcatcaacttggcatctcttaagattatcaacatacatgattgcccacggttgaaaagttttccagatgttcccaccagcctcgaggaacttgtgatagagaaaacaggggtacaagaattgcctgcatcatttaggcattgcactggtgttactactctttatatatgttccaatagaaatctcaagaccttctcaacacatctccccatgggtctaaggaagctagacctaagcaattgtggtattgagtgggttacagatagcatcaaagatcttcataatctatattaccttaaactatcaggctgcaaaagacttgtgtctttgccagaactcccttgttcgctcgagtgtctatttgcagaggattgtacatcactagaaagagtaagtgactctctaaacattccaaatgcgcagttcaatttcatcaaatgcttcacattggatagagaagcacgacgagcgattattcaacaatcgtttgttcatgggaatgttatcttaccagcaagagaagtacttgaagaagtcgattaccgagcgagaggaaattgcttaacaattcctccttctgctttcaacagatttaaggtttgcgttgtgttgtcaattcactagacgatgtcgaagaattc

SEQ ID NO: 1009 - DNA, 86014 bp, Arabidopsis thaliana
gaattcttcagctaaacataatcaaacacatcaatgaatctgccaaaagaaggaccaaaatcaaaccttgacaaagtttccaagagttttagtagatcctctggaagaagtaaagacatcatcaataccagcgaactgaagaaccttcttaggaaccctagcagcaacaataccagaacctctcggagcaggaaccattctcacagtaacagagccacacttcccagtaaccttacaaggcacagtgtgtggcttcccaatcttattcccccagtaacctctcctcaccggaacaacagagagcttagcaagaataatagctcctctaatggcagtagcaacttccttagaacacttgacacccaaaccaacatgaccattaccatcaccaacaacaacaaaggccttgaatctagtcctttgaccagctctggtttgtttctgaacaggcatgatcttcataacctcgtctttcaacgtaggaccaacaagatgatctatgatttggtactcctttactgggagagaatggagatagatctgctctagcttcgttattttattgtcagccactagacgacctagtttggtcactggaacccatttcgtttcttccgaggcacggcctccacgtcttccacggcctcttggaccacgatcacggccacggccacctccacgtccaccgccgaatccacgtccgaagtcaccacggtcaccgccacgctctgcgccgccttctcctcctctttccgccattttcgatgaaattcagagaaatgaaacgcttcttcctcagagaaaaaccctaggaacggcgcttgagcaacaaaaaggttattaagattctttgacaaatatctgtgggcttttttaaggctttaatttctgcaaaccaaatattgggccttttgctattcttcttaccattgcccattgtactgctaaagctatctatgctttcaaattcgaattgacgacgattaacgttaatgatatctctaattatgtagatagcttggcttgtttaccaatttgacagggctagctgacgcctaatggtaaaatcattaataagtggatagtaagttaaaacagtgagtgaatttgtgcagaaaaaaaacatggtatcaaattaggaaaaagactcgaaaattttacaacaaaaaaacacaatactatagagaaattttatctcaagagaacgaagtgacatttattaaatgcaaccgactttaatttgaatctataacaaaaacatatggatggaaattaaaaaatttaaacaactaatgactagttagtaagtccaagttaaaggctaaagactagagttgttggtaaacttgcttgtaaacttggttctacggggtaatgatgtctagaagtaaggtataggtgtaagtgcaagtgtgtgtatgtataatgaagttagtataagtaaactagtataagtatatttatgttgtgttgtgtcttgcagaaacagtcctttgatccaatattatcaatgtagaagattaaagtaaaaaacgtttcttgttttctatttagaacaatgaaactatcaagagagacttttattttgttttcaataaataaacaccacagtttcagcaaactggaaatctagacatacattagcacatgtacaagcgtcacaatcacaaaccttgaagatcaacagtaataacctgagacgaatcttccttatcaacaccaaacgtcttcagaaccttactagatgaagtagtaatcacttcaacggcataatttccactataccctctaaacggaaacgcaccgttttgatcaatatgtccattagcatgagagagccaatcttttttcacagccaaaaaccttttaccagcttcattaacatctccttctgcattcaccaaatgagagttgtctctgctcataaacaactcccaaaatccccataacattataccttccaccgcgggatgtccaaaagcttcccacatcattacttccaaatcatctgcccttatgtgctcattgaccgaggagacatccaattctgtgaaccatattggtaaaccgagaattcctagtttgtctagggctgaacatacaattggacccaccggactgtcgatatggccttgaatcccgattcctcctaccggcgcacccttttcttgcaagtcaagaatctgttccgtgtacttttcggggcaggattttgggtcacacccgtcttctatgtggtagtcgttcacaaacaatgtcgcagatgggtctagttggtgcgcggttttgaacatgttgactctaatgtctttgcctagcttatcttggtagaatgatccatgtaacatctcattgttcacgtcgtaatgtttgaattttcccttgtaccggtttagaagatcggttaggcggttttgcaccgcgttgtttaagtcggtttggttcatattttggatccattgctgaacagttgcttgaacttcccaaaagatacaatgtcctcttgtttctatgttgttgctactgcacaagttgagcatatcatctgcgtcttggtaattaagcttcccttgttctggttccgtccagtaccatttcaattcgttagcgaaaaccgcccaattaaagttctttaagaagaaatcgacgaaatcttcgttatctatatttgatctgctaatgcaagtccccaccgggaagctatttcttatctgtcgaactctaacactagctccagaaaatttgctagaatcaacaccagcaaacttgaggataacgtcacgcttacggatctgcatttcaagaaagttactattaagtctcattgcttgtttgaaagcagagtttttgtgttaccttgtcacattgtcttttcaaatgttttattctcgcgagtcgatcgacgggaaaaatctgcaatcccgcgaccatgagatcaatgccggaagaagggccttgaacgtaaaccaaagccttagatgggttcttctcaattcgaaaagaaccgccaatttcatgccatctatcatcgttgatctctacctgtcctccatttacccattggctatcgataccaagtgcgacattaacattttgcggactattaatgccagaaccaactttgacccaaactgatatttggtacgtcaagaaaagcttaagtttatcagtgatcatttgtgctggacccatccatgtctgtgttcggttagtcacaagtatatagcggccacttagacgctcgtgtgctccaagcgagtctcttgccatcggaggaaggatccgaggtgacccttccgccacacttagcgtgcagttccctaatgaaaaccatccgttggtcgtatcatcacttaaatgactatttgtgagtatgtttactccaaatgcaggattctacgagaaaaaaacaaaacaacacggattaagacatcgattatttgtttacgttttccaaattaaacaacagtcttcagaacaaaattattttgctaaattgtttattctttagaaaatgttatatttgtttagaatattttgttcacctataattttacggcggtgaaaatgtgaactggatctttggacttacctcaatagacgggggtggtgaaggaggaattttctcggcgtgttttacagttaagctattgagaagaatatcggttcctggaggtggaccttcgatgtaaatgactacccgcgatgcagaaccgttgaggaggaacttccctttcaaatgtatccactctttgtctgttgcttgcacacttttaaggaaacaaaaagagaactacttcagcagttaaccatgattcatgaataggagaatgtgatacattaaatactaacgtggaaatgccaatgtattgatcacgttgatttggattttggacccatagagtagcttgtacagtagctgttgtcacattgtttccataaatacgaacaaccgcggttgcttcatatacacgttttctctgaactttcccggtgatctcttgctgaataccgttccagttctgcgtgcgttctgtagccgaagcgaaaaccttcccggattctggtactatctttccatcagccattgagtcatgcaacacaatcttgcagcttctcccagaccagttatttagtccatcttcaaagtttgggttcactacaatagtctcatcttcagcagtaacacgctccagctttaaagtgttaacacaattccaaacaggaaaacaaatgaaaatttatttaaattactaattatactagtgtgatcatttggaataattaacctattgtaacatgttacatttatctttgagttttacatgttacaataggttatttgattaatttacatacctcaggctcgctttcgcggtggatggtaacagactgtatgagaagatcgatccccggtgacgggccttccaaatagaatacaactttttctggtaagctaggtaacgagaacatgccttctagtctcacccacttctccttgaagacacaagttctgcaaattcaaaataaaatgttatctttttgtctcaacactaattaagatcatagaaaaaggccgtactttgctatgaactgatagtttgtttgagattgttggctttcgagcttcaaggtggccataacctccaccaatccatgcaccggtccagagacagcaacagttgctgaaactttataaagactacaaggttttactctgtttgtgatgtcttgctccaagccttgccaagtttctttcctgttcttgacaactacatagctaccacactttgacgggtctaaaacaccgtgagagacattagactcagcggtgacaacaaaggcctcacagcaattcggatgccacgaatgcatcccggaagagaagtcatgattcacaattacattggtgcgatcagaaccaattatagatgctacattgttgttgttctgtttttcaggctgttcaagaaatgattaaacagagaaaggtaagactaaaagattcaaaagtttaacttagaaatgaagaaagtgtctgaaaagatgaacaagacttggcaacgaagaaaggaacatatccaaaccctaacctcttcattgtcttttcttgaaacctccatgctttctcttgatttctaacataacataacccaaaaggagaatcagacccagatcaaatcaagagaaattggctaatgggtaacagagaaattctaagaaaacacacaaagatttaatcttttttgttaagggaaaaagacaaaccttgtctggatttcgatctccgttcttatgtattttgtttgagaagcagcaaacagtgaatctcttcattatatagacgcacagagatcagtttttgtgtgattcttggtggatttttcaaattgatcgcaaggatttaagtgaactccaagaaaaactcgcgggaccagctaaccaaccaaatttttttatttttttctttttctttctaaacctcttaaacctgaagagcagataaagcgttcagttttctgggttttgatgttgtctcttggaggttgtgctctgaaaaagtcggtaaagctatttaaatacggcagacattatataatttttaagtcttaattttgtcttttgtttttttcatatttttagtagtacttaagtataatttaattatatttattacttttttgcaaaacaataaattatttccttttactattaaatttcctactccgtctgttcataattaattcaagttttggaaaataatttgatcatattggtgaaataaattatttcatttttcattatagaaaaatgaaatgtcatcaacaatatattttttaaaaattgatatttgcttgatggtctaaatatttaactaattaaggtgagttctacagctaaatactgcaagctatgaaacttatacatagccatacaaatattcaaccataatttaaaattgtcagaaatacgcttgagttcgagttcaagatgtcatattttacataaccgttcacgcattggaaaaagaagaagaaagtggatagctgattactttaagccatatccatgggtagtaatcgtttttctttttctttggaaaatcattaacccttgaaaaaataacaagttacaaaagggaaacattgtttgttaagtattacctaattacaaaaggtaaagattatttatttgttaagtatacacaattaacaaacccaacacccactagctgaactaatgtactagatgattcttttataagaaaacctcaactttggacataataacttaacatgctcgagtcctagaattaaaagattatgggtaaaaagacaaaaagtaaaagcggacggacttacagtattataatggacttattttattatttatttttatttttttaatactaggaggttttgcgccgaaatccataatccttcgagattcgaaattaaagcatgtaatattagtttcgtcacaagcatcattcgaaccagcgaactctaagcttcgtttagagtcttaataattcgaaccagcgaactctaagcttcgcctagaatcttaacaagttgatataattaacgatacttggttatgttttattattgactaaaacccataaaactttaggaccggccaagttgttagttttgttgatgacttaaagtaaaatctgttaacaatttgcgagaaacaaaaggggaaaaggaaggtaagaggttatcatcttgaggaagaacaaaacttcaaagattggtttgatctcccaacttgctaatttcttctaattgattatacttggatagcttggattagaagcaaactattgctttgtactctaatcattcgaggaacgttagtttcgaaagatctttattcaaatggctagtatattagtacattgactcaaccttttgaagctttatctacaaaataagtatttttttttcttttcttttttggtttagcagtttaggttaactttcaagtaattgtgagccaaggacccaagttttacttaaatatctctgtcgaaatgcaagtttttcttaaatctcttccaatgggtacttgaactaagggtactaacaaggtcctaggaagcgccactaaattaagagctagttggttacaaaatgagttatcttcaagaaaaaaaaatataagtaataaacatcatacaaatagtcttcataattgtgtcgatcttttatagattaggagtaacggacttctacaatgctttcctcgacgtgttcattcattttggtactgttcttttagacgtttagatgctacaactagatgcaaagaagtcatttcgatagactagttgccttctgacggtggtaggttgttgtctaatggtgcgacatgcataaggatgtcaaaatgggtaacccaactcaactcaactcataatcaaatgagtttagggttaaatgagttatgggttgacccaactaagtaataatttaattaattattattatgaaataataataaataattatcattattaataaattattaatttattatcatcaaacttagaatatttacggattccactttttacggatttacgtttttggcgggaaaattacgagtttacgtttttggcggaaaaatcacgggtttacgtttttggcaggaaaattacaggtttacgtttttggcgagaaaatcacgggtttatgtttttagcggaaaaatcacgggtttacatttttggagggaaaattacaggtttacgtttttggcgggaaaatcacgggtttacgtttttggcgcgaaaattacggtttacgtttttggcggaaaattacggatttacgttttcggcgggaaaatcatgggtttacgtttttggcgaaaaaattacaggtttacgtttttggcgagaaaattacgggtttacgtttttggcgggaaaatcacgggtttacgtttttggcgggaaaatcatgggtttatgttttttggtagaaaaattacgagtttactttttctcaatttcatcgcttgtatatttaagaaatttggaaaaatattaattttattaaattggtttagatgtgttggttaagcttaaattggcattggtttagagattttacttggtttaattcaattttacaaaacttgatgggttaattgggtaaaccattgaaaccattaaacattacaacccaactcatttaactcatcaaaccaattgacccaataacccatttgacccatcaactcatttgagtcaaaaactttaactcattaggattcatgggttgagttaagttgagttgacccatgaattttgacccattttgacacccctagacatgcatcatgcatgatggctgtagaggtagttttaagtacgtaatatattcggattctcttttagataactctgagtggttttcttatactcaagtctcctttcatatcgcgtgatctggtcttttgctttctttctccggtaccgctagaaaagaaaaaataattgatgaagctggagttagtttttgtaagtaataaaatttagatgttctcaagttttttcataagtgacaatcggcttgctatatttgagagttgaatccacatgaaagggaactagcaaaactgatatgaaattcaggttttgttctaagatgatttgtgaaaagttggttgtcacatttctaaactaatgaagcaaaatgtaaataataacttttgactaaaattaaagcttatatactctaatattaaaaagaaagaagaaccgaagcaaagggtttttacaagatggagattcggagtggcgcggacactaagttttggtataataactggagttcaaagggatgcctacatgatatattgagagacagaggattttggaaataaaagccacaactgttgcggagctcatagctactatgataaggtcattatgactttagaagttcaagttaattattgaaaaagaaaaaaagaactaacggtgatacgttacaatatgatggcatctattaagagtcatcaaaatgtttttcgttgttcttttgtcttttagtattatggtggttacaacgctgcattcaacaccaatcaactgtcaagctgggaatgacatttagaggaagccactaggctatcaactcttgtcaaatgtcaacaaaatgttaaaaactttaaagaaattgtcagataaaaatataaggccttatggccaaaatgttggctagtaagaagtccaccaatgcattagttactgtttagggcctaccaaaactaatcacttttactcgaatttggcttgttttcagttaaatctggtctcaaaatagttataatatatagaagtgtatattattaagctcttctggtttgtatgatcaaattatatttggaagagctcatatgtattagattgaaagatgtagatacagagagattcatgaagttttagcaataaagcattctcattggatttagacaccagatagtttaacagaaagaccaaactactacatatatttttgactctcttgaggatctcaaactcactcatgcatagtccggaagggcttgtaggttttgacactacttataagtcctgcgatggatccggctgcagctaagagcgagacgatcaagcaaacatagcacatcgttttcagcgcaatccatctagcagagtacttcttaatcttggtttgtgcaatgtgcatctccacagggaaataaaccgttaaaggccagaaggaagctgctccgataagacctaagatcgcgttgaagaaagggaatatcatagctacaacagtggttataaccacataagctgtcctccacaccaatctgaagaggctaatgttgaattttccaaggaaaggtacgtttactgaatattcagaagtgatgaacttgttgtctggatagtttctgttgcattttttctcaacaaactggaatatcggctgcgcgaacacctgaaaatgttatatggttcgtttcattagccaaccatgagaaagtgagaaaaaaaaaacgatctctcttcttggttttgggttttacctgataggcaccaataaggtggacagcgatgcaagcgtttgcaaagtcaatgagccaaaagggctcgaaaaacccgaaatctgtgaggaaatctccaggggcattgtttccaaatgcagcatagccgatgcatccacataagatgtagaaaaaagtggtggttgatactcccacaagacttgctcttttcatggctttgttctcagctgggctagatcttagtgtatcctgcaaaaaacataaaactttcaccgttagtgatacaatactccaatctttaattttggtaaacagttttgaactaggtccattatttccttgggtcagagaccagaactaagttagtcccctccccatcagccatcaccgatgcttaaactcggggaccttcccggctgatccacatctcagacactttaatccaaaaatattcttggttaatttgtaaaactattttttatcatactgccgctacccggtcgacatatacacaatggtaccaaataccgtacatgacaagtcattaaatggtgaaagctacgatcattaagagacaaaattttatgagttgtagtgtcaactcagtaagctaactctgttgataagaatatcatatcattgtttgttgtggagaagagattgacaatatctttgaatgtgactctttgtcctttataagcacatgttttacctttaagctaaaagacagattctttactttttgactcttttgggtaaagaaaaaaaaaagtggtccatagggaatcgattgtcgttgtcaataatctctacccacaattctattaagaggtttatattcaaagcttaaaagactttaaaaattgactgagataacttgcctgaatctcgatgagaaccgtggcataagcataggcgaacgctatgtccccaaccgcttgaaacgatctccatatcttttgagctgcggttacatctactccaaccgctgtgcccgtcatactcgtcttacccactttcccacctttttcatattgtaacatatgaaccgttagttttgtaaatggtcttatgacttttaacagtagataaattggtgtgcaactaattaatcatgtcaagattgttacaactattgaaataagagtacttaaaaaatggcagctatgcaactaatcaaaacttttaagaattgcatgtacctgcgacggttgcgatggctagaccgattccaatagttgcataagtaaaggacatgaccgcggccataatggaaagaaaagagagcttgtggaaatttgggatctggctaagaataacctgaataatgccaaaaaccgccatatacggataattcgatatagtacaatccgcagtgtgccctttatcgtggaagcagttcgatttccctaccgctctgtttaaacaccaaaccaactacatcagtatttgttcatagcttatataactcttcttatcaaattgtaacaagaaaacaatttacattaaattttgtaacggtataaagtaagaacatattcacattgtagttgacttacaccaaactaatagaagcagtgatggtgtaaccaacagtgaccccaatcagattcccatattgtgccactccacagagctgcactttcctaccacctgtcatatgtacaataattgcaaaagtattatttatttattacttctgtttttaagctattaattaattttctgtttcataaagaaaacacaaaacactccacggaactatgttataatatatctatttgttatatacatcaacatccaaaaccaacaataatgctaatactacaaaaacggttgcctcatatgtcaaaatgttctttttttttctgttttccttggttttcacaatttggctcaataaacagtccaaaatttaattagtaaatttagtttgacaaccagctaaagatattattgattgactaagataaagtttcagcctaattaattatttcaacaaacatagaccatagtgtataattgggaattaaatggacggttaccaaagttttatatctagccaaaatatttatgtttaaaatagaaatagagcaatttgaggcaattacaatccacagttttttcctctgaaattgcagggatttaaaggaaacacagaaaataagaaatttccatttattacatcttcaattctatccacaaacaattggttgcacaaatctctaatttctaatgaaccaaacataacatatggagtagaatattttttttcttaataataatagaggccacaaaaacaaacaatttttcccattagatatatctttgagaaaagatataaccaaagcatcacattttttgtaatatcaatgagtatctcataaacaccaaacttgttgtatctcaaattgatgcaaaacaggactgtcgctattgatcgacatcaatctttaataattatttaattttgcttttctaacctcaataattcttccgacagaagtcatcctaaactaaaatactacacaaagtacagtatcaaataaaacagaaccataccttaaaccaaaaaaaaagttacttttttaacaaaaatgaaaatttcgtaaagaaccctttttgacaaaaaaaataaaaaaattggtgtataaagtgttgatttttaaaaaacaatctgtttcacaagaaaacaaaagatagagaatcttatgaagtcatggtaataaattggtcaagaattttgtgtttgctttatgacatatgaatttttttcatatttttgatattctatcaatttactttacaagaaaaactaaataaaggggaaaaaaatataaacataccgaggtaagatcgaacaacgtccatgtaagtgtaattccgttttccggtgacgggatccggcgcacggtagcaatcggcaagcatggtggaggtgaagtaagtaatgaacgagaaaatgagtaagatcgatgtccctgcgatccaaccaagctgagctatagcccatgctaaagacaacactccggagcctatcaccgccgtgataatatgcgcactcgccgtaagccacgtcccggtacgcttctctcgaccatcttcatcgacgttctttgtcgggtccgacacggtgtaggcatcgccggattccgccgtggagtggttgtgtccttctgtgttgaaactcttcatagtgatgagagaaagagaaagagagaacaagaagaagataaaataaatgttttaagtcagagagagagtaaatgaagaagtctaattatagtcaacagatttgtgtttgcataatatcatatatatagacatacttgtatatgtatgtaatgaagtttttaagcatatatgccaacaagacgtatacgtaaaaaaatacgttatacgtgttcgatttttaacttttattgttaaatgttataaatgttttagttaaagaaaaaaaaatgtttatttaatatagtttcggcttgggatgtgtaaattgcttttggactagacagagaccacatatggagggacgattttaatgttcagattctgtaataattattcttcttttttattctgacagttaatttggagtaatatatagaaaaatattttatatttagatttgttgatataatgactttttgtaactacaaagtacaaaatacaatatttttatcatatatataatgtagaaaaaaatcttcaaaattaaatgctatatttttcctttttgaaatttacagatacatttctaagaacttgtaaaactaatttatagtgttctaaataaatattatttactccttaaattcataaaacactttataattttttaaaaatgtcaaaaaaaaaaatttaattaaaaatatcttaataaacaagttatacaaacttttgggtttacagatttttgaagatgacaccaaaagaaaatgaaaacaaaaaacaaattattatattgttatgcctaaatgagaaaaaggtattcaaagatgcaacctaattatgaagacttcttgaactctaatgaattccctaaattggatatacaaaatctctatggtttggtttttttaacgagttgaagatcatcaaatttggcattacagattagaaattatggacaatcgaagacgacaaataaaaataaataatggggtaaaattcatgtatgtagatcatttaacaatttaagttgatgttaatataattttttaataagataacatcggtttgatatttgacactacagttgggccaagagaatctaataaccccgataaaacagatttgacctaaatatatatcgtttctgcgagaacccgtcctgttaagtgctctcccatgttaaaaaaaaacactatttttaaaaaaaaaaaaaaaatgttaatatatcgagaataaaataacaaaatactttcgtatcaattaccaagtttcataaatccatatataatgaaaatttgggtagattcatgaattattccaaattctcataaactcattcatacaagaataatagaaatcatgttggaactctcattctcttaatgtttttttctcgtttagttaggagttagtttttcgtactacttggtcgaacatacctagttgtttttcaaacggcttatatataatgtatcctaagagctaacaaatccttgaaccattctttcagttaattgagggaatcagaaagtcagaagatactacttatttaagcatcttgaaacgacgagagaagctacttatctaccataaataactttgatttatttgatcttcaaattttggttttcaatgttctaccaaaataaaactaaaaaataaacaaatttaaggtttgagtttgatgaagagtaaacgtgtgttgactgaaacaaaaagtaaaaagttgaacaaaaaaacggatgaagggtaaaagcgtaaacgtaggttttggctattaagagattacattatcttataaaggttaatcatgctcaatcaggtcaaataatgcaaatgccctttgccagtaaaaatgttagaccgtgacatagatgtccatcgttctttaatttatatatatattcatgttgcttctttagaaacaaatggtgatttatttacttgtttaatataagaagaagaaaaatcgagttgaaatatcatgttcattctttctcaaaaaacaaagtatcatctttattagcaatcaaaaatagttcggtttaactagttgttttaattacgaaaaaaaaaaaaaaatttatctaaatatgaaaaagcttagttatagagaaacatggtacttaagtctaataaagaattaaattgtgagtaagcgaatttggaaaccaataattaaaaacatttatagttttctcaaaagacttctcatttttcatctaactctaaccacgtttgaaaagtcaagttgtgtcgagtgtttaatataatttaactctttcaacgaatgagcagcaaatcattgaaattgtatatatgaagatcatcgtctttttgctctcgtttatattcatgatgcttcttataaacaaatcgtgatttattacttgttagttaaataagaagaagaaaaaaatgtgatttgaaatttcatctctattaacaaataacaataaatagtagttcggtttaacttgttgtttcaataaaataaaaaataaacggttcctcaacatgacttggaaggagaggaacaaccgtttgcacaactatgtctcatccacgatcctcaaggttttcaaagacgtcgatagacattagagacacaattttagctcgtcgtaaacatccatcttttgcaaatctgcttcaacaatggtttgcgcatgagtaatctctgctttttcacaacttcttttcataattaggctttttaatcttctttttttagtctaattgtaaccactagctacgccaagctcttgtaaagaaattgttccttttggtaataatatttacattttatcccaaaaaaaaaactataattatgaaaatatatcccggacgaaaaaaacttacttttagagaaacattgtactaaaattctaataaagcagcaaattgtgagtaagcgaatcgggaaaccaataattagcatcatttatagttttctgaagagatttctacttggtttaccaaaaaaaaagaaaaaaaaaaaaaaaaaaaaagaagatatatttctcctttttctcatagctctaatacgcttgaagagacaagttgtttcaattgttcagtgaaactcttttcaacgaatgaacaaaaatcattgaaatcgtatagaaaatggctgaatgttttttgattggtcaaaggctgattaattttataatgattaacaaaaaaactttttatgtgaaagtttgacttctttgtctacagttacgtattaggtgaatcacatattcacatggttttcattgatttataatcgataatttctagaaagattcgaaacctaattttttttaataaagctttaataagcaataatggcacttaatgaatctttcaacaaatggcatatggagacaggtgtaacgtctgagaatctgaggttccttgcctaaaaaatcaaaacttgtggtggcgaatcttcacttaacgcaaaattgtaaccaaaagctattaggttcatgcaagataattaagtctaatcaactataatacttaggcttgataacatggtttattttattatttggaaaagtaatggtccagaagaatgttttatttgatctcacgagttgcctcgtatttgaaaattctttgtatttgaaattgttctgaaagaaacatttatattaatatgtgtatgttgactatgtacacggatggagaactgagcgtaaagtagccccaattttgaaatcgatgtaagatataaactttttatccattataggttttaaaatattagagagataaagatggaaacaaagtggaaaaataaatttcaaaaagaaaacagtgattaaatccaacattgcaatgctaaattttgaatgtgaaaattatggatttaggtcattcactgaattttctcatttattttttggtccaacgaattctcaaatatatgaaccttcactcgtaacctctttgataactataaacaatctatgtggtttgcaaaccttgccttgtataagtaatcaaggatttctatagatttcggtttatatttacctagtcattgacaaaaagagggaatgtgattaataatgcccttaaatagttaaataaatagtaaaaatctaacaaaaatttatccgggatagattttagattgttatgccttggaatggttatgtatatatatatatatatatatatatatatatgttaattagtagttcaaaacaaaggaacacctgagtgaaacaggatttcaatgttttttttatcaaaaaaaaaaggtttttgatgtttatattatttctttccgaaaggtttgtagttctcaaagctatatataggtgttatggtgtgaagactgatcaacaacaaactgataggtgattttatttttctgtttttcctttacttttgagtttggtgtgtagtagtgcaagtttgagtttggtgtgtagcatgaacaaatttgataatttcaagttgaatatattgaaatgaaagtacctagattgttttagtagtctttaacaaaaaaaaaaatgttgcaatattaagtatatgttagtccatttctacgcccaaatttccatgccgatgaaataaaatatagtgaaaaatgtttccttttcaaagctacaactcgaaaatatagaactgccacttaaataaaatgcatgtgtctttttcgcaaatttttttttttttgagcaaattccgcaagtaaactaaattgagaaatgaaggtcatcgggatataatctaactaacattaaataaaaagtgcataaaatatggttaaaataaaattttgaaaataatgaaaacaagtgcttaaaaataaggataaacttttaatataaagactgtataaaagtaagatggaagaatttgtaatttgaagttgggaaaacatagaaataatatcagaagctaaaagaaaataatataagggcgggtcatacaaagattgggtatctatcttaacggagtcaaatggtgctttttttaccattttatgatcatccactaaatctaaccaaatttgaataaaagaaattaaaactaaaattttaacggtgtcacatgacctcataaagttcttacttcttagtggatccgctcatgctcctacgtcgacgatcatctagtacattctcaaacctcttctctaggaatatggaatatcgaaacaactaatgcatggctttattgctaggatcagtcttaaccgataagctctcgtcactagatatcaatcattctcttcggtaaatattatataaataactggaaagtgatattgcatgtgatttaaaaaaaaaataacaaaattttgtacatattttatataaataacatgattttggtattatatcatgtttatcatgttttgttttttttaatcagtcaatcataacttataagtgtgctttattaacatgttaatcgaacaccaaccgctacccgggacactacaatgatacaaacccaagcggcctgtcaagcaaagatgacaacgaataatcccaaaagaaaaaatagtatatgagaaaatcaattagtttaagagtaatataccgtaaaagaaaacaatttccaaaactagcatttaatgcgattgaatacatcttctccgacaagaaagagcaagacacttctatcaaattaaattcaaaggataattaagtgaccgacctacatgcaataatccgatccgtcgaccaaactatacaattacccacatatacctctaaaaataacagtgtgaacgaatctcttctagctataactaattttttacatttgttacacgtctttattcgaagttatcacattttcttcttctggcacctttttgtatttagaaatatagatatacgcccttcgagcaaccaaaaactgactgcaaatactaggaagctcctcactacaatcttgagtagatttcttaaagtacttgagcacactcttttaagtatgatcatcaactagttcaactcacaaatagcagattgaatctttaatctcatactatctttggccagattcgacatttaattacaaaaattcgctttttgaaagtacctagttgttacaactagttgttgcaacatgttagtactcgtttaaaagacgttaaattggcgtatgcgaaactcatctacatcttccatctttttcattttaaagttaagatctcccatttacgaacatcaaaaccacaagaacatttttagagtattaaatgagaagatcccataagaagttggttgtgaaaaaaaaaaaatcccatacaaaagttggataatttgcacatcattaccatataccaaataaattacatattatatgcattgatttattttgttggtgtcgttttcaacttaaacaacacgtcttcctaattctagtattttcaactgtagttttgtgatgacattttgtttttttctaaaacgtggttgcggttatcgagagacagaaattaatttctgaatcaaggacacaattcgagaagataattctaggtataggatatcaatctgcgcaatatatttaccagaaaagatttatagcgataccggtaaagaaataagcaaagtggctttggcaatgcaaaacatggcaaagtaattgcccaaacgaatttcattctttactttatttagtgcaatgtctatttcactagcttatactatacgtgggaggttcatattttataaactttaggatatgatataatttatgaaattcaaagacacgtgaaagagtttggcctataaagtcgaccccacaaattaaattccacattatcaacttatgcatgattttgagtatggagaaaagtactttgaatttgtatgacaatttgtttggggaacccaaattctcatagtccacctcccaaaaagaacttttgaatttgtaactgacaaaaaaacactcaataaaataatgaattcagagagacagcaacaacaaatctaaaataaatgtaaacatagactgttatgtatttgttgagacaattaactctgaataaaatggacggtgtatcgttaagtaactttagtgccgacttctacgattaataatagtcacaaaataataaaataagtttagtttaaaactttaaataataaacttggtgttacaaatatcactaaagctcgggatcttattttcaggtcatatcaccagcactcagaccctatcgactggagtagttcaaacacgactcaaataatactttagttcattgttagacttgtctagtctttgatattgattgatttaatgtttgttacatttatttcaaatgatttatgaaaagtttcaatgtcgttgacaaacaaatttcaaactgtttggttgactaagaaaaataaaattcaaagtaattaagaaaacaatttatattcaattcaatttatgaatgttaaaacgtttggatattcatcatagtgaaattttcttttgtgtactacatcatagtgtacagatattcatatgtccagtaccgtctctcgatttatacatatttttttgtactactaaatatagtattcaacaaaaacaattgcattaaaagtggaaattatatgtttcttttttttaaagggtttattatatgtttctatatggtcatgatataacatgcgaagatatttttcattagaattatatccatttatttaagttttaatagtgaatcaaaaatagttgatattcgtaaaatatattaataagaacattctccgacctccgttatgctttacaaaatgtaatgttggagtagcatggtctaaaaggaaagggaaactactagtggggcttattgggtgctccatgatcacatgtgtaaggttttgatgcatgatttgctcggcccgttatactttatttgtttaccacatctttgctaattaaccataagttccgaatgtaactctcgaccgctatttttaatactacggccaaaaactcgtgttattacattataggtattaaaacgtttccagggttttatcattccgagataagggaaggatataattttctgaaatgctgcaacaaaaccaaactacgtactaggattttagaagctgaactaaattgaacgttggtaaatttttctttgattgccattatcaaaatcgtcacgaaattaacttcaaccttactcctcacatttttcacaactcttttccttataccaaattttctaagaagactcttgggattcatctgtagacccattataaacatatggcaaatatttggaattatgttgttgaagggaacatagtaaggccctgactcctgagaatgtctctcgaaactttggaaactacttagaatcagcctatatatggcaaagtcggaggtgaataagattggctaaaggcttcatgccatgacagaggagagttcgaatgaagaaaatggcgacgaatttaagaaaaaattcaaagcctctttaggttaatttgtctaagttaaggtaccatttgtgtccacatatgacatatacgatttttgttctagttgtatatatatacaaaataaatcttatgggctgaatacacattcttatctactaaattaataaaatgacaaaataagcaaattaaagaatcctaatggaatgttagattctacatttgaaaataacattaaaatttaatcttgctaaacaaatttgataagaaatagatgaagatgccactcgtgatgctaacgatattcttcatttagctttacaaaaagatgtgtctctttctaacactttgttctttaaatctgaaggaatctacaataatggtccatgattccatatacaatttaattcatttagtactactacattatcaagtccatgtacaattttaggataaaacggaatttgaagataggatacatctaatcttttggccttttgaagatgccgtgaatatattttagcatcaaatgaagatatatcgacttgataaaaccgatacatcaatacaaatgaagaaatattagttttcgtagttggaggaaggtttaatttgatcatatgatttgggcctaagataatagcccattaagtataaccaaaggcttaaaactaacttagtcaaataatccgaaatttggcgggtcaaatcttttaccgtacgaatcgaaaaaacaagacagcttggatcaaaggtgaacattcatccttccttacccgacaaatttactcaaaaatccgacctaaagttttgatttttataatcaaatttcctcgaattgctcgacaaaagtttattcctttaccatcacaatttgtagtttacccagatccttttctcctctgttttttctttcgcattgttatcttcagtgtctgtctcattgttcccttttcccagaagctgaaacaaatctgttttttttttttttgttttgtttctgtgaatcttcagatcttgatctgagagaccctacaggttctgtttctgctctgcgattgatttaattacatttttgattgatgattataactaacaaatcatgggtctacatttttcaagaaaaaaattatgttaaagaaatgtttttgctaaatctgaaatgtttgtgaatatgtttctctaagtgtgcttattgctttatctgcagattctcttagtgttttggttcactggaatgatcaaggatctagttatgtagaaatttcttagtttgggagatttcatgagattgctaagagttgagtgatactaagttcaggattaatattgtttttgagaagaacacagtcaaagatttagaaagtgatgtgattttttgggttcacatatgttacaccgtcttagatggtttattggattgagtaaaagaagtagagaagccaagacgcttgatgcgaaaccttacatatccaaggttaagccagtactgatggttgacacggttcaagagattgcgatttatattcataggtttcataaccttgatcttttccagcaagggtatggaacatatttttatatatatatatctttatacttcaacattgttttgaaagcttctgactcttttaacttcatcagatggtatcaaatcaaaatcaccatgagatgggaggatggtgataacgtaactcgtggtattccttcacgagtcgtgcaatatgaaggtaatactatagctttcttatgaagaagcatgaatgcctgagatcagtatcctataattactatctgaattctgtattattagagaatttgttttgagtagaattggatattgaggattgtttttttttgttaaagctcctgattccggtgctaatgactcatatggagtgtggaagatagttgataaagataatagtttcttaacacagcctttccgtatcaaatatgcaaggcaggatattcgtctgtgtatgatgatctcatttactctgccactggaacgatatgaggtaacaatcccttaccattatgcattccattgaaatattctccgaaaggaactgaatgagaaccatccggcgtggatattgcgttcctgaaaggtttgaaatgattctacgtatgcaggggtcagctacatctgctgctatattaaagtttgagctcatgtatgctccctctgtagataatgcatcagcgaagcaattagatacttctcctgttgcagttcatgagttccgtattcctcctaaagctcttacaggcttgcattcatactgtccagtgcattttgatacacttcacgcagttcttattgatgtgagtgtccacatcagtgtattgaaatcggctgcttacaaacgacctgcaagtctatcaaggtttgtcaacataatgtttggcttcgacataatttactataatatctgcttaggttcatatttctatttagttgatatctcaaggtgttttgatgcagtggcgtaagtaacagtaaaaatgtcagtggcagcagtgctcagtcttttaagaaagtatgtgataatgattcagtactcggtagtttaatatttttgcagtagactagattttaaagacgtcttattgattggttgccaactttttaattcactaggcacttggtttgcttgcttctgctgacaagaaactggtgtcatttgttaaagcattacttggagctcgtggtattttactcgaggaaatgcaaagacttagcaaggcagttggtcagacaatagacttgtctgactttgtatcaaatatgaacaatgttcagttatctaactcaacaagtaccggttcaggacaaggcaaggaacaaaacagtcttgaggtccttgctttaattttgatgctgactggtttttttccgattatttttgcgtcgttttcttctgcttatttctccattcttttggcacagaatttgaatattacatttgatttaacaagtgatgactggcttcatgaactctcgaaagatcatctatcccgtatattccacttactgggcacccaactgcattatctttggaacacacttctgggatttcaccggtaattcttttgtacttcaatgatctaattaagtttcagaccaagatcgtttctttatctatctactgagagactctgaaaatatcaatattctaggcatttatcgcatatgtcctttttagggataatcacacaaaaatacttgaatatcttcgtgatatctggactaaagatcggagagctgaatggtcaatatggatggtgtactctaaggttgaaatgccccatcattttataaatagtggaatgacagatatcttaaaccagagcgcgcacaaaagggcctcaggcgtgttgaatgaagtgagtttagcgttctctctctatttatcaaattttgtgaaaacacaagcctgactcatccaatttttgctttgatgtagccggcccaaattgcagctacacgtgctgaacttcaccgtcggagtattgcacagatgcgggtttgttcttctctttttgatttagttccctttcttggttttatcaactcttagtttatttggtcaatacatttgttggtgcagattaacaaccgttcaatacaagacatgcatatacttggagatcctatgcgggttcctattgttatcattgaacgtgtcttgaatgcaccaagacgcactttaagtgataattcgtatttgagacatatggatctgcttgattctagcttgctaaatgggcacaaggatgaagcagaaaaaacaaaagtcactaactcccagcaaagtgcccgtgaactaaaaatcgtcgtatttgttcatggttttcaggcaagtatcactgaactataatagcaattttcttaactagctttccttttgatctgtttttcgcttgcttgatcgaaatttgctcatattggttaccataggggcatcacttggacttaaggcttgtccggaatcagtggcttctgatagatccaaagatagagtttctcatgtctgaggcaaatgaggagaaaacacatggtgatttcagggaaatgggacaaaggctcgctcaagaagttgtttctttccttaagaggaaaaaggatagatatgcaagacaagggcatttgaaaagcatcaaattgagttttgttggtcattctattggcaatgtcatcatcagaacagcaattgccggtaatattctttgaactctggtaaatattgaatgactcttagttatgtttcagtgtttttgacatctcttttgttctttcagatagtttaatggaaccatacaggaagtatctacacacatatctatcgctttcgggtccgcacttggggtatctgtacagtacaaactccttgtttaattccgggctttggctactgaagaagttaaagagtacacaagttatccatcagcttacactcacagatgatcctgatctccggcatactttcttttacaaactctgcaaggttagagaaaaatacctcaacttatattcagtttcaccacggatacgcagaactattcgtctgttattcggttctaaaatcggtttgaattctttttcagcaaaagacattggagaatttcaaaaatataattctcctctcatcgcctcaggtatgcttccatgttttaaaacttgattgtgtgaagcagttttagccataagccttgttaatgaataagggaaaactgatacttattttcaacaataatgtgactgtgatgtaatgcaggacggttatgttccatatcactcagcaagaatcgagtcatgccaacctgcttctttcgacagctcgaaaaggggagttgccttcttggaaatgctgaataattgtctggaccaaatacgtggaccggtccccgaagcacctcatcagcaaagggtgttcatgcgctgcgacgtcaactttgacatgaccgtttatggtcgtaacctgaactcattcatcggacgtgctgctcacatcgagtttttggagtccgatatatttgctagatttataatgtggtcattccaagatcttttccgctgaattttgtaccaagttgaagaaattttgggatttacagagagatataaactgttgtatattaactttgtagatagttttgtctacaattgctgtcgcgagaaagaaaaaacagatagttggctttacaagcaatgttgtacgttcttgtagatatagatagattttttttttttttctttattttttgagaagaaatataagcttgttttgatgttactcaattgtaggcctggcataatatttgatcttgaaaaccgatccgaacacgtacccaagttttaaaatattataatggattctaagtttcaaattctgaaaaccgaacaagtatctgaacatacctgaaatataaatatattgataatatttgtatttgtaataacctaagtgtccaaaatattcggatttagagatattttgtatattacgatatttttgctacttgtgaataggtttaggtaaaaataatcagattttttttatacattttggatacttttaagtagttaggatatatttggatacaacattttttggatactttaagtaaacccaaacctaaaatacccaaacggattttagatttctaaacttgaaatacctgaactcaaaaaattgtgatccgaacccgaacgaccagacctactcttttttacttttaagtttgcgatccacacccatgggctagagttgggccatgagaagaaacttgtgtactactatacatcatgtatacgtttttctcttttaactctgaaaactggattcaagattgaaatcctaacgattctttctcatcaaaacaaaattcttttaacaattgtttttctaatcaatacgatcgctcacaactgctttctagcatatcttcatttgatatgctcatcaaaaaacttctgattatagtcacattacgaatccacttcacaaaaagagatatatttatattacataagtatatattttcatagataacatcctcactattgggtcaacatttgggggataagatgttggatttagtgagtaagacttcatgaactgtttgatggagattgttttttttcgttgtcaatttatcgcaccacagaggtgactaatggtttcgttgatttttctggattacttatcttcggcttctacttccagtccgcttgatttaaacctcaccgcgcctattgccatttctcatttagcaccaaccatgtttcttaccacaagcaaaaggaaatcacctactcaattacatgattatcactgttacgtactcattacaatccaatatatctaaagtgatgtgtaaatttgataggagtttaggatgatataaagtttatcgggtaaaggatgattggttggcatttaacattaaattatttactgtagaaaatagtctgtaaattgtttctgttgttctctaatattttggctgtaagaaaaaaaaaaaatttgactgtaaaattaatgttcttgtaagacctaatgattaaaaatgcattaaaagtaagctttgacgacaaacattcataaacaaatactgtaagcaacaaaaatatttatggtatttttaaattttgaaattcattagcaatgtaattgatctggtggtatgatatttggatccacataaaacgttattccttttatgtcagtttcttttctaattcagtagatttgggtccattttggctatcgttttttctcttaaccaatttcccgcaataaagtttgtctatttacgatagggagctgcctacgaaactcttgggccatagtttgtgtaggttttaggtttatcatcattatttaaggttctgtgcaccaataatttaggttatattgcgttgattcaatgattctcttttctcggcccatcctaataataaggggatgcatgcaattatttgaaaaaaaaaagtttgcggcacatgcatgtgatattacatgcttctatagtttccaagcacatgtgtttctttgtctacatcaagatagcgtcaaaggggtaaatagttatcctcgaaattgtttgtttctatgccaattgtcaagagcgagagttgtattgattatattcgttttgggaccaaatctaagtttagaaactttttgactagtcttatgagatatttgatattacatatttgcataattgttgttacacgttttggtaagcctagagatgatgtcaatctcaaaggatcgagaaaccataatgagaaatctgcaaaacgtatagacgtacgcaatagacccgtacgtgttctctttcaaaaatctgaagtgcaataggaccaccatttaggtattgcacgtacagctttgaccagtcaatgttttagcaagaaagctattgcgatggccttttcatagagtcagaccggttcaacactagtaaaaacaattatgcgcctggtttgaaatatggatcgtaatcatgtgcgtctcctttgtaggtttaagtcaggaatcgaatctgcgatcaactatttcaagaaaaatcttgccgtttagtccgtagacgctttcaatggcaagaaaatccataatctatgttatgtgtcttagagattagtctggatttcggtatataattcttccggttaacaaaagaaaaacaaatgttaaaatatactatatagctatactttcccattcattgttttcttacgtgagaatagaaaacattaggattctacgctagcttatctagtatgttaccgatcaagattcacactggatgaccatcattctcttggccttcgaaatatgtgatcgtggcttataagggatattgttttagaagcatattattttctcttctagaagatagattgcctaaaattttaataatgtgcgataggttccacgattcgtgtggtcttagacgacttttgcatgagaagaagaccgtcagcttatgttcgacagtggattagtctacatttgtcatatattcatgaaagtgaaaggctattatagttttctcatccttataattacatatatagttgatgaattgcttttcttaatactgattttcgttaaaaagatcttaaaagaatatcaccaattaatcaagtgtcattagctcgactagaaaagcaccaaagacaaaacttagaagtcacatattaaattgatacttgaaaatagatcagaatgcatgtcctagtctccggtataaaagattatacgggcctaggctaataatctttaacacaagttaaggatttttttaataacatgaatcggagccttgttcaactagtcagttaaacatgctaaaaacgaccatagactttggtatgccatggctcgtggatatatatcttctaaacaatccctgagaatgttttcaaaagaaataaaaattaagagttatagacaatagaaaaagcgttgaccaataaagtttaattctgagttgaatttttcttaaaagattgactaacatgggatttttttgaatatatcattttcggataaatacaagactatagatcacattccccgacccacttattagcaaatataacacaatggagtctttgaccaaaccatcaaaggcgttatcaaaacaaaacaaaacaaaaatcaaagacgttatcaaaagcaaatccatttggcaaatgtatagttaagattttggtccataatatgaaactgaaatgaatgtttcttacgtgtttctttgttcttctgtagaaagtttgtggatgcatttagaatgtcataatgtatttatcctatgaacaatttttctaattaagcataccactaacatcaacaaagcgaggtaatatagtgcacaattcaaaacgcaaaaagaaatgaaaaaaaaatcagaactattaacatgcttccttttaatagtgggttaattagttctgcgtaaaagcgaaacataaatcaacttaatctcaccgaccagcagaaaggaaagaactatgaatataaaaaacaaattggtgtgtcaaatattcattgatattagattgcattgaacaattgcagtaaatcctctataaatcaatactcgatgagataataactttttaaaaaaatatatatataaatatatgatctcattaatatcataattaaaatcatataaatttataatatatatatatatatatatataatgtatagttttagtgtttaaaaatattgaatttattgttagaattcacctctaacttttattgtatcaaaagtgtattatgttgtgttttgaaatattgtattgtagtatatattgtctatagcttcgatataatataaataaaattcttatgtaagtttcaaattttgaaaatgcataaattttattgacatagtcttataagccgttattttaaagtcattaatcagaaaattgaatttacgtttatcgtttgtataagtgaattcatttctaatcttggttaattattgttaatatgtttttcttctaaatattaaattttctggtctaagacttcacaatttgttttatctattagcactagtgacaacccatattttatagtaataatttaaaatataatagtttcgaaaggaggtaataacaattaagtgcctttatcttacatttttacatgttcatattgtataatttatgtaagatatcttttgagtttgatgattttgtgtgcaacgaatgataactcgccattattatttcgatatacaacatttgaacgcggtggcaaaagagtggccttcttttcttatcctgataagtgataaactgaattttataatttactttttttgagtctttataattgacttttattttttatttcaataaaataggataaagtaataacgaacaatccaaagtgagtaagaaaaggtataaccattggtaaggattcatccggacggcagagccaatgagttatgtttttcaaatatttaatcatatcctattttggggcatgcttaaggcgaattaaggtcggttgagagagaaagctcatgcatcacgagttccttttcttaatttcaacgaagtaaatgtttaagaaagagaataaagttttcttaggtagtagtttatcatacatgtcaataattaagaaactatatcaaaagattatactatataacaatcgtacatgtcaataaagttttatgaatatcatatgtttttaatcttcgtcggcatttggcattatagatttttaattatgataaatacaatatatgaattaacaaccatatggttgaacattatttgtaaaataaccataaagatttttttttttttgcaaaataaactctagcgagttattgatatatagccatataggtggaaaacacatgtaaaacttgaatttgacgatagctaatttttcacggatgaatagagtttcgatctcgacatgcttggtccattggtgacctaatgaatttgaggaaaagtagatggtatataagttgtcacaatttacaaacactattgttttaacgtaaaagaggaatgcacgttccaagtggcgtcagaatcaacaattgcaacaatcttgcatttaacctctttgtactcaatcatgatatgattagttgctgctttgaggagcagaaaatgagatttatctcatggttggaatcatgagaagatgatgttgaaaaagtaagtaggtgataaattggattgtaaagctattattttacaataaagggaaatcaaacgctcatgtctcggccgggtgagggaccctgcctattctctttctcctccaaactcgagctttaccacacgcgacatttatagacttgacatctattaattcgatttttcttagaacacaaacttgtctacgactctctctactctctacgtattatgaactatatttatatgtttgtgatgcttcatgtggctacaattgaacgtttgatccagacaaaaacagtaagaacatgtgattgatgtacctactccactttattattgcatacttgccatacttattctaagtatacatgaacatatatcacctttcggatctaattctatgatgtataaaaatatgtcatatattagatataataaatgctcacctcctaggatagtttgcagggttactttgcaaaatgagagaaaacaaagagttatttagggaaatgacaagtatttaaattgttgcgaacataagagtagtgttaaaaagtacgtagaaagaaaatgtaatgcataattatatcaaatgacctttaaaacacactccctttgttttgaaataatgtattttcttgagttgtcactcacacatatgaaaagttgattataaaagtatctgtttttttttgtgatttacaattttctataattctactgatagtattcaattaattttcttaaaatttatagagtcatcaataataactaaaaaatattacatagaaaatttaaaaactcttatctttttgaaacaatttattttcctaacaaatatatcatttagaaatccataatattttagccaaaatagcaaaattcataaataccactaaaaatggcaaaatacgtaataatcctgtttactgttagtattattattttctcattttactatagttttccatatatagatataattaactgtgtacagtactgaaaaacaacttctatctacaaaatatactttttttttaccgtggttaatcatctacgtttgatatctttaaaatttcgaaatagcttcaccagtaaatttagaatgagtatgattgacctcatagtgtttaccaataaaagacaaaaaaaaaaaaaaaaaaaaaactattcacgtgtaaataataacaaaaggtagatgtccaaaacttataatatagaattgtcttttctttcgtcataattcaaaggccaatgaaattcgaactttttatcgatggccaatgaaaatcaaagatatttcagcaagccaatggaattcagtttactaggctttacttattttatttcttaaaaatatctatagaaaaggaatatcaaaggttgaaaggtaattcatatcgtcgacacgtagacgcattatcgattccactcagttttatttcattttcttgtcatatttggttttattctttggccacatcgctgtgaagttcgtataaattcatgttctggtcccaggacaaaaaaaagtatacataaaagaaaagatgctttctctctgctcaaaggaaacaaccaaaatcaaaataaatgtgatctcaattaaattttaaaacgtatcgaatctcaatggctttgagacaaagaatatgatagaattaaaggaaattgttttccatttttggctacgaatataatttccttttatggaacatggaaccaccaaaagctcaaaaataaaacattcatcttgcctgtccttaagaaaagaattgattgttaaataagcaaagctttcacaacacaaatacgaatacaaaataaattgcaaaaaaattaacctattatggaacatttttactgtatccttagttattctgattgtcttcggccattaggtttgatctactagtatggtctttctctagatttcaatggcctagacacgtctagtatcttggaatctttttatatatatatatatatatatatatattaaagttgtattgaggttaaatttttcattttgatttatacttagtttttgtgacaaaaataaaataaaataaatttattcttagtttaacaaaaaaaattcacattctcctagaaaatggacaaatatataaagataatcaaaccacgagttattacaaaagggaacacataaaatacaaactgctgaagtcaaagctaattagaactatcacaccaatacaaccataaataacacaaacaccactaaagcccacaaaacaaagtcgttcttaaatcaaaaagtagaaattaaggagcactataaactccaaaaaatgatgacaagaacatatatgtacgtcaatgttgatggcaaatgcctccagagaatagctatcaatctaaaccaacatggttctcatcatatcttctgtaccggaggtagaccggctctttgagcttgcgatggggagaaggggcggagactttccgggagtttgtgacgtcagctcttcagctctctcggcttggactttccaatctgttctcaaaagtgcacacaacatgagagaagcacaagttgcttgagctgcaagcaacccgaaccagagacctggaaacccttgtttgaaaacaaacccaaacagaatagcgactggcatgcccacaaagtaaaatgaacccaagtttatgttggcaccaagtgtaggtcttgcacagcctcttaaaaccccacaaccggttgtttgaggacagtttccgagctcacataaccccacaatgggtaatgcgatggaagtcagctgaagaatctctgcatccgtggtaaacaagcgtccccaatggtgcctaaccagcacagcaaacaccatcgccattaggcctaaggcgatcgcgcagaagagtgagatgatcatggatacccgagctttcgccggacgtttagccccaagctcgttgctaattcttgtagagacaccaaggctgagagaggatgggaagacgtagaccaaagccgtcgtttggatcaagattcccatggaagccacggtggctcttgggttagccaaaagtccacacaaaatgatcataaactcgtaccaccaccactccaaacaaacagatacacaagtgggtatggcaagtgagagcaaagccgaccaacctttaagagagtcaatagtaattgggacccatgtatcactatgcacgctagtgaaatacacaaaagaggataagaggactacaaggttgagatttgtcaaaaccatagctatagcgactcccgctactcccatctcaagtttcaccactaggaggtagttcaaaggaacgtggaggagaacggacacggccgtggagtaagtcacgggcaatgtaatgttttgtgttcggaggtaaattcgaagagggtgaagcagagagagaaggaagaggtcagggatggcgaatagaaggaactgttgagcaacagaggagatctcttcatcttggccgcaccataagaggattcggcgcatgttgagccacgagaaggagatagggaccgagcaggagaggagtaggaggacggttctttgaagggttagtcctaaaagcttcatttgtttagctccgtatgcttggccacagattggttccatccccatggacaaaccggagatgacggagtagccggtgatattggcaaagcctatggagagagatcctccggctaactcaagctcaccgaggtagcctaagaacagcatcgatatcatcgctcttgagtacataagaagcccggtcatcgccgtcggcccagagatttttccgatcgccttcacttcctctaagccctgccgccagataattaagaaaagaaaagtcaagaccaagaaccgtccacgtcagtagatcgtttttttcttttccctggttaatggttaattatattaatcaaataaagcttatcttaaacctttataaaaaaatgacaaaaccaaatcaccaaccgggaccaaagatttaggtatatatataaaaaggattgcgaaactgttgtttctatttatatatatgtatatgtatatatgcttttggtatagttcgtacaatctagttttgtcaagaactagattcttgaattattatgttcatatctatgtagaaaaaaacaaacatttacgtataggaaaaaaaaagaaataatttacctccagaaaacttggccatcttttaaggtctagagaatcagtatccctgaattcagaataatgaggattatctgtatcacaggtttcgagttttgagatatgggttttgtctttacaagataataaggaagatgaagcagaagatggttttgaattacacatgattcttaagaggagtaaactggttttgttgggagtagagataaaaggacaaagagacaaagtctagagcttttagtcttttggaggcaaaacgattttatgcaaatgataaaaggaaccgagaggaactaatatttttaatatggaattggttgggccttttggaggagaaaggctgactatttatagttgtaaagaagcgatatcgtttctacacgtggcgaaaattagttttaatttctttttaacaaagaattgattttctaatagggaagtgggactttttttgtttgctttgactaaacaaatcgtgtgtccaccaaataagtctgtgagaagaacgacacacaggtttaggatagctcaagagttcacttttgaagaaagacataaaaattggtttagttaactattttaaaatacatcgcattacctttaataatagcaaatctctttcctaatctttaactcaactttgggcttcactatatattgaactctttcggttatgtcggctggcgaattcacagtcgtcctaagtgctagaatatcaggctgttgttacctcttaggctgagaggataaaaagcatttattcaataacggttggtcacataagttgatggggttagtacttgttttgaaaaatacttgggtgaacttttttattctagccaatcaaaatctaccacctaataaataatattaaattaatttaattagaaaatataatttgccataaaaaaattatatatcagttataagaaaaagttaagatttcaattttatgattgatgagattgaatatcggtttgagtttataaacagatttaaattttacaattaaacaagtttaaatattgatttaggtttataaaagataataaaggttttaaattttctaattaaacgagattatatatcggtttggatttatataatagtagttaggatttagatttataattaaatgaattttacatttttatggcatttatagatattgtatgctatttgactcaaattttacggatttacaatttttatacacttaacaatgtatatacatttatgatttgtttttgctaaaacacatactccatagcaaatattaaaaacaaacaaaaccaactaaggtcggtcctattaatatgccaattttgcctctctctttttttttttccttcttttttctttttttttctttttttttgataaaaaatgaaattttatatcatttgtgatttgtgacacaattacaaattttatgccattttgtttttctttaattccgctgaaacatttagaaacagaggtcggtcctattttataactccgaaaattttaaggttaggtgtaatgatgtcaaacaggaaactgcactagattagtctatatactttctgtgaagataatcctttctttttttgcactaacggttaatttaagttttcctagtcaatcaagataaaatttaagtttttcctatgtctaaaatatcaaattatgctgtaaaatggcatgagatttaatttagcattttcttccaatttcaaattgcatgtctattgcaactttagcatatataattttaacatttaggtttaatgaatatatgtaatgtaatgtaatgttaaacactattatgcagaaaatggcttgaaagcatgttcattgccaccataccatgaaacctaaaaactatttaaaataaataaatctttataaaagtaaatgtaaaatattaatagtaacttatttattatatataacttattaatgttaaaatagcttgttttctatcaaatgattacaattaattaaaacgttgtatcaatattttaccacaacatgcaatttcatttgttgtatatgtttttggcatatgatcattttctataaaatttggcgtgaaaaggatcaaaaccgttatcggtagatcagcatttctattgaccaaatttctcacgtgtatgcaaaaatatatcaagtagactaaaggtcttatcgcaaattaaccaattctaaatacttttcttgtacaacgtaactataaatactttgtacaattgtatgacgagttatttatggcttaatatctatatggtaacatgtgttgggagtctgatggtgagggaacgacatgtggagaagaagagaaattaaggcaacggagaacaactagttgacctgcacattttgtgattcatatacataatacatgatctgaagctataatttggttttggagggggcaaagtttttccggagttaatttggttttaagaatataacctttgtctagtaaatgaggatcgtatagtatttgtactaacttgaatttgaaaaatagttgtgcgtgttgagatgatcaaaattattaatttgatttttcatgtatcaccaaagtgtaattaactttttcgtgactcattttgaaaaacctacacattaagtgtgtctaagttagagatatctaaagaaaatgacctattataaatgattattaatatcatgagatgtaaaaacacgtatttttacgtttgtggtgaaatatatgaccaataacaagtttcttagaggtttcaaaagtttgacatcggtggtcagacgtggatgaagcctacgggctaggagtgaacagaaaggtccacaaataattgtagtcggatctttccaagtgatatcataaccaaacttagatgagcgtcaagcattgtatgctcacatcgtttgagggtaatagtaacatttttttgcaatatgcaatacgttttatgagtgaagtgattgtaagacttttttaaaattgacgtttgcatgtggatgtctaaacaattggtattttttttgatcgcaattttttttttcataacctgttcctttgttaattgtgtctaaactgtagtattataggatggatgaactatgattttcagtacaacgtaagtgaaaaaacacacacggtgaagtatctcttggtgctttgagggacaagtaaagaaaattttcaggtttcattggctgccagacgagaatgaaaattactcggtgacctatattggacattatgaactaagaatgagatgatcagaagattttgaagaagagaagaagggaaaccaacaagtgtacttttggagaaacgagacttatgatctgcattgatttgtaaattgacttcttgaataatatttagtccctctgttagtcttggataagtatgtttgataggaatattttccctagatctaggactcatgtccttagatatgtcgttggattgaccctccatgccacaccggtttggttgttggtattaaatgagaagtttgtgacatggtcggaattttttccgtttttgcatgttgcgctaatgtatatccacattgaatatggtactgactaggaatgtctggaaaagatcttgacaacatcttcacgtctacacacttattgaactatgcatgtttggattatccatggtatttttctagtcggactaacgacgtttagttattaattcatggaaaattgcatggttcttatgtggagacttaaaaacatgtcataagagcatgatcaacattcaaacattatataattaatgtgcatatccaactcttttgaaatggacatttactctataagacagttcacaaatgtttttaaaatgatccgtgtcaatcaacatatagttttgttatatatatatttttaattaaactattttttattagtacttaattcatatgctgctgattacttctagtaaattgcataacttagaattactttgattcaaactcacctaatgttggacttcttcttaggtttatgcaaagatagatgcatcattttttaaaagactcattttaaaatggtagatctttttggaaatatgaaagatccttctttcagtgtgactaagtagttccaattagggaaagagacaaagggcgttatagtaaaatgcttggagaagtggtggctgtctcgtgtttcaaggcaaaaacactgccattttttgttaagtagtgagcaacaaaatccatgtgaacaaaatcaactctcttcttgtctgcacaaatattcaagtgtcaagcataacccataacaaccagaggacatgcttctctcattttgtttatctttctggtcccattgatttgatattttttctctttcgcaatcgaagataagagttatcttgaagatagcaaggtgactgtaaaagacaatgcaacgagaaaattgtgttattatcttcgtgtgaggcaaaatccttatccaagttggcttcggttctgaggaactcgttccatattattggaagtgacatacaccagaaagattggaagtgacatagttgtttgatatgaagatgctatgtttttttatgtctattaaacctaagtaggttagaactaatttaaatgacgcaactaattttctgtctagcatttgaaatgttcaacctataagacataagaagttcgagattttatattgtcatttaaatgatggctagtcacaaaaagaatttttttatcttccacaaactttcaggaggtaacttgtagaatcttacgatgacaaaaacaatattaagaaacaaaatcttgggtgttgcttgactatttggacccgtagtctattgttcaaatgtcctttgtgcattgatataattctaaataaatgtcatgcatgtgggtcacttagttttcatatgtttataagttctagatatcattatatagattttgacaaaacatatctataatagttggattaggaacagacgacgagatctacaatagcacgttaatgacaacaacatcttcaatagttaacaaaaagacaacatttttattagaaaacgaaaaagaagaataaactaagtactaggttaattgttttctatacatagagaaattcttaatggtagtggttaattatattgtcatttggggtccattatttggattcgactagattctaatatctctcatcattactaaggttctagatataagatttgtggagcattttacgaaaataattttttttttatgaaaaatgagccatgcattatttacttagttagttgtacgcgtagccccaagttacatgttgggcggctattaaatcttacgttctgaaagtattggtagagaaaaatgaagtaggagtagcatagtgataacatatttggggatatggggtcaacttgctctctgctcagattttatatcatgaaccatgtgtaagtaggttcaccgaccaggcttctataacacgtcattagtgtatgcaagtgagtaagttggtgcagtgagaaattcatgttttattttcttgagagatgtatcatgtatgtattcacaagccttgtcatcatatgtcgactcttaactattatacaaaatcatgcatgtttttgggaaaaaaaatcaaagacgtgaaaccgattatgtgtcaaaaatggtaatacaatacatacataattgagaggaacacaaaagactagcaaaaaggttatctttaaaaaatttacatatggacagacttttatgaagatttagtctcatccaaaatcttctactatctcttttcttttatcgtttcttcagttggatatcgatatttttgttatatattatttcttgctttctctctgtctattgtatcctatgtgatttccatctgtttctatgaatttacaccgtaattggctaattctcaaaaattcctgaaaatgaaattaaaccttgttctattcagtattcactaacataacttcgaacatttctaaatcgttgtaagatatttactttcttactatacgtttcaatcctcgtcatctcactttttatgagtcggtatgcttaagaaataaacgtaagtagcataaaaatataacgtattaaatcgtctttagtttctaactttgtataataggttaataaccatatatttatgtatgatattttaaggtataataactctctccttttcctaaaattttcgagtattaaagataaagtatgattaattgaatgcttctaaaactctagaatgtaacgtaagagtgaccagcgagtggtatttcttagcttttgtagtctcagcagaactccataatagcagaatacgttgcagacatgcaggtcattcttctgcttcagtgtggaaattttgatggttctctttgtcttttttttttatttaattttttttcttttacttgaacgtgagaaaaaaaatacatcattatttcaaagtcatctagatgcgaaagactactcgccaactagaatattaaaccagcttggatatgcttctcatggtatagagttgatgttaacaaaactctataccgattggtaaaacaatattttttgtggagatatgcattccaagtaggtagcatcatataaaatttaaaaagaaaagtggtgaggaagagagaacacgatccactagcaattattatatttgtgaacagaaatgaaattggttgcctggaagagatagactaatttctctgccttgcttctggggacaaaaacttactggggaaacaagacaaaagcaaatcatatatatatatatattaaataaataaatatacaaacaaaagctgccttatcaactatcttcactattttcttctttcctatccattcttcttctggaccgtggcgaaaaaactgtatatataaattacaaaagcttgagttggtactgtaaaaaaacacttatccaaaatatatctcaactttatattcttaagaattttgtttcgtcatgaaattatgtagaataatatgttatcaagtacataatatttaggaaaaaagattacccgctttacgaattatagcagaatatatgatcatgtcaagtatattattgtatatttagctacacgaagtattctcctataattcgtgtagctaacaataatttttttctaatatttacatataatttaaaaaacattagcgtaacaaaaaagaattaaatttacttatttagaatttttgcttccgtcatttaaaaaacaaaatgaccatttctgcacttgtttgattaaacaatggtttttttttttttttgaattttaaacatttgtttcctattgagacttgcaaaacatgttggaagagaatcgataatgatcattagaaaattatataaaatttgtggggtggctgtttgaagtttcatggtaaaggggagagagaagacacaaaaccaaacagacattagtgggccaaaaactgaaaccggctagcttcttcatacttctagtcttggacatatcacatatgtattcttgtcgataagcaaatgtggaagagaaacagtatgaaagttgtggccacatagtgccatatcagttgtggtgcgtttttcttattatatttctctcttatatatgaggaagacaaattgttctgatagtggagatcaagcggagtgatactgtcggcttcacaaaacatccacaatcaaatttaaaaaaaggaaattattcaaaagtgcaaagttctatacttatcagaaggttgaatattatatacaatagtagtgtgtaaaaatgtgaatgtggtaagacaagggttatgaaaaggacgaaaaacaaagagaaaaagcatacaaaaaattgtccacaaacttgtggaacaaattcgcagaatccactatacgtgtttgctgccactttttgtgataagttatggccgaatattaccattatttgcctggctgtttcaaaattggaacactatctttgttttgctgacaaatacaaaagctcttttttctttttcttgtttttggttgcttttatgttgtccataagcaattcctcaaaattttagcgttttgccgtttacgtgtaagcaaattcatatttatgattatttttttggcagttgtgatgttgagataataaaaagctccttaaacttatctgttaaaatgaaatcacaaaagttgcagaattgttttctccaaagctgtattttggtcaattgtagatatcagtgactgttatagcggtatttactattgggtgaattgtgtttaaatagattgtaaatgatatattagtttagaaaataattaaataatttttaatcaatatttaagaatcttaaaaatcaatcataaaaatacggagagagtagataacaatagtgttttaaaaaattgtcaaaataagatgccattgtgtgcctttttcaaataaatgttttttgaaaataatgtgatacaaatcataaaacatacttgctagcacataaacaaaatattcgtaggaaaaaatacttgaaatccaagtaactaaaaatatggagtaaatattaaacttatttacaatttgctattttgtaaacataatgtggttgttagtgcatactgtatctataatcattaacaatttgtaatacaaaaaatgtttctaatataatattaaaacatagaaaatcaaaactataaggtttttactttgttttaaaacttatttttattttgacaactcgggtgatccgatgtaacggacaccatgcgctccgagccaggttctcgattgggtcaacaagcatgagatccgactaatcttggggccagcaaaagcaatgtgaaaaatcctgaaatccacacgtttatgaaatagtttttagaatcgaatgaattgtttgtagggtacgtaaacacacaagtattgatagttttaaaaacaacaaaaaaccactcgagtaaatactagccttcggttcctaatttcccatgaacatatctaaggaccgaaaatatgaattcttggaattcatattccatttagcattgtatgtttacttgtattcgaattcaaaacaaacgaatagtttcttttttctccttctgcggattggaaaatcgaatgttagtatccactatttaatatgaaaaactattcttcttatgcatgtttgcgtactttgctttttgtttctatgcgacgacgtcctttatgaagttgtgacgctatacaatgtacatttttggaaattaatagaaagccaccgtaattatgcgaacctttctttaaatatagtgatgtgatgtccatttgcctacatccaacgcacaataatgctgtcacttcaatattttggaagaaccctaaaattattagtatctattacccgcatgtttaattttaatcaactgttggttaatagtgacttaatatcaaatatgcgtcgaaggctagctagtattttctcaagagttttgttctttattatgtcggattttgggacatatataaatagatttaagggttgtcatttatcactcacaaggtaaatagaaagtaaaccatagaagtaagaaagtatcagcctcaaacaaattaattgtttcttcttgtttacgagttttctagttttgtccgtatagtaacacaaaaatagtattatgcttaaatgatgactacaaaaatacgtgacactcgtcacaagttttgttttctataattagttataggtatatgcttaaatttttacttcgtatcatagtcatagacctatacataaacagttggttatttatggagtcaagactcaatagtaacctaaatactataaattatataatctaatataatcttgagttgacgcaactagtgtcacgtagctacaaaactaagcatcaaagtttcaaattaaagtagagatgcattgcatcaatctaatatgaagttagagagatgctctgattctgccagactaaaaagttatgagtgacaattcctgaaaagcaaaacgaattagttctcataactcatgaaaatgttgcctaaattaattcgaaacataacattaagccggaaggaattgtctcatccaaggtgtctatcaccacaactgcacatacgaatccgattcttacaagccattatggatggtttcccaatctcttaaccaaaatctgcaccacgaaaagaagcatctttaggtatcggttttttccgacagcaggcataaaccgaagttgtatcgtcaacagttttttgtcaaacccaccaatgctttttagtttttacatgtagtcatgatgaagcaatcgtgcactaagtaatgcactacgtgtggaatcgaattatgatccgttacataatgtgaattccagaaagtaaaagggttagtgataataatggaagacaattctatttcatttgtacttcagtacttgttgtgctcccatggtgcaacgaagaattggatggaattttgattattaaagacttaaagtatttatggagaatcagttttctacagctttagaagtttcaagtcaagtgcatgagtagatagtaagatggtctttttgtgttcttgccgcttaaatattttataaatgaggcaacttcatgggagagtgatcccttgagcgcctctgccaataaacactattaagttgaaaaaacatgatatttagtacctcaatattagtgaagaagattttaaattcgacggtgaaacgtgaaaaacatatgagaagcatggactatcgaaatgggtaagttaaattgttattatcactggccataacaagagaaagaaaagcaaaagatactaatttcttcattttatcctattaatttttttttttgcaaaaatggatataagaatttctaatttttagccaatagatcatatgaattaaaacatgatactgttcaaaacccaaaaatgggcggacctagacgctgaacaagaaaagcctatccattcgccaaggcccaactagtcaatatgtatggaaatcaatgcctactgagaactgcaagtaatcttaatataagctacatgtaacaagagcaagagctagaagacttaccaccaacttgaatgccatgaattgtaaaaattaattttgtgttacggtaagttgtggactgtattgtttattcaaaggcttcttacaatcgaacataaagaagaagacatttttggggaagaaaatgaagaaagggatagaagattggctgattaaataaaccactatctttcttacatcattcatcaaaatctgactatcatttacaaagtaggatcaactctcactagagaactaaaagtacgatggcatgaaacgtaattacatacaaaactcatgtccaaagcccaaacctatacataagcactaccggatttgtttttattgtagaacaaatgttgttcacttataagaccaaacctgatttcgaaatacttagaacactcaaaaaaaaaaaaaaagaacattaaagtcctagcaaagaactgtttctctctacacacctaaatctctcagccggagataaaactctccagcggctcttagcagcttgatcgactgccgtggattcagaacctccaccactttcccaaccgtcacacaccggagttgatcagcgttcttcatcgctttaatcatctctaccttcaaaacctccattgcatcctccatttctggctgctctccttcgccaagcctcaacactccgatgcgcctaaatggaaccatcagaagtggatcccccacgctctgttgtagaagcgcgaaccttcgcatcaaatctctctccctccgtttagtctctaaccgaatgctctcgagttggtctatttggtggctcgtaaggtcattaacagaagtggttatgagcttaaaaaccatacctggtttaaaacctccgatccagaggatgagtttctcgtatgagctgagccatggtggagagaagaaatcatatatatcgtcaccggccacggacatggcaactgatttctcttcgtagtattggagatagtgagaaagaaagttactcacaagagattcttcttctattggagttacaatggttgtttcatcagcaaggtgtgcaagttgttggacgaattgcctgtgacggcagagccagtcattgaagaagctcgcaaaagtttcagagctgctagtgattggcatgactcatatatagttccaagtgagtcaatgaatatagacgagacatgcatgtgtgtctgtttaagtatttatataagacaaagacatcatcgttaaaaattataggtcgattttggtgaagttaagtagtaattagaatgtttaattttaatagtaaatgggagcagtaagcggtttcagaatggtacaaaatagtacaaaatgtacgatctctcatacagataatttacgtaatttgaaacattttagggcatgtcatttctaggtaaatttttgtttcttatagagacatccaaattatcaattgaatatctaaattacttcaacaaataaataaaaaaggactgggatgtattatcttgaccatctacttatcatctaaaaccatctccatcagtagtctctcacatagtttctcattaactaaaaaatataaaataataataaaatagaagagagataggagagagattgagaatagtttctttgcagagaaattttagagtaatgattgagagattatgtgtatatgtgtgtatttataattgcacagaaactaaatcataataaaatattattatattttttttttgagaaacttttaaagtatgtgaccaatggagatgaccaatggagatgacctaatgtcttaataattgttctagccatctattaaattacgaaactatatatttttgaaggtgtgatcagtgaaaataagagttaagtggctatatacacatcacataagaaatatttagcaaccattttcggttatttttatattgatttcagaaaagttaacattattggagctaagtgtttatagacactgtagaatgccatgataatttaaatttatccaaaagtgaaacgttttcaatttaatagatggttatttttatattttacttaatagactattaatgattttaacataattatgatgattatcagtattggctaatatattatgtttttgaatcatagtattgatgtataataatgtgtatggagatctaaaataaaaggtatatgtaatgtaatcacattgttcatattcatggatataaaaaacattttttctatgcatagtaataaacttccatacacaacgtaaaattcactgtcacaaaacaaaaagggttacaatcatattcagagctgcagatttaacccgcaaaaaaatatcgaagtgctggaggaggtcctaaaccggacgtagcatccattgacaagctacattgatctatcatttcaagttacaattttttttatatttttttgataatgtacaaaagttttatgttacgttgataaaagaatattaaggctgacgatcttaagaaattgtagacatgtgtgaagagaatctataacgtatattcttttcttcttctggaatccagacttttgtctttacatttaaacttcacacttgtgttgtgtggtaatgttcaagtagaaaacaacaaataacaatagatataataaaccaatcgtagtggttaagaaacaaagacattgaatgaagcgaatgtcgctacactgaacttggaaccattgtaggtaagattaaaaaaggaacaaaaaaaaaaaaacttataaagttttgttaatcagtagtatcaaaaaaataaaagatgtgttattaaattattttattttgtacaaataacacactcaatgtttattcaaataggtatgtttttattacaaaaaaaaaagaactctttataaactaaataactcaaataagctgctggcaaagataaacggacttaattaaactcacagagtcacatgtaaaagtaacactttttggtatgattataaaaataatatgcaaatccataggtaaaaagcctatttcaacatgtataattttcgtcgtacgtgcttgtacaaattcataggagaaccgaaccaaagtgtatatataaaagattaggcctttcatagaagaaaaaagatcaagagctagcttttgttttaatcttagaaagaaggaatttactttgttcgagaagcaggcgttcgtgtgcatggattctgaatgatctatggattctgaatgatctcaatactttgcgtagaataagaaattggttggtgagaagctaagtatttgttttagttgtctgtaagcccaataagtgtgtgcaacaactttaaaagattttctattgaagtattttttatataaggtgagccgaggcttggtatatctcgtctcgtgttacatacatctttacttttttcattttctcacctctaacttcaccgagcttgtcaacgatctcatatccttggtgtggaacaaactagtccccatcatacaatttgagaattttgtgacgacaatcatatttcctagtgataatcccctagctaaaaactcatgtataaagtgtttcataaacaaaagttgtttctcattaatggatttctagactacgactgaagtgtgcaaaaatcattttccatcactgtataaggtcgcttttcgtgatgggattatttatatatgaattggtagtacttatggggctaaggtaggccaagcatattcactaaaacttttggacttcaaatacgagtttcctacgttttatgttatctatcatctttttattctttattgagttcgtgttcctacttcaaacacttttttttttcactcaaggaagaaaagagtgaagaaagattcttaaataagaaactctaagatatttacgagaatcccataaaacacatgtctctcctattttgattcaatataattttttaaattaaagtttataaaactaaaatatatcaaaataataatgactttttgtttaaaaaagctttagaagttatgatggatagaattctcatatggttattatcagtgaagtaaaagagtggtttaatcaactaactgttcctattagtgagttccacgtttttctctcgtttccgtagttttacctctgtctgatagttggtaagctacgtttgggagattttaaagccttgttactgatcctaaaaatcaccacataatttttccatgttttatcctcagttacatggttacaacaatcactttctggaaggtcaccaattttgagatttttcagcttaagcacacttaactatgaagttatcccaaaaagtttcaccgaaaagataaatgcacgttggtgatataaatagtcaaatcaattctattaaacgttttcgcatgcaccaccatattcctaaaatcggagtgttacaattcatccccacaaacagaacgtaacgttctcgtggcacaccaagatcgtaaccccggatggagcgagctttcttgatttcacactcatgtgaattcggatctgatactacttatgacgttctgactgtccctactagtgggctccacgtcttctttcgggcatgtgggttcacctctgtcccacggtcggtacgctacgtccgggaaattttaaagacttgttaccttccctacaaatcaccacatgatattttttaatgttttgtcctcatttacttggttccaacaatcactattcggaaggtcttccataatgagactttatcagctcaagcacgcttaactgtgaagttctctcaagaatttgacaaaaaagataagtatactttaatgatatagatggtcaaatcaattcatttaaatctatgcgcatacactattgtatttcttaaattgaagtattacaccgtataacaatatttaaaaatttaaattttgtttttaataatttattcattggcatatagaaatctatgtttttcactaaatattataagcttgatgagcaatattctcaacaaaagaaaaaatcaaaataaatataaagagatgaggtgagtaaattaacaaaatgacaaaacatataccattactacggtataattgcatttgattttgtgtatttcttcacattgtattaacgtacgggatgataccaaacgtaatcgtagcttagcctgaaatatcagaattcagatggaggcaatgatcatccaaataaataaagaaaatcaaagattgaaaaattaaaatattgaatttaagcaatttcatagataaattatgcaaaactcaagaataaatcttggtcgcatattgtgtccagttaaatcatggatggaaattccaaagatatttacaaacaattttgacttttcaattgtcttaatcagatgacctatattctatttttcttcgggatattttaaacagatacatatctaataaatttacattataatttcggcgtgaattgtgagtatgttactcggtctttggttatggtttgaacattgatgttgtggttttgatttttacaactcgactaatctttctaaaatgaatataactgtcgagtagttcacttaccggggttttaatggacctaaagagcacgacatcattttaactggtcaaataaaatgatttagtaattttttttctgttggcttagaagttgagggtaaaccgtataaattgagattagaacatgtaatgacacaatttccatatgaaatgtttggaaaaataaggtaagtgagacgagatttgtttatatatttgtttgtgattatccaaattggaagtgagacgagattgagaactttttttttttttttttttttgttgtctaaaacgagattgagaacttaagtgataaaaaaacatggattgagatctacgacgaaaatattagattaatattttatttaattttatgaaacttaatatgatatcaaatcaaagttgttgactcaagtagaataacctaactaggatttatcgctgatattagagtaagatttagattgaaatgaaccaataagattttcatttaaaagagcatgttaggaatattaacatctgagaaaaaaaaaacttgggcagtaatatgcaataaatagcaccaagatagatacagagacatggaaacatggacaaaaaaaaaaaaaacatggacaaaacggaaatgggaaaggcaaaatcaaaaatttatagaaacaaatatggcatggatatgtcaataacaatataaaaattatatccatatttaaaaaaaaaaaaatagtttgatttaagaaaaattacaaaataagctattcaagtactaactcactttctagagagagattagaaggcagtgactagaggggtgactagaagaagaaaaaaaactagtactgtattcacaattataactatctttttttgtgtgtttatgatttttgaaaatatttattggactagatacatgtttataatattggaaacctatgtaatctttttaccgtctttgtcaacggcaagctatttccgtttggttaaaatgtcttggagacattttgaagccctttccaaaccttgatcgtccctacaacgtttatgaaatgtgaaacgtctataaaatggagtatctttttagcttagttaatttattcattgtcgattggttttacttcttttaagtttgaagcaatatctgttaaaaacatctacacctaacaaaatctaaagaatcagaaaaacaataattaaatttttataaaagataagatttttgaaatgacctggaaagaacagtcttctccttttgaacaagtgaccacgacgttgcattctctatttaattgtttttattgtgaccagtaagaaaatatatgtataaaatttggagtcaacattcaaaatgcagaccaaacaaataaaataatttaaattaaatagctatatatagttagagtataacaaacgatctaaacaccaccaatttgaatcagttatctcttcaccaaaaaaaaaaatgtccgaacaagaaggcaaaaatgagaagaaagtaactgaagggcaatggactaccggtttatacgactgtctctctgaagatatctctacatgtaataatttcatttaactttataattctttcttacacaagtttaaggaaaattaaaagatcggtttagtcataattcttttttggttttgtttgtaaattgttatgaaggctgctttacatgggtttgtccttgcgttgcatttgggaggatcgctgagatccttgataaaggagaaacaagtacgtttctgatttccattatacagtactactattaaaataaaaatttcacatattcgctaatgagatgaaatggaattaaaagaaaacatatatgtagatcggttattatcaatttattttgaattggaatttatccactttctacttatcttaatagatatatttttatgaagtaaaagagttagtacaacttttaaatgagatggtagataatttacgcgaaaatgacaataataatgttatatttacagggttgatagaatatcatactttcaaatagttcattgttacaaatactatataagaaatagaagaacaatcttccaaaacaatcttgcagatgtaggaaatattacttatgattaaaaatataatcaaaggtgaaaagtactttgaaatttaaatactagaaactcaagatggctttataaagaacacgtgtaatgttttttgtatattcaaatcgtgttacaaagttgatttattaataaaaatggattaaaaaggtcgaggacttgctggattaatggtggtcgcaatgtctagcattgggtgtggatggtactatgcttcaaaatacagagccaaattgaggcatcaatacgctttgcccgaggcgccttgtgccgatggcgccattcactgcttctgctgtccatgtgctcttactcaagaacaccgcgaactcaaacatcgaggtcttgatccctctctaggtaaacagtctctattcgtcctttctctttttagtataatatattaatgatggtcgttttagtgataagttttgttgtttttgtcaccgttgcaatcattttactacaaacaaagggtggaacattgagaatggaggattaaacagcaacacgcccccgtttgtagcgtcaggcatggaccgttaaggaacatcacaaattaatgcaagtaattgaattccatgaaaagtaaataaataaataaaccatgtgttatatataattgggttcacggaaatgataaatttattcttatatgataattttgttgtaaatatttattttatatgtgtgaagttgtaagttgtaaccatgaaaatttatgatgatatctaatcttatgttcttacaaataaatgtaaaaccaatttctatagaattggctattggtttccctgagcgagttaatttatttgtgagtactgtgatatccccgcgaattagatatgtgaacctttctctttacaaaataaggcagaaataagagtcatgtgtacagtttggatcatttaagcaaccatacaaaacttgcagccgagacacattaatgactgcaagatggtaaaagagctatagcctataagtgattcaaaaaacacttgagaaacttttctaaagaagaggacattagtcgataccgaagagagcgcagtctttagatgataagctgaggttatcagagataagttgcagtttgcacttggatgaagctactttaggatgcctccgaagttgctggtaaactttaatcacatcttcatcaactggtgtattatagtgtaatatcagttgctcaatatccggtatcttctctagaaaatgcttgacttggtctatcctcttctctatctcgtcatcatagattttaccaaattccaatatcttcagcactttcactggacatgatgataagcaagtaggagtctcctcgtcttcctcctcttcttcatcctcctcccaaggtttgcataaacacatatctccacatttatccgtgaaacggtggacaagtccctgaaatgtgggagaaacatctcaaactttgaaaaatatgtcaacaaatgcttgaaagggtttgtttcatactttaaagacaagagtttccagatttggagaattcttgagaaggcccgacacggattcccatcctacttccgagttactctcgatagttaaatgagtcaggttgttgaatagcggtattgcttcacaacagtaagtaagtacctgaaacaaaatcatatcaaatagatcatcaatcatcatcactcattaacttgaatccttaagcaatgttaaaaagattacaagatgagagcaatgaaatacaaacctcaagagtataaactgatagataaaggatcttcacattgcatattcccattattaattctgttgcattagctaccatacagccttccatattaccttcagaatctgaaaaacgtgtctgctcaacctgatcttctgacatctgaagattgatatgagcttcaacaagcgaatcgaagttcactgttgaatactcgtccgcaatagcatcagtaaacatcaagtagacaaggttcggagtattaaaagacacacttattggattctcatcttgcattacttccccacaaaaagttagcctcttgagagttgtgagagacacagagacaaaatcccataggcaccaagatatatattcaagatttaactcctcaagtatgtgacaaccagaaagaagcttgttaagcccaataccatgcttttcaaatttgactgacacaatatggagagtcttaagcttaggaagatgaacatcttcaacatcaatgaacgggccacgttccacacttagcttcagcctaacgagtgtctcactcaaaaagatctttgaaggaagtgaagatttccatttcaaatgcatgtctagttcaagatcagatacaccgcgttccaaaaccttgagtatccaacaaatgatacggactatatcaacacaatctctgatctttagagagaacttgtgtagaggagaattgtcttgcaatctcaacacttgatctacaaaatccataaaacttgtcgaaagctgatcacttctttcattaatcattttcaaataatcctcaccactaactgcaggattcctttttccaagacgtagatgaacagagtcatcgaaatcaagattaggaacagaagcaaagagataccgccatttttttgctagaaccgatgtagaagcagcttctttggtgttaaggaaagacaagatgtggcaaagaagagaatctggtaaaccgctgattatatctctagacctaccaaaatccatctttttcaataccgttgagttactacaacctgaaaatcaaagacatgagtaaaaatgttttgtcttttacacaactaatagggtttctaaatattcaaaaaaagaagacgttcccacaaaatcaaatttgctagcttgaggcaaaagtcagaagagcataagatagatattgaaacttacttggagataaaagcttagctcaccaagatcacttaactattgttgaactttttttaggagttttcgcgagtgtgagttcttaaggcgaaacatttttactttctagtttctaaaagattttgtaagatattatctggagctgatgacatcattagtttgagaagactattttttgtaaaaaaaaaattttacttctgacacatagaggggagatttgttcaagaacctaggaagtagatatgtgacgttgttcggcggataattaatgctgctcctgtgactataatcattagttgagaaaattgtgtttttctttaactaattttggaaaaaaataaaaagctctttaacaaataaatcagagatcaataatggccaaacttgataatttataaggaacccaaatcaaagtgaaataaagttcatttagttaggtgaagtaaatatttttcgttttatatttgtatattattaagattatgtccatgtttgttttgagtgtaccatataattattataaaggccattttaaaatttatgtttaggacccaacttcgttaagcaaaatattataatgatttgggtgaaactcttttttttttttcattggaaaattaatttttattgatgggatattacttgaaatacaagaagccgacgatcaatagatgatcccgaaaactaagccgaaggatgacaagatattttcggaaactaagtccaagaatataggcagtaaataacaatactacaaacgaaacaagccaaaacatcgacggctaagaaagcaaaacatcagaggaaatcaaaactctgaactcataatctagcacgaaaacatcttgcttactatcaatccagaagcgagaaacgcttgaaatagtggttagccgatagagacgagaaaatctacgacaccggaaagcgactcttcccataccaaatgaagactatctcacaaaaaaagagaaccaaagcatccataccagcaagaatgagagacgaatagaaatcctacacaacttctggaaacggcgaaatcgaagcaaacgaaaccacagtttgttcacgcctagaaagataccaatgcaatagagagacctcgatcaggtctaagctgtaaagacaaggaccgaactcaaacaattcacaacaaaccgaaaaaggtcacgatcttttattcactgtcttttaattgaaaaatgtcactttttatcaattaaaatttataaaaaatgtagactagaattcaattaaaatttgtcaatttaaattaaaatttataaaaaatgtaaattaaaatataattttccacaaaattgaacactttgtagtttttttgctcttcttagtctattctctctattcatgattttttaattattgttaataagattctcatacgtcatattatagctttattttaattttcctaatcttctttcttaataatatgtaacgtgcttcgtacgtaagaccaagagtacttctattattttgtcaagtggcgcggcggtggcatattgtcggaccgaaccatcttacgatcgaagctttctttgtcgtaagccattgactagacaaataatgtctttaaattaaagacttaatgcaagactacatacacgttctattaaagtctttaacttaaagactttatttgtctagtcaacggcttacgacaaagactatatataacacttccttagtctttctcttacaaaccctaatttcatattgcagtttgcgtgtctattagattgcaaactcatggctacatcaagacttaatgcctcttgccgctttcctgcaagcagaagacttgactgcgagagctatgtcagtctgagagctaagacagtgacaataagatatgttcggaccatagccgctcctcgtcgccatcttgtccgaagagcaaacgaagatcagactttggtggtgaatgttgtggcagcagcaggggagaagccagaaagaaggtatcctcgagaaccgaatgggtttgtggaggagatgaggttcgtggtaatgaaaattcacccaagagatcaggtaaaagaaggaaaaagtgactccaacgatcttgtatcaacatggaatttcacaatcgaagggtacttgaagtttctcgtggacagtaagcttgtgtttgagacgcttgaacgaattattaacgaatctgctatccaagcttgtgagtttttctcatcattttttcgtatgttttccttcttatgaattgaaatattggtaacttttatagtcaacttgatccgttcagttttaatataaactttttcaaaattgaagtgattaggagaattgagaaacattaacagtagttagatgctacaattaatatatctactaaatgtttttggacttgatttacatcgaaagtccgacgaatcttagtgtcagtaggtccttatttttggatcatatgcacatagataagattctcaaaacaattctgacggatcagttctttcttcttggattttatgctagatcggaattacaaaccttatcttcgatatatcaataggagaaatcggagaaagaacactaaaatgttgatgtgtagcatttcgaggaataagaatttgtttatgttacgtctataattatacaatttagaaataaataacttaaacgttgcaatatttacacttgaaaacgtaaataaaccagtttcaccggccctaaatactaaaattaggtgtggatgaaatatcttattagttttaaaaaacatataaattttggtattaactataataatctcagtttttaacatggtaatccgatttcttgatataacttttgacactaacttttttttgtattaatttacatgcatattacatattagtctttatagtcttcttaattgggtgaatttaatatatatgctcagaagaatgaaaaataaagaatctgaccatgaagttttgttatttagttctctttcatctgattcatactaatgccaaatatacctttcgtcacatatacacgttaacaagaaaaatatcaagataaaacaatttatatgcaacaacaaaaaatgagtttcggcaataataagtttaggtagttaattattcctcttcttgtgtatataaccttgtcaaaacctctggttcttttatatttttttgtagatgccgggctcaaaaacacggggttggaaagggcagagaatttgagtagggatttggagtggttcaaggaacaaggttacgagattccagagtcaatggttcctggtaaagcatattctcagtatttaaagaatatagcagagaaagatcctccagcattcatctgtcacttctacaacattaactttgcacatagcgctggtggtcgaatgattgggacaaaggtagaaaatagtacaacttaattctctaagaaagtcacttaatgttttttataagtttacaatttgtttaggtagctgagaagatactcgacaataaagaactcgagttctacaaatgggacggccaactttccgaattgttgcagaacgtgagtgaagaattgaacaaagtggctgaggtatagaacataaaatcaatgtgaagaaagaaaattaatgtttggtgcattctaattctaaagcatattttatgatgaatgggcagttgtggacgagagaagagaagaatcattgtttggaagagacagagaaatcgttcaagttttattgggagatttttcgttacttattgtcctaatttgtgatgagcttccggtggcaacaaaaagtggcgggaaggccatcaagtgtacgtatgaaaacaaaatctaaaataattggactaagtctccaagcacatgtctttactctatggcataataataataataggaagtctatgtggttaccgaaatgtaggaatcccacttccttagttgttcacttgtttcttttccacttccacgtttatatgagctaaacttcgattctagtttaattaatcttttggctctacaatttggtcaattggttagcatccagctaatgccgtcaactattaagaaaactccaacaaagagaaatcaaaagagatgataccaaagaaacataagagaagaaagagagagacatcgtgatgagaaagattggagattccaaaggaatcgaaagaacaacaactatttggtcagagcctttttttttttttttgatcagatttgatcagtggcttaaaaaacaacaacttctacggtctctcttcgctgttctagatttgtttatctgttgaattatattcggtattgattaataggatctcttcgtttcatgccactttcctaattttactacggtcaaaagtgtcgagtatgaattttatgtttctaatggcaatatgttgtatgagtgttagcgatctgtctactagctagtttattgtttcagagttatctgagttaatgacatattatttatgccactatattttgacatattatttatgccagaaaaaaaaaatatatgccactagcttgttttctctaatttaatactgttttaagttctcaaaaatttcaaaaactacaagtcaaacttttctgtaatgcatgttacatacataatattttactaattaattttatttttatagtacgtcttaggtacataatcttttgcttattagttggactatcttactataataattattcgtgaaagttattccacaaatctatccatcggttgcttcatgagattaaatatctccgctttcgttttaaatatattagccggactcaacatatgtaagaaacaaatataattacatgttaagaagttagtaaacaataaattaaaaaataataattaattttaaagattaattttaagctcatatattttgatatatgtataaacttcgcatattataatcaatatattcataggttgacgcatttacaatgttaaaataagagaaattttgaaaaatcctaataacatttaattattttattcagaacttttcatataattctccttaaatctacatagattcctttcagatatcatttacaatttttttttttgttaaagcagatatcatttacaatgttcaaatataagatatcatttacaatgttcaaatataagaagaattttgagaataccaacaatatttaattattttattcagaagttttcatatttttcatatggttctcctaaatcaacatagattcttttcagatatccggataattcctatgcacacatatttttccaatttatttcctcatcagaaacaaattaattaatttcaccataaaatctcataactcataagagtcacaagtctactaagaaacaaataaataaatacttatatgttgccgtgtaagaacaaatgccaccaaatacgcaaaaacgagtgtggataaaacgtgttctccacccgccaatcaaattccatcaaaatctcaatgcattcctcattacatatctttagattaccatccaatcataatcctcaatttccagttctactaaaccggttttgacccgatttgatttttcagcctcaaatctgacaaatcatattcacagcgatctccttcttccacatcgcaacccaatccctctctgtctcttcctcaattcttattctctctcgcaaaggtttggttttttgaagacagagaggagatttgagattttgggtttcaatggcggtttcaagtgctttcgttggttgtccaaagcttgagactttattgaatcaccataatctatctccttcttcttcttcttcgtcctctgtttcacagacaccattgggtcttaatggggttcgtgttcttccgaagaacaatagaaccagacgaggtttgatccaaaaagctcgttgtgagctctctgcttcttctgattctgcgtctaatgcagctagcatctctgctcttgaacaactcaagaactctgcagctgatcgtatgagtctctatctcttaatctactcaaatttgaatcttttgtttgatcaaagttataaagtttgaatctttgtttagtgatgtcgtgattatactgaagacagtttttgttatgaattgttgttctgacttttcatttgtggttgttaggatatacaaaggaaagaagcagtattgttgtgattggacttagtattcacacagctcctgttgagatgcgtgagaagcttgctatacctgaagctgaatggccaagagctattgctgaattgtgtggtttgaatcatattgaagaagctgctgtgcttagtacttgtaaccgtatggagatttatgttttagctttatctcagcatcgtggagttaaagaagttactgaatggatgtcaaaggtgtgacttttttctactatagtgttcttcttgtggtactttggtgggtgactaatgctttagaacatgttaagagtggtcttgtatttatatgtttaattctgtggtgtctactacagattgatcataccatatgcagagaatctatatataatctgttcatatactattgagtgtttaacgtggctgttttacagtcggtatcaagggctaactaacgagtcttatctcttttttcagacgagtgggatcccagtttcagagatttgtcaacaccgttttctgttgtacaacaaggatgctacacagcatatatttgaagtctcagctggtcttgactctcttgtcctaggagaaggtcagatccttgcacaggtgaaacaagttgtgaaagttggtcaaggagtgaatggctttgggaggaatatcagcgggctgtttaaacacgcgataactgttggtaagcgtgttagaacagagacaaatattgcttctggtgcggtttcggttagctcagctgctgttgaacttgctctgatgaagcttccgcagtcttcaaacgtatctgctaggatgtgtgtaattggcgctggaaaaatggggaagcttgtgattaagcatttgatggctaagggttgcacaaaagtggtggtagtcaacagaagtgaagagagggtttcagctatccgtgaggagatgcctggtattgagattatatatcgacctcttgatgagatgctagcttgtgcttcagaagcggatgttgtgtttaccagcacagcctctgagacgccattgttcttaaaggagcatgtagagaatctccctcaagcttctccagaggttggaggactgaggcattttgttgacatctctgttccgagaaatgttggatcttgtgttggtgaagtagaaacagcacgggtttacaatgtggacgatctcaaagaagttgttgctgccaacaaagaagacaggatgaggaaagcaatggaagctcaaaccataatcacagaggaatccacacagtttgaagcatggagggattcattggagacggttccaacgatcaagaagttaagagcttatgcagagagaatcagagtggcagagctcgagaagtgcatgtccaaaatgggagatgatatcaacaagaaaacaacgagagcggttgatgacttaagccgaggtatcgtgaacagattcttacatggtccaatgcagcatttgagatgtgacggaagtgacagtagaacgctgagcgagacccttgagaatatgcatgctttgaacagaatgtacggtcttgagaaagacattttggaggaaaagcttaaggcaatggcggaacaacaacagaagtaaaagagaaaaataagaagatgttcatctcttttgacatataagattagcttccccacaaactctgagtaaattgcatagatcctatagcgatggatctatttgattcatttaatttgtgtgcaagagactaacaattctatcgtcaagtgtaagtgttgtgaagctataagcgagcttgttgcatgtttgttgcttcatagactcgagtgtaatggtattggtcccagtatcgttacatatatgtaataatgtataaactttggttcttgcaatatagagaaatgtttttttctttctaatcttataaactttggttcatggaatttaatggatttgaaaatccaaacaaaaattatgtgttatttaatcattgattttagtgttattggttctatgatttacaaataatagttaaaatattgagtttacgtatagagcaaataataaaaaccatttttcgttcatagttgtctttaagatcacatgccatgtgcatcattttgctgtcacgtctccaagattgttaatttgtatgtgtaatatgttttcgacctgtttcagtacctaagtagcaattcaatcatttcaccaaaacacacacacaaaaataaaacttcatctctaaaaatctaaacgacacctatgtcattttcatagcttaacttatgaatattcattgaaactatttccttacattaaccgaaatatatataactgaaactaacgatatatgatctattcgtagagatgaagaagaagaaattatccaaatcagaaatatgggggaaaattcgcaatttcatctgaagcgggctgatcaaacttggttaagattaatttggtttaattccaatttccccggtatggaatttaatttggtccactttcctagaatttttttgaactgtcttattgtacattttttgttatgtatttgtcaataataatatttaataatattttgaactgctaaaaattgtttcaaaagatagtgtttctaatcataattcttcttgtttacaattttattcataaatagtttttaaaatcttttggaaaatattaacggtataacattaaacattgatataatttatgtaataattcaaatattagaatatatcattacaataatttaataaacataataatttctgtttttataatttaatatataaatacaaaattttattgaaaatgagtttcctgcgatgcgggattcataacctatatgtaaaaactaacgtaaaaatttcattgcgtacatggaaactatttgattagttttataagtggtgtatgagtgtgcatgactaatagttcagtcgggcttaaaactatttcttagaatttctcattattagtttcttttcttttagtcatcacattaattcaagtcaaacagaaccacaacaaatggtgcttgccgcttggacaccactagttggaatttcgaatattccaaaggttctactcatgtaataaacaaaagttataataggaaagttagtaaacattaacaattaaagaaaagcagaaaaagttaaactcggatctctatgattcaccaatcaatgacctcaaatctttcattttacatttcttctgtgtctcatctttcctctcctcttccatcgcttagtcgcctctctcttcgttgttgcagctctcttcctgctcacggtaactctccccttgtttctcttacattctcatttgttgtcggaatcttgaaaacttgaatccatagtcaaagcgaaatgggtttaacttgtgtttcattactgaacattaattgttgttttttttgtttttgttcgatgattaaatatctagatatggagacaaaaccaagtcaaggcctttacccacttcaccgttgcaaaaccatacatctggtttgtttttgttgtttttctcattattctgatttggtctctgttggtactcggattttgattgagttcttgtattttaggtgagacatgctcaagggattcacaatgttgaaggagagaagaaccataaggcttacttatctgaggatctatttgatgcacatcttacacctcttggatggcaacaagtaagtaaattagccatactcgatttatcggtttttatcactataattttgcattaacttatagtattattctggtagctctaatgatatagactatgagatatgaataatctgttgttgtaatgtaacacataaagaggtttctgtactattttggaaaagggaagtaattaatatgaattatgttattgtaggttgataatttacacaagcatgttaatgcaagtggtatttccaatagaattgagttggtagtcgtatctcctctgctcaggtaatatacttaacccgtaaagcttattgatattatcttaacgctattgcttggattcttgcttgagaatagtcatcttgagttaaacgtccttatagatttgtgttatgccatttcgttcttttataagcagttttgtatttacctcaatacacttgtttgttttaggactttgcaaacagcggtcggaacttttggtggggaaggttacaaagatggtgtaaatacacctctgcttatgaccgcaggtgctggaaacagcgatcgtcctgctatatcaaggttaaatcgtccaccgttcattgcggttgaatcctgccgagaacatttggtatgtttacttttctaccttttgcatgattggcattttcttgagatgaaaacttttgcaatgttcttggttcagggtgttcatccttgtgacagaagaagcaatatcaccaagtaccgcgaattattccctgcgattgatttttcattggcaagtacctaatctatagaaactatgatttttttttggtgttttttcttatgttttcacattttctcatattcatgtatacagatagaaactgatgaagatgtcttgtggaagcctgacattagagaggaggataaagatattgcgaccagaggcgtgaagttctttaactggtgaatatatgcaatgcttgacatctctatgtgcatgatgttttatgatagtcttggcatgatctttttgattgatatactaactgaattcaggttgagtacaaggaaagaaaaagagattgcggttgtaactcatagtgggttcttgtatcaaacattaaactcatttggaaacgattgtgatccatctgtgaaaaacgagatttctaaaaagtaagagttcctcctctctcttttgatcattttctattatttatgttgtcattatctcaaagtttttttgtgttgcagatttgtcaactgtgaactccgttcatttgttcttgtagataaatggtaagttttgttgtttattcagacaacgctcacatttgatacaattaaaaaaaattaaaattcatattcttctcaatttcaaaaatgcagcatgagcagttcggatcctccaatgaccaactatcccggaacaatacttaccggagaagatgcttctagtgatattgctgatcagaagtagttatatgtattatgttaatcttatatgaatctcaaagctgtatatttctatacaatggaatagaaaatggagttagacgtaactattttatttaacgttaccgtatcctacggattcacacttaaatgttatctcgattaagcaacgaggggaattttttgaccccatttcaatttgtttgtttggtttaccaaattaattgctaccataatgcagacttcaaatattgtacactctgcgaaaaataatactttatcaaaactaaatttgaatcatagaaatggacataacttcaacataaaaccatagcatcacgacaaaaatgattgaattcagaggtgataacaaaagtcgtctcccaaaaaccaaaaattcgtcaaactgaaccattcacatatcgactatcgtgagagaatatcctggaatactgatcttggaataacaacacataacacattggcatttatttaaaaccccgatttcatccatcaagaactcagtcacctttggttttgcttgcacatcatctgagaattcgcttaacatatcagtgaacatgtagtaaagggtatgctttgatcagctagttattcagagaaatctccttgagcaagattcttatgagagattatttggcaaagtccatcattgccatcaatgcttccccaatatatttgctactccaagacacttatttccttcttgagtggtatttctttcgacttcatgcaaacatgaggcaataaacattgccttaatttgtactcgtaagctaaaacatggatgcccacaatgtcacttccaatcatgaacaacaattgacaagtccagttaactctcatccaaggcttctgacatggacataacctattgttgattgaagccccgccactaaataaaagctattgttgattccagcaatgttaacctccagcttggtaaggctggcaaggaggaccagctccaaggcgtagttataagtctagctcgacatgtggttgtaaatgttgagtaaaacgttttaagatttgggagaaccttaaaacaaaatgactatgaacgagatatctcaccacacgagaacgtcttcctctatgacgccgttctctaccatgtccctccatcaccatcagcttgaataggcacacgatctagaccccaacaagcatgaggctacatgttcagatgttcttggtcaatcataataaaaactgacaatatgataataaaacactaactatcactttgtgagatgaaaacggtatgaccttgagggaatgattggttaaaacacaagtgttgtaacatctatagaaaatgtagcaaaacatcacgtcctcgtcatagcaagctattagggtcgggttttgtcagcaagtttgatataaaggtgattgcatatgaccctgctcattacgaacgtaaaggtgaatgcatatgaccctgaaaaattcgtggagcttgattatgccaacaatagttcatggggaagagacttctctcggctgccatatcgcaaaaggaggagccggtagtaaattgaaacaagaggctccggttttgaaatttacgagagagtctcttacaaataacacaaagcttacacctcatatggcctcatgattgtgcataattgatcgcaattatcacaaagaagaatcttcttgggctctataaatgacattgtttgaagctatccatgattcactctccaatgcaaacatccatctctcgcaatcattgtttaattaatacgaagtgacaaaaaggaaagtagcaacatacgggaagcagaatgacttaagttgcaacataagagacgagaaattaatcacaattaatttattatgttgttctataccacatcaaggatcataattttcatttctgcactttataatttttaatcaatattttaaaacgaattgctcggaaaatcgctgattaaaaattttgatatctaattgttacgactagttgctatataggtagctggatatgaggcaacaaagctcatatggtatggtttggtttggttgttgtcattaactagtggtcgtagagtctctatcttcactagagaagaacaaacaaatagatcaaaattcaaaaaatcaaaaagtaattatagaaaattcaaatgaaaaaggagtgagaaaaaaggttaaaatctttcaaattcttaagttacactaaattaaaaagatgtaaaaagaaatttatagtaaatagaataaccattgcatttattttttggtgcattgatatagttaatattgcatttattatgcagtttgttatatatatatatatatttttttttgtttaaatgcatatttgttacgatacttatacatacctctgtcttggagttagcttttttgttatcatgttcttgggtgtgtttatcagttcagtcggagtggattgatcagaagaattgttgagggtttgttcccatgttcgttattaggatgcgtttatgagatggtattaggtgaagaggtatctactagccttcctctgtgcatgttttggagtagggccggattggtctcaatacgatgcattaggattgatattcagttcttatcttaagaaagatggtcaaccttttgtttatagatggatgaagctaggttttcgaacggctccattttctagatgttagtcttactagagtatcaccttgtcggagtttcaggttttttcctcttgccttggtcagttaaatagtgtggcactttgatatttgttttggagctcgggtttgggcattctgtggatcagccgatccttggattttgtttggatgttggttctcaaggctgtggatcaaagatttttagaagaagaggtgaattttagatttccaaacttggtttaaatattatatttggttgaaatattggttataaatctcgaaaataagattttaaatcctttcatcaaaaagaatattattttcataattctgtcggacaacagtgatggaaagaataagaatttttattattattaacaagatgatgacgtggtaacaatgtcatcaaaaccgtgacatccacgtcaccaacgttatcaaggacatgacattcatgtcatcaatgatgtatgattttgcatgattggataaattcatgtattggaacttaaattatttaaaacgttagatatatattagtaaagagaaaactgttaggtataaattgaacactgatactttgtttggatatgaaaaaattgactttcctctttgtgcagctccggcgtctactactttgatgggaaggtatgtgggagttttcttggattgaattgtgggggcttttgtaaaaataggaacattttggcccaataattagaaaaaaggaacatttagaatgggcttataggtttgggcatatgtttgcaacaaatatgacgcttttgcccttcgtcttcaacaccatcgtcttcaacaccattgtccagacatcgattttgacgattcatagtgttattaacaacaccatcgtcttcaacaaaattttccagccaacatgtctattctgattaacccaatcaatcaaaataaatgatttttgattgaagaaatctaaaccctaaagggatactatctagggaacccttgggttctaatcttaaacactccaattcattattaattctaaaccaaatttgatttttattgtcaatagagttcatcatcatcgtcaccaactaataacagaggatttggaaaagtaattctagagatccaaactatcaccttcgcttctcactatcgctcaactcaccatcgtcgttgaaactcaccatcgtcgccaacgctaattggaggtcgagatcttgccgtctttttcatcacgagacatgattcatgagtcaccgccgttgcttcttaccgttgtcaaaatcgttgttgttgcaggagctcaatcaccattgtaggttcagtggtaagggtaaactcgtaaaatacttgcatagaaaaatacttaaatctataaggcatatgagatatgtctgttttcataaagatataaacttaattgtgtcaatcccataattaatccctaaattgtgagttgcagttttagagtttatgagtcttttttaaaaaaattattatgttccattttaatatattttagtaccaggtttacttccccttttttttgggttttaacttctttcttgtttgagttttgctttagagattttagtttttgtaaagcaaaaatttgctcctgatgaatcatgcctaatgctacctgttcttattgtcgatttggtagtctttcattgcagcaaatattctttcaatcacttctttcaaaaaatctacatatacatttttgcagccattttaacaaataaatcctgaatttggacttatttacaactcaatgccattagcattaaatcttttctccaaaataattaattttacttgatttaaattgtcaaccacattatcaatcaaatttaacccttaaaattagcataaacatatttgttaacaatattttaaaacaaagttttttgttaaaacaaatattattcttactaaacattttttgtttaaataaataaatcatgtatttgaacttatttacaatctcatgacactgacattaattatttaggaatgaaaatatttaattaaagatttaaatcttctaaatccttgcttttagagttattatgtcattaccttaaaggctcaaaatataaaataaataaatataattatttaaatattttaaatttataaaacattattaatatttaaaattataaaaagtttaatatatcataattttttaacatcattatataatatataaagtttaaaaaaatctctattctttccgccataatttgtgattcgaaattttaaaaataaacatatattaaccaattggcgaaaaatgtttgagttcaacgtcccacatcgactaaaatatttagacaataattcataaacatatcataaataagattaacattaataaaataatggtttttttacgggacgggtttggcgtgacgggtttggcagaacgttacttaataacaattgtaaattataaaataaaaatattttatagatagatacaatttgcaaaattttatatatattaactttaaaatataaattgtccccgcggtgtaccgcgggttaaaatctagtattgaaatattttggtttcaattatttatttatcgggaattgattttgaattggtagtgtgaattattggtgtcactgttataccgcgctggcaattaaatcgatagggtcatatagatgtcattaggtaatcgcaagagtaatatattttatggatatggtaagggttgatgctttgtcatggtttttattattattattatatataaatgtaaatattaatgaaatagtgtgtatatatatatataatagttttggaattacatgatgtataatgtatataggggttgagagacctatgaccggtcaaaatttgggggccaaagtaacaaattatatatttggggttattataaactgttttgaaatttggatatatttttcttagaactaaatatatttggaagcctatttataaatcaggtttgctgtaaaaaaaagtttttaaaaatggagacaacatacaaatgtttcatgttgcttctttcagagccggcccgggagaagcgttgccaaaaaagaataaagacaaaggtaacaaataaacaaagaagacacaacagtgaattcatctaatccaaagttgtatgtggtttccgaaatgcttcctttgtcttgttccgaatctctctgtcgatgaacttgaaaatggtgtttcacgttcattcaataaaaaataacaaccatagtgtacacagagactgatagtgaaataaaggaaaaaaaaactataatctgttaaattcagataatatctattatttttttgttttgttgaaaaatcaaatctctagtaacattaatgagtatgaatcgtgtctggtagttggtacgaatcgagatctcatcaatgggttttttaagctgctttgagacgtgcgtaacacgaagttgtccactatgacttgctcttgtacttataagttaaaataatgatgcagcagaaaacaattactattttgtgagacacgtatatcccaacaaaacaatatgtcgtagaacgtgctaattaattagtgaatacctacgtgtcacgatctcatgagattggtgtattactgagaactaacgatctcatgagattggtgtattactgagaactaatcactaataaacgtgaatctcgtgacacatattatcattatgcctatatatacgtacataaaacaagacattattacaaacacaaaatatagaaaaagaaataatgtattcagaggaaaagaaaagcagaaattatggttcaatctttgtctactgcttcttctgtttcgtactcattgtggaggttgcaagattcgcaaaaccttatatcaaccttcaaaacctaattgagacggaagcagtagtagaagaaggtttcatggcggtggggaactcagggaatcttccgtgtggctcgtcaaaacctagctctgcctctgttcgtgctcatgatgaacagaagctctcgcaagcagtaacaacagatacgagaactcgtcctccaaattcgtactgcgtgaagttccagtcttttgtcactatggcaaagcaggtcaaagaaaacggtggcaagtatgagtcacgtcctttctccgtcggtggatacaattggtacgtacgcgttgacttccatttcaaaaatgttgagaaaccataccttatacatagaagatatacatttttttttgtcaaagggtattcatttatatactagtgttttgatcatctccactttctatgtgaaagattttaacttattgctctgaatctcacccaaattttaatttgtatataatttgacatatttctacttaaaatgttataaggacgctcctaatctacccagtcatatacattccaacggactcgggtgggtacgtttcgatttacgtaagagtcgataactcaagcctcatcaccaatccaaaagatgtgtatgcagagatcacattcctcgcttataaaagcagtacagacaagtaccaaataagccagggtactaattaactaatctagagcaagtaaatatatatgtttaaatcttttgtggtttgttcagactagttatttaagtttgatccgtttgcagagactgaggcccagcgatttcatttgtttaaacaacagtggggacttttacaatttctaccaatttactattttgaaaatccggcatatggatactttttcgagggcgaaagcgttgtgtttggcgttgacatcaacattgttaaaccctttgaaaattgggaagtgttctctaatgaacaaaacattcgtgaccctattttcgaatggagactcaccaaattctctacacgttttcttgactcttacacttctgattccttttcttccggaggaagaaactggtacgtgtgactttcttcctcttgtatatatataacaatacgtacaagatgtgttagtttaataatatgatggttttttacattgaagggcattgaaagtgtatccaaatggagttggaaatgctacgggtaattcgttgtcactctatttgttgagtgatcagtcaaatgataagggttatgtggaagctaagttacgagttattgaccagatccaatccaacaatttcgagaaaaaaggtttgatatctactttgtcaactactactactaatttaaagctaattaattataattaatgagcctttaaaaaataaaaataacttttgatttcttcctatatacacagtggcggcatggcccaatgcaacggagaatggatggggtttcgacaggtttctatcatttgcagatatcaaaaacacatcaaaaggtttcctagtcaacgatactctcaaacttgaagtccagatcttgtccttctcgaaaaccgactactactctcatcaatcgtctcttaatgttttaacgggagatagtacttaggtgactaatcgtcgctagtgtaattttacaactggctactatcactttgcttcattgtgttttttgtttctgttcaataataatgagttcgagctttcctatgtcaaacttgatcaatctgatttcacatattgaataccaaattggataggatgaaagaggcagtccctaggatgtttttttttttttttggatttaaagattgggtacgtaatccattcacatttccttttataattgtccacttcttaatcgtttagtcgatcgtctacggcttcaataattgtagttttgtccttagtaattgattattcttttcacttcgtttttcgtccactaatacaattactacaatgttgttcttctccataaacattatctacatcgattcctctctattgcttgtagttgtacagttgtctactgcgcttaaactttttgttcacttttcatttatgttcccgtcctcggcttcaactactgtacttttgaagatttgttagatatactaggaacatgaactgctactaaaaacttgtccacggttccatcttcgtggacatctgtattttgtttacttcgtttctcgtcgactgctacaactacagtattgttgtccatcatcccttctccgatacattatctacatccatctttcttcgtttctcgtcgactcctacatgtttgggtgacaaatcatcaagtgataaattattattgtattaaaagcaaccatttttattgtataacaaccatcataactttctttctgtccacatttaatgtgccacgccacaccatcatcttatctagacgtcaactgcttttggcagaggtgtcagcctcattgggcgaaatgttttgtttccctccataaccaattaaaggtagtttagacatcttctcctttgtcaaaagctgactcattgcacaattttaaagatataaaaaatagcattgccgacaaaatatttatacaaatatggcacaattggcaaaattcccttaaaaaacataaatagtacttaacaagattatatcacttgatgatttgtcacccaaacattttctaaaaattcttgatctgaattttcggatataaacttggagccaaaattggttcgcggatccgagtagaggcttggcgataaacaagttactttccgctgagatgagttcgagttgaatttttccattagggagagtccattcgaacccttggagaagcctggctaacgacatgatggtcatagatgtcccaatcttagtggttgggcagctacggtgaccggtgccgaatgtaacgaaccgcatgtccggctccaacagagtcaaacccagtgagttcttgacatggccatcgaggtgtctctctgtcttgaacatgttaggctcatcccatattttaggattccgaccaagccccaaacggctcacaagaatttgactacctatcgttacaatcatacaaataccccacgtcatataatgttagacagtaaataccatcttggaatagatgacatttaattctttgactagattttatgagaattaattaatatcgaagatagagtgactatcccgcattttcaaatgttctttttttttcatatttcactactactttgtgcatgcatgcatgtcttacgtcagaaatgcctctcttgttttataacttatatagtgtacaattacgtcagcaatttattgtttaaaattaatcattactatttagcttttctctgacaagataatagtgctaatttattttttccaatatctataaaaattgtgaaatcttgagtttcaaactcatcaaccctgaaagtctaacatatattcacggatctacaattcttctatatgattgagttttacccgagaggatagtatcttctcgggctacatgatatggcatgaacacacactacaacaaaaacgttattttacatcatttattataaatattgacattagttataaatgatgttaaataattttaaataattttgcatcatttaaataagtaacttaataattggtgatgtaaataatttatgcaaataatttatatcagtttattactaattgatgttaatatttaaaatatttacatcgattactataattgatatcaatatgtatcaattgctaaaagatgattttaacttttacttcaatttatttaagtgatgttaatatttgtttcggttaaaataagtgattttaaaaataataatatatttacagaataataatttttagaataacaaataattatttaaaaaaatatattttctaattattcttttatttgtttcatttttaatatatataataaatcatggtggatattttctcccaaaatcactcgttgcaatatcaactaaaatcttttcaagattttataaaatacattttttaagaataataaattttataacaaaaataataataattgggtgttcttcatgtttaaacacattccttcagtttcatacttcttccttccagtaattgtgttctttttggaacttctatttctttttttttttatatcatctctcttccattgtggaatcaagatcatgctgacttgagatcccttgaatcattatcccacttaagttttttctctacaaaatgaaaaagagattaattgtttgaaaatttatagaatttttacgtcggaattagaataagcatttgtaattgtattgaacataaaataatagaatacctttactttatgcttctccaatctgtgtaggaaacacagtcctaatgattagcaatgcatatctgtattaattatgcagtgttcttctgtgttcatgacagatttataaaaatagaagaaaagaaaaaacctgagtgattgttaggacttaggagagaaagatagaacgatagagaattaaaaagtacagatgtgtgaaggtgaagaatggtatgagagttatgagatttcaaaaactgatttgcagatatcataagaacgtcttttggagatgacatagcaaaaaagatcgtgaacgtaaaaataggattgtgattaaggaaataaatttatttaattttgctgattttgaggagaaaaagaaattaagaataatgataaatttaagaatattatttatctatggaaataacaattccgtgtcatttataacaataaattatttaattcagttagttttttttctaataataagttcttagcatcactttctattgatctatattttgtatcatttttaaaaatgatgttaataaaaataagggaatacaccggttatcttagttgatgtaaatacatatttttgtatctattttctgaagtgatgcaaactaatacaaatttgtatcaatttgattaaactgacactaaacaaactaattaacaaatcacttattagaattgatgttgaattatttattttgtgtcatttgcttataagtaatttaaactagtatcatttatacttctgattctaattaattgatgtaatccatcactttttttgtagtgacattagctgggtgcagccgaaaagattttttttttttggtaaaaaccgaaaagattctttgctacaagctttgatgtagttgagttgtggtatgtttttgattcttgcacaagtctattttgtccagttcatttgtggctttctcaagaatctctggatgattcatcatcggcgctatcgtccactccacgttattcatcgtattgtcagtggttgcaatatttgaagttggattgttttatgagatattaatgttataaatattatattttggaatactttttgaaatgtatttggttcacttttagggatgaatttttttattcaccccgttttttaactaattagaatatgtcactttaaagaaaaatcaaattcatttaattgtaaaatatgatatgcaacaaaaacgaagttatatatcatctatccgattggagccatcctgcatccaaaacttgagttaggtttataacggttaaattgtcgattttaatcacaaaaaaggattatggtttagattttgtaacaaataagatatatgtcggtattagtttaccaaaaactagttacagtttagattttacaactaaatgagttatgaattttgtttattagatagtaaattctgattagttaaaattaaaaattatttaaaatttaacattaaaataaaataaaaagttacaaccacaaggaaaattacacaaaatttattacggtcaaggttttaatgaagtggagagatgatataaaagcacacatgcatgaattgataaaataaaaacgtagatggtatgtactagtatttaacaagattatatcacttcatgatttatcaccccaaatacttctagagattctagatctggattttcggatataaacttggagccaacctaggtttcgcgcatgcgagtagaggcttggccataaacaagttactctccgccgaaatgagctccactgaacttttaccaatagggagagtccattcgaacccttggataagcctggctaacaacatgatggtcatagatgtcccaatcttagtgcccggacagctacgccgaccggtgccgaatgtaacgaatcgcatgtccggttccatcaaagtcacgcccaatgacttctcgacatggccatcaaggtatctttctggcttgaacgcgttaggctcgtcccatattttaggattccgaccaagccccaaacgactcacaagaatttgactgcctatcattgcaaatttgaaatcatacaaatgccaatgttagactaaaccattttagaataaatgacacaattatttgacttgctagctagatgcctcatgcctagatccaattacaatctaatatccaagataaagttaatcaaccgccgttcctatgttagttggggtatttttttaccaaaataaaaaattagttgtttaaattaaaagttaaacattcgctgcattttcaaatattcttgttatcatgcagtactatacaagttgtccatacatgtcttacgtcagaaattaatgcctctctcgttttataattattttaaaatgtaagattacgtcagctatttaatgtttaatttattcatagttgaataattatttatttgattaggtaattgatttttatattgctaacttttttttcaatatctataatatttgagctacttcgaactcatcaaccctatatcagtgacttttttacctttggggacaaaataacccgcgagggtagtatcttctcttgcaacatgatggggcatgaacacattagctgggtgaagccgaaaagattctttgctacatgctttgatgtagttgagttgtgatatgtctgattcttgcacaagtctgtctttaccaactattatgtccagttcatttgtggctttctcaagaatctctgggtgatttaacatctccgcgatcgtccactccacgttattcatcgtattgtcaattgttgcaagattgatttcctacatacaagataatatatgcgtaagagattaatttaaaccatgctaggatctcgagatgaatttagaaggaatcgatagtaatataaaattgaaaagtctatcaattttcagaaaacaaaattatattttgtgtgtaacaattctatgtgtgaacatcactaaccttgcattgagccctaatctcatcaaatgtgaacaaatgcattccttgatcatcttttaacgtgataaggatatcgagccagtcttcttccatttgttttccacctttcttcctccataaatgtattctttcttggatgatggggtcattacatatattgattatatgaaccgcttctcttacttctgtctccgctttatctacgttccatcctctaagaaaagggatgtaattcgttaagttaaagctgaaaaaacaatcaagagcaaggtatattgcgtccatatgctctttctcttttggcccgagaccgccgttctctaccacttcatcaaaatgcctctgaccaaacatcatcctcatcatcacggcgtggcaataagttaatatcgtatctctcacgttaataggcttcctcactgaccctagttggcatagattgtagacatatgtgacgatattatccgcttctatgtttctataaccgagggttttgctcaatgttgtcggggacataagtttggtggtcatcactttctttaccagcttccagttctctccgtaggaagagaaagaaatgttcttatagccatggcttatgagatggctcgcgtatgactctgacctatctgcgagaacctcatccttttccctaagcacttcacgggcaatcttgcttgaggtcacggtgatgacatggaaacgggcaaagcggtagcaagctatatccgtctgcagttcttccatgacgcggtggatccacaagtgagccggccggttgatgatcatttggagcatgttcccaacgattggccatccccgtggtccgggaggaagctgaccttttggtttcatgaatcttgaaaaacgtctagcaagagccaggaccagcgtaatggaaattaaaacaagagtgaaactggatggattcgtgataatagtcatggtcaaaaagttttttttgggagttgaaaagaaatctcccttttaagatagtagtagagaaatcttactacaaaatgagtagtaagaacgtttccatagctatctatttatacattttaagtttcatatataaccgtataaaatagtgttggtgtaggaaaaccaacattttcagtttcatatataaccgtataaaatattgttggtgtaggaaaaccattattcattaatcaagaaaccctaatataaaagattgaccgaagtagctattagcagcaaataattgtgttacggtcattttgtatgatagatatatgtgtcctattatgcggtcattgttctcatttatgcaagagatcggttatggtgaatttgatgaagttgggaagcatcgaagaaaagaataatattggaacaaatcgattatagtaaagttttctcttactaaatgcgtcccttatacaattaggaaaaaatgatttttttttttttttcataccgtattctctctagtcacttgtgtagagttcctctatccatacatattcctttttagtaaatgtaagatgacattcaaaaataatattaaagcacgcgtgacataaacattcatgaattcattattaaaagctaagttggtttttgagataccaaaccaaaagaaattaagttcccagaaataaccattatattgtcttaatctctctacttagtatcatagcattaatcttatagttttaaataacgaattggtgcccaaaaaattataatatcgaattggtgccctacaagggttttatccatttgtataaatatttttgttttcttttctttcagaaatgtgctttatttctttctatgattcgatttcaccattgctttaatgtcttttgtacacctcctaccccttttattagctcgcttgaatttttagtttttcatgcgtcaaaatttttattccgagagttttccttttcctcgattttagccgtgagaagtcagagtaatcttatgtacgtgatgacaattaatatacttcataacagattaacaagaacatttatgtaagtgatggattatggatacatatgtttcttggtatgtagactcatttgcttcatgtcaaattgcaaacttattttagaatcttagttagggacatattcaatattttcttagtcaatatgaaaataataaaagaatagttattgtaaaacatttttagttgtctaaatgatacctattgttagacatatagacagaatgagtatagtactatagttaattaatgaattttttttttatgaagtccattactggttatagattcatataaaaagcccatataaatctagatatgttttgctaaagtgatttatagtataggattaatgaaaatatatggaagtcttgcaaaattcagttttaaaagctgactagatagatgggaagtcattttatatgatttcgttagattttcacgtatcatcactttggttctaaaattaataagattttaacattttttttttaaattacagacatgatctaaaaattgaagtaatgtaatttaatttaaactaccaattgaatttaaagatataagtttattcttcatttacgttcgtctagtaaattattcaattttattaatgaataaaaagacttagttgactatatatattatggtttatttttgccttcttggtagtagtttaactgtttaaggtttcgtcggcttgtttgtatcttcttattagtgcaaattctctattgtttatagtataatatgactaatatttaaattgactaactatggtttacttttataaattgttataaacttgtagcggtgtttctcttgattagtcaattgtatttgtagtgaattc

SEQ ID NO: 1010 - DNA, 98412 bp, Arabidopsis thaliana
aatctactacaaaattcaatccttcccttcctgaaatgagctttgtatcagataaagtgattgaatttgagattcatgtatacaatacagactatacagtgattaacgaatttgatttgagattcatgtatacagatgatcattggctctacttaaactcagttcatagaaagttcaagagacatcaaaaagtagaattctccataacctattccttaaaactaaactcagtttcttttttcaaatggatgaaagcaaaaaaaaaaaagcttgcctagagtgatttgaggagtaggctcattgccagcggaactagctctctcttcggcttcatgaagcatctgttgcacctgcgacaaccgtgaagagactttccgatcaccaccgcttccaccggaggtcgatgccgcacatcggacggatacgagccgggaattagagtgaattggagaaattaggggagtgagacggagacatggtaaaagagattgacacgatttcgatgaagagtgaaggagaagtggatgatggatgaactcgcgtagaatcatgttcgtcatcgttctgattgccgccattttgtttatctttctcggcactgaagattcttccgatgtcaaaatgacgatgtcagagaagaagaagaagaaggcgaccctaattttgcgtggctcccaatttccggtttacggttagtaaaaaaaccgtaacattttcttggtttatctctttaaaacgatccggttcagtcaaaattcaaacgcgattttccggttcataatttccggttcgcatcaacgcaattaagttagaactaacctaaccagtggtgatcatagcaagtacagagtatctcgggacaactctcagaaatctatacttttttgaggatagaactgagcttgaaaattgaaactttttccactacatgaacacataaatatccagaatgaataatcaagttagaaccataatcattcattttcaattgtaatagaaatggaattacgaaagggaaatggcattgaatcttccaattctttcactcatcatcctccaattcatgatcctgcaaagcaacacacaccaagcaatttagagagggttaagatagaattttctatcttaaatttgacttagacattcagttgcaaacttctccggatgctacactagaagctctccagccaaagctctgtatatatatacattcatctccaaaactcgaaagtacaaaagtgagtagaggacataccacacttttctgcaaatcctccaacattgtcaatcccttttgtagttccgccttagtacatagaccagccagcatactacggaaagtaatggtatcaggacacacaccactagaaaccatctcctcgaatatatcttgagcgccattaagatcacccactttacaaaacccatgaatcaaagcgttgtatgtaattgtgtcagcaactaatcccctttgacacatctcgctgaaaagctctaatccgtcatcaacccttcctgccttacaatagcctttaatgagtgtactaaaggtcactacgtcaggggagcagccttcactaaccatcgaatcgaccatctgtctggcctcttctaggcggttctgtttgcagaacccatctaccattgagttatatgtgacagtactgggaattatacctttacagagcatttccaagtaaatatcttcagcccttaaaaagttcccttctttgacaaatacgccgatcaatatattgtaagttacgacatcagtttccacaccattgacggggagactattgaacaaatcccatgcttcgtccaccttattacccttgcacattccattgatgatgatgttacaagtagcagtatcaagatccatcttacttttctggaaaaccttaaacatttccaacgccttttctaacttcccattctcgcagagaccggccagcagagtgttacaagttacgatatcaggggacacaccattagaaatcatctcctggaaaaggtcttgagcaacattaacattccccacttgacagaacccgtgaataagatgctgtaagaaacggtatcaggaactaatcctcttctcgacatctcatggagaagcttcattccatcatctaccctcttcgccctacagcatccatctatgagagtatttaaagtaattatatccggagagcagcccttgctaaccatcaaatcaaacatgtgctttgcgtcttctagacggctatgcttgcaaaatccatcgatcattgaactatacgtgattgtggtaggaaatatattccttcgaagcatctcacggtataattcttcagccccagagacctttccttctttgacaaatgcattgatcaatgcgctgaaagtaacaacatcagggtcgatattcctttcgatcatatcacgcagcaattgctccgcatcactccatttaccatagctacaataaccgtctatcatacaattgtaagtgagaacattgggaaaaatacctttctcatgcatttcagtgaaaatattttgagccttgatgtggttcccgtccttgcaaaggcgatcaacgatggcagaatagattacaacattggctttgatttggctttcatccatcttcctaagcatattcaaagccgagacagtgtcacccaacttacacattccattgacaattgttccgtaagtaaccgcgtcaggttgatgaccttcttctaccatccgatcaacaagagctagcgcttggagaactcgaccctcgcggcaaagaccgttcatcagtgtggtaaacgttacgacatttgcaggacatcccgtttcaaccatataataaaaaaagctacggcctcagaaatcctaccttccagacataacccgtggattagggtgctaaacgtaacaacatcgggatgaaaaccaagtttggtgatcttgccaaatgtagacaaagcaaaggacaatttatgacagctgcagaaacacttcatcagaatattgaagctgtagatatcaaatggaatcctccgcaattccatcttctgatagagagaaatcgcaatatcgggttgtttcattctgacgatgacacccattaatttacagaaatcaatttctgagtacaagggacgagatctaaccatatcatcgaacaaatcgatcgcatcatctaagcttctgatataatgagatccacttctcaatttcaaactctctccttcaaaagctcctcagagaaggcatactcttttcaaccttactagttttcttggcgacgcggcgatgaactaatctcgtactgaacaatctcgcagaaacagcagcagcattaccagaagatgattcagatctgcaaaccctagccaacattttcgactcgcctgattttcgttgtctctaaactctaacaacaacaaatggaggagctaacaagtctgtgtaaagtgtaaacccttaaaagagtaaacgacgaccggttcaatttgattggcacagtgaccggttcaatttgattggcacagtggccggttcaacttcaaatttcgtttagaaccttttttgttaacatttagccaaaagaaaattaacagagcattgtgtaacaaaacaaataaaataaagatccttaatgatggataatttctcaaaggcagaactttaagttcttgaattatatgttcaaagttttagctccaaatatggcagaagaaattagacacgagaagagcaaaactttaatttcttaagcattgtcatatgcaacgaaaccaaatgaaccaatagataatgatctttgtgtttttatgaagatggaagtgagctttctacaacataattgcagaagattgttcaaaaattttaagtaactaaatacagatgagttattcttagatatatgatccaaataagatagttagagaatatcagagctcaaattatgttattgttcttatctacctgaacctaatttttaaaactttaaaatgacatcaatcagagtgaacacacaaaatctttatcagctaataaactgtgtttagcaactaaaataatttgatcattctactttttgaaaccgttgtaacaaggctataatctaagtacatttgctactgttactatacctcttgtccgggttagtaacgaaaacagtatacatatttttagtgtgaattttttcttgttgtgagctatcgcatgaaatctatatatgactataggaactgtgctacttttggaagaaagaaaatcatgtaactctttttttaaagctaactctaattcatatatttgtaaaactagaagtgatgaatgtgatttgtcataaaaatatcagttgtggaatagagttctcagccatgtttttagctttaacataaacttcacaacacgttttatacaattatgcatacatatacatatatatagattaatctattttcacatatttatttattattttaaacaattatattgaactaagtagctaaaatatggcactttttttggtatgtgaaaacaaaataaaaataaatcaaaagtggctcttaataaataaataagaaagtttgtgaattgtgattattgattaaccctattttatttgattaatgagatgaaaataaaaaatttaaatatgtattgtttagcctatagtgttgattcatgatttgctacaaacaaggaaacctataggaaataattccttcacatgctccataagaaaaacaagatttataattttactcgaagtcataattcaaaatagacacaatctctttttagttgttatcatcatacagttcatatcaactctccgtaagtaataatggtctatcttttcacatagtatattctatatttctgtctcttatataactaaacatggaataacaattaggctcataagaaacccgattgtatattaagatacgacatatatattatatttgtttaccaaataactgcctaaatatagatactgctaaaaatagatgaaataggaaaaatagatattaactccaatttttatattatctttgtagcatcgctagaaaacattcctcttaacattaataataactacaagtctataatcatttttttggttattatatcttcttagatcgaaatgaacaattcaaaactcttcacaaccaatgcttgctacatggatgtgctacatagttactataattaataaattcacatgaaagaaaactatttagttctaaaattccaaaaaaataaaaaaaattaacaatggtgtgatatattctactaattttttgtattataactatattcacatcaacgtaacttcttttttgtattttcttcgtagtagcaatatcatcaaaaaaaaatcaccactagctcctaaacaaatattttaaaaacaagggacataattaatctctctacatgaacaattatattctttacgttacctattaattatcaggtaattcaggggaaaaaaagaaatatttacctacaaatattatatttacatttatgttcttcaaacttcagattcttgaatcttgcagtcattcagagaggtcttctgaccgcacgtgccacacgatagaaaaagaccttgtcagctctgcgacgccgttttatctacagtgtttttttttatacgtgggaagctgtgatctgctgctccttagaaattagaacacatgtactcgttttagattcttcatatcaatgggtaatttacattagtaattttttgattttatgtagttttctataaataatgagacatttcctacattatttatttgttatactattttgacttgagttaatttagttaaagaaaattatatatggttggtaattctcttataaacaaatattgttgataatgtataatctctatgtaaattactatacacgagagagcaatgatccctactaatcgactaatcgtgccacatgtcaaagtcattagcacaaacatcaaacttatgtaattgtatatagtatgccattatataatctgataatcaatgattaagcaatttgcagtgcgaaacaaacttaaagtatagtttactgtatcacgtaatgaaattggttatataggtagccactagtttttcatttttctactacatactttatatcaaatttaaacaattaaaaggtaataatacaataatctcattagctgttgaaaaattgtctgatataagttaataggcaatataaaaatgaatataattgtctggatcctaaatttattaaaaacatgtgaaaggaaaacgaatctactttttttttttttttttttactttaaaatggaatttttgtaattttgtataatgatgaggaagcattgggagaggacgagattcttgtgtattaaaaaaagattgtcctctaccatatcattataattttctctttttgacaactttttacactataatcaaataaatttaaatgttttaaaaatattcaaataatttgagagagaaagatttggtgagaagtcagcatttgccgacaggaaattctgtcttaccaccaaaataccaaatcaataattccaactacttttttgaggtcacttcttgttttggcgtctacgcattttctaaaaattgttttgattcgttaaatactgatttatgtcataaatgtattaattgaatctagaatgacaatgttttcgacaacaaaattgtagacaaattcaaaaagcattaatttaaataatttaaagaacaaaaagtaaaattttcagattggtattggacttttttttttttgtcactaaaatttttattagaacttgagatggaaccttacatgaaaccaaacgccaaggaaactaagtcggcagacaactaaaagtccccaaagtcataagccggaagaaacagtgaattctccgaaaactaaaatggaatcaagatacactaaaaatacaaagcagaaagttcaagtcgatatcaagaaagctcgaaatccaaatctaagaacattagcaagctaacataaaccttgaggaatgatgctagtccaaaagcaacaaatccacttcttcttaagataatcctatgaacgagatttatcaaggatgccttctgccaatccaacgataacaaattcttcttcctatcaagatgagagccaacctctcggaaccaagaaaccaagacgttagaacccggcaagcaaagacactagaagaacctcaaaccacacttccggatgcgacgacgacgataaaagatgcgccaatgttacgtctagataaaagtcttcaataagcttcagatcacaaccggatctgcaaagcaaagacaaggacagaagcctaaccactcgaaaaaacccgcctcgagaaagagagtgccatcaaatcgaaccagttaacaaacacaacaaaaccaccaagaagaggagaacttgaagaccctagcaacaacttcaggcaaaacaaagaagcccaaaagacaggacacaagcaagataaggaccgatggttgaaacaggaggaaacatggccaccggaaaaacaaagtctggacgaagccaaaccaacacggcggcatagagacgataaaaagcaccagagcagctctagatctaggtcgagaaaagcaaagataacagattattagacgaaacaaacctgtggatcaaacagatccggcatcatcatcttcacaagaaccacgccgtcgatctagccctcaaaaccgcaaccgaagagaccacaaattcacaatccgaaacaaacccacgacactccaatcgaagggccaaaacaaactacaacagagacaccatcaccattacaaactactaacagagaaaggctagacataaagcaaagaggagaccgacaccggtgctggaggagccaccggctaccgatctcagatcggaaaatattattggcggctggtttgagagagagagctttagagagtaattaggttttttttttatatcttcgatttgacttttgtttatacagccagattggtattggactattgggtacaatatatatatactatgatgttttaattttcatagcaggatttttgattgagtactatatactatgatttaaaaaacctacattttcaaatttgttttatataaagcaaaacaaaatatgtaatgtttattttctcctctttcaaagttacatattctccaagaagatattttaaaaaataatgtaaaatagtaaaaaaaaaataactatctaagagtatatttatttactttgaaggataaaagtgaaaatacaaagaaaaatatatcatacctttcacataaaattttgattagaaactagaatttcttttgtgcttttgttcttgggttacttttattttttaataattatttgtgatcgatttttttttttcgtcgaaacagtttccaaatatcaggatttcaaaattagaaaaatgagagttcaaatcaaaaaaaaaaaatgaaatgctggtgctctttttattcactaaaccagtactttatattttgggttcgaaattggaatggaataagtcattaaaaggttttggcttcagtcataatgcaattggtattaatttcaatggtattacatttttttattcttttaaattgatgatatttaagaaaaaaatattaatgtatttgtataaaacatgagctaatttactttttaggcaaactttttttgtatgtagtataagttttgaagtttcttgagattaatggaggtgggtaagatgaatctaataccaatcaagtataaagttatcaaaacaaaaataaagtgtattctttgtcattataatatgctgtttgtggggtatatttattgatatatactttttggtgtttttacccctccttttggtaagtaaaaaatgattccttgattgataattttaaaagcaaaccaattttcctgcactcaaatctcaataataattattttcaacactttcaagttgatgatacatattattatcatattataatgtagatacatatatgtgtataagaaaatggttgatgacaaggcattctcagtttgtcacaccaaagaaagagagagtactttattaaaacttgatttatttattttatttgttggtggttatgttgttacttaatttgtgtaatttcacttttagctctccagtctgtctattatttatgatatatttaccaccaaaatttcaaagttcagtactatttgataaagctatgatgaaattatggaggttagatttgcatatcaaaagatatacaacaactaaaaccttttttgaatagtagttcttgaccttttttttgtttcttttactaccatattatttacaagaatgtaaaatcatgggtttgcaccaaaaagatttgatttttgtcaccaaaaaaaaaacacatagtacaaatcatgagtttgggcaaaaaggacgaaagatttcaccttttttttttttaccattcacagtacaaatcatggggtaaacactcaaaaagacacctaatgttacaaaatctacaagaatcgaatcttggggatttatccatgaaaatcaaatcaaaatttgtgtaatcctcaagagaaacaacaagaccgggttttggattttgtgtttaaagttttaagattgttcttcttccactttgatagtttcactttcaaagcttcttcaatataacatcaaaaagctatgattttgatgcaagaacctcccactaaatttgctttcctagtgggggatccacattttttgagaaaagattttaaagaaactactcgatagattgataagttagatagatagataatcgtaatcatagttgaagtgaacccgaaaacccggttcagttcttaggtgacaaaaaggtctacatctttcgtcgtcgacatcaatagagactaacatgttatgatgaagcaagaacgtgaaaaatgttcaaaaataaaatgttttattaagtcaatttcttgaaatggaaaagacattgttttgagtcatgattaagaatattaacgttaatgaaaaaagaacaaaagaacaacagaacaaaagagatcattacaatgtacaatacagaagatgaatgaagctgtcgttgaatcttctgttgatgccattaatgttcttaactacaaccttggaccttttgaaccaatagattgatgatgatcacgacgagaggtcgattcacattagatttcattgctacgcaaaccaaatgtgtgcagaaacatgaaacttctaatggtaatatgatatagacaagaactttacaagagtcgcttgtatgcaagaatttcaaaatcagtctcaagatcattgcttaagttcgaaaaaagacacggaaaaattgcctaaaattatgatcaaaatagactaaaagaaatacaatgatatggctctctttctcacctcctaaaggagccaagtacaaattgaattaagggtagtaaaaaaaaaagttaacaacaaaaaaaatgaattcaagcaatcctacaaaatggccaagttctagtgaaaaactaaatttggtaaaaattaacaagtcacactgaggatgtatcgatgagaacatcgtttagcacatcatcttcgccattcgccatagcgagcagctccgcatctctctcttcctcgttggagaagtctctcctttcgaatttcgagttagcggatataaagatcaacttttgagctcgatccacggctgcgcgtgatcttccattcgaatttacccatctcaaaacagaggaattgcatttgaaaccacaagaagttgcatggagaaaaataagcctaactgcaactctccccaatgacctgaactcactaagataagtttcccaaacaagtctactactttgtggattagctatcctcattttccccgaaacaggatctctctccttcatttgaaccgcccttgcgtaaaccggatcaagcccttctgttctccatttcatcagctccatcatcgcgatatgtgcctcgtctctagacacaagccttgttattaacttatcaacatctttctcttgctccggggacaagcatttgaatggaggaagatattttccgctactgtcttttatcaagtaaagcggatcaagtataaacgccgcagcccaagctgggtgataactcttcttgaatcttctctcaacgatcttctctacttgcctctcttcaacaacattgaactttgcataccaatcttttatcttggaccttagctcatcccatagcggtaaacattgccctaccaaaggcctctcttcctctattctccgagccatttctttaacaagcttcaacaacaaataaaccgcctctacctcgttccaaaacccgacatctccaaccatttcaccaacctctctagccatatgatcctccattagaacagccttacacacatcatcatgcatcaccagctgaatcgctctagcgaaactaagcacatcctcaaggagattatacaatggctcaaacaaagaactatccaaaggcaaatgcagcatcctagtctctccttgctcttgcaactgatacttacaaaccgcgtttcggatctgtgccgtgctgttcacgaaattaacgagcctcgagcagctttgagagacggatttaaacaaaggaagctcttttacaaaatctcgaatcaaactgttgaaaccttgaaactgacaagagagattcaccatccattgatgctggctctcaagattcctcaatgccttactcataaacctatctgaaacaatcccaacacacctctgaggtgaattaccacaaatacccctcaccgtctcccacaaaacctcctctgcgtaattagacggcacagctccgttcacaaacacagctcgtctatacaaactcgtcccattaggcaaattcacaatcaaattcaccaaattctcgccggagctgtcgaatttccatccatcagaagcaatctgaaagaacattgcgtcgtggattctcgattcagcctctgctctcgaatcttcatacttcaaatccaatcttccggtgacaaaatctctccttgagatgatcggtaaaccaacttgcgtcaaaaaagctctcaactttggatgctcgagaccagataaagaaacagagccacaagattcaaaaacccaatcagagagagaatctaacgcagaatctatctgagctttagttagattccgcgtctgagaagttttaggactcttgagcttcttcacactatcttcaagcatagctaatggacccaaatcgtcttttccaccggaaagcatcaaatgcggctgctgtgtaaccggaaactgcccacagaatctcgagggatcaacgacactaagaggcgtcacattataagacccttgatgatgatgatgaggatgatgatgatgatgattcagagcttccacggcggaggaattacgtttccggtgagaagaagacggaggaggaggaggagaaggagagattgtggagatgggtttaggtaaagagttgaaatttggacaagttccacgtttaagatgctcagaagcagttcgggaaggattagaagctgagaaaacggcgtcgcataaagaacatcggagtttaacggctttagggaaaccagtgtcggtgttgtgtagtaagattggttcaaggtgactccaataccacgcgcctttgcctttaactgcttttgttcttaccatcattaatccttcgtaacgcttttgtaacgcctttgtcgctaattcttccgccgacggttgttgcgttggtgattgcgtttgcgtttgctgttgtgtcgccgttgttgttgcgtttgtcgtcgtcgccattgtaaagtcaaaaaacttaaacaacaaccctgaacgaaattaagctgagactagtggattttgatgaaattgaagagaaaatttcgccggcggtcggagataactccggcggttcctcataacagagaacagaaatagaaataaataaactttgtctctgtttttgcttcacctctgaaaaaaaaaaaaaactttgttcctctctgctctgctatcacactgatagtttctttcgattctattttttaagagactgagaaatttcaaaaaggagaagaagaagaaagaaagagacagtagagagagacagagagaggaaggagaagaaaataagggagacaaaagtgaatctcacgcgcataaggtaagcgcgtgtttgtaacattgaatgaaacgtttgataggaacaaggtgagaccagagtcccacgtcgtacgagaacggaaacaaagcattggttgttttagtctctcacttcactctcattggcacgtgattctcacgctctccataaaggtatttttaatactatatattattggttttatacctttttaataaaaataaatatcactttttcagttttttttaaaaaaatatttttggatgtgtcttgttttcatatttttctgttttttttgagtgaattgttgggttcttgtgtggaagaggtcttcgtctgtttcctctttttctaatttatatgattataaaatattgatctactattgtatagtatcaactattccacgtaatcaaatttggtatatgattcgtgttatgaactaacccaccaatataaatactattaacagggtaaatcattcaatgacataagcaaagcagctcacaaatttagtactaaatcattaaatgattcttttaaaagtagataattgtgtgaaagtgttagtaaatgagtgagtgaaagacatgttttttattaatttaatgtttttactttttttttgggtataattatgattgtaaaagaaggaaaaatacaaaaaaatgatgagtggggtttccatttgtgtcttgttgtctatgtgggatatattcagaatgtgggcataaaagggcaacctaggaatttaatttgtttctttagggactgtgtctctctgtgtgtgtgagagagagttgttgaccaaaaggacattctttagtaaatacttatttattattttcagaatccagtaaaaaatatatttattgactgtgacaaaaaaaatatttttgaatataattggttcagtaataaagacatttactcaccattacaatttgtttctacttgaagtagtataatgcatgttacatagtataatagaaactctactttcattttttttgaaaaaactattaactggaaaataaactattttttctcaagaaaaattataatttttttttgaaagtttactacgagtaatattattgctagtattttattcctgataaaaaaaaattcaatacaaaaatcaatatgtttcaaaccactattatcatatttcttgtaagaatgaaaacaaaatttcctgattgtcatcctgagtttttgtatcagtgacaaatagtgacaatttttgtaatttttagaattcgtgaacatttttttctttaatataattgacaaatgttgttgacaacaaaaatggataaatataacataataaaccaacgtttttttccgtaatgtttgttttggacactacatatgtttaatctgagttgtttaatctattagcattatggaattgcattgtttgtcgtagatgtgttattttgatattttagtaaattctctttaaatttcttactttttctactgaaatagttgacttttaccctatcccttttttacaacgacatatactctcttttcttaactgtcttgtgtggtattcatgagtcttatggttgttacaacactcatctcatgtttttctttagttgttctttttacttataccattttttgttaagttatttacttagattacctatttactctacaaattatacaatatatagttatgatacattacttatcataaagtagctgtggaatttagaaaataattatgcaaattacgtaattgatactccattacttatcataaattcttttggaaaagaatatagtgtcctttccatttatatttacataaaaaacgtttacggattaccaaaatgcgatgtgcaaaaacatatagatttagatattcactttttatttgcaatattgttatcagatccatgaaaatcaggtcaatatccaatatttaacgtatctatctgtggatatccctttatctttgattattaacgcaatgagattgagctatcttaatcaaatgtcagtctctaaaaaaaaacagaaatcaaatgctttcataagatctaaaaaaaaaactaaaaatatcacgtagggttacaaaatgaaagaatgtttgggtcatatatctttatctttttcacaatttattattctgggaattttgaataggattttcaatggagatcatcactctattctacaagaccatctctatatactaaatttttgtagacccacaaatttaaaatttagactgcacatatatatatattttatagattggtttatggatatttaacttattcaattttttaaaaatagtaaaacttaaaatttaaatttgtttatcctctgtataaaaaatatagcagatggtaggaatgtaaaaaaagaaaaaataataattacagatataacaatagttaaagtatacaagtggagattagtaggagtctagatttaattggtcaatgtgttaatgtcagaacagccacacgtcacaactgtctcccaccttcttgagtacgatcgtataatgtacttatgattatacaataattttgtaagaaaatggaaaaattgtattatgttaaatagaccaacccaaatatgaaaagatgaatggtccttaatttgagaattatcctttgtggtataagttgtaacatatcacccgcaagcatccggaggttatctggtaagagttatttagattgtcttaaaacattcaactcaataatttggactaattattttattcaactaaaaaaagatactgttattgataataataataataagataatatttataaacggttatttgaattctaagttatttaactaatattttgaaaagaatagtattctaaatattacatttttggtgattttaaattatattgtggaggaagtgtttacaacaacatcaaagagactcaaattacgatattatcgacacctatcgatatcaagtactccaaaagtagaaaaaccccaacaaaacttaagctctatgttttttcttacaatttaacattcatatgaaaagtcattcgactaatatataaatataaacaaaacaaaagtcaagctttgtctcacgtgagagaagtcatattcttttctccaattaccccgcagcacgtaccaactcattttgtgccatcaaactttttaatagcgaaagttttcgtaagaaaccaaggattagctaacaaacaaacaaagaaggattacacaaaatttaataattgaagagaggagtaaaagtagacaagaaacactaactaaatttgactctcgtaactcgcatgattttgtccttacaaaagtcacatcaaaggcatgggtagttacatttgtatacaaaaaaaaaacgttttttccccataaattattcccactttaacaaaactatggtctatggttactaaatagtaaatactacttactactactggtattatagtaacccaatgatttcataagtttacgtgactagctctcttgaaggtaagttggatttagcaaaattagtaacaaaatataacataaagtctgtatttttcttagtaatactatatgtacagtttgaaaccaactatttaaaaatgaatttcagattagtttagatttgaatacatcattagattacatgcttaaaagttcttaacatcataagtttatgacccattgaaactaaactagcccttgttaagtgaaatatagcattgtaatttacttttttgtttaaatagatggttgtgtttttatgtatgtcggcatacgtgtattttagagagaaagttttgattgtaaaaaaaataaaaaataaataagaaaactatttaaaacatagaaagataactatatcagaataaaatactaagatgacaattaatttgcttcatttacaagcttgtattaggaattctctatgccaaccactccactacgtttgtgagtagagcttgcttgatcaatacaaacaacaaaaagatgaatttataattatatattatactatataataaaatacaagtcacaaaagcatatgtttggaataaattattgttatgaacttggatagtttcattctttttgacggcaaatagttatcattcattttttgtatcattcagtctttaatggttccaggtaagttgcaaaagaagtaagcaatattcatgtattctctagagatttttgacggcaaaatagtatcattcattttctttaaagactacaatttgattagatattaatagattaaatggagtagtagtttttttttcaaagatgattttaactaaagattattcttttcattttgattgttttatttgtatagctcaaaactttgtatataaaacatccttcttgattagtaaatttcgcatttcaacaaaaatggaataatgttgtgcgacgattaaatggaatagttaaaatgattaaagaaatgacactcgttgagccatgagattgatgattagttgattaccaccaacgtgtacggtgtggatctactgcatacgtgcaaaatgttttccatgatttttcataatggtgtttctttatgagtttatatatcagtaactagaattcacaacccaaaataaaattcatatggaaagtccatgttaaaatttttgttagtgaaatggtgaaaaaggtactactagtaaacttcatattttatttccctttttaaaaaagtagaataagttaactaaaacaacttttaaaagtggcaattacattaggccaatttttttaaaaatgtattgagacatatagctaaaacaaaatttgttacaaaaaaaacacactcacacatcgaaaaagctggattttttcaatcacatgattgaaggagctctgggttccacattcagtaaaatttttaaaaagataaaaagtaatttctgattcagtgttttcttaattgggcttaatttatgacccatgggcttaataattcggtacgatcataatatagaaccgtttagaaccgggaattgatttcatcggttcaacaaaacataaaaggtcaaaaaccaaaagaacgtaccttcttcttcgacactagttcctccgatcagcgaatctcgaagaaagagattgaaactaaactgttgaaattttccgacaataaacttatctcttttcctcattcaatcctagagaccaaaaagcttaaaagcaaaaaagaacacaaggaaatttactcagaggtaatcgtcgtcggagccaggaggaagaggagggatgggagaggtctggacatggattatttcattcttaatccttatcactcttctcggactcatcgtctatcaggttcgatctgattcccactttggacaaaaaaaaaaacctaaaactgtttactttggttccatcgactcttcttgcttgttgtatttgaataaactctgcttaggcttattcgatcactgtattgaactaaatttagtgttttgtgttctttcaatcataaatcgtttataagaaatgtttctaagttttgggaatgtgataaagttagtaactttagggtttctttatataataactagttaatctgtcaactagaaacaattttgtttcttaaattcttcaattgcttcttgatatatgtgtattgaatctgtagatgttatcttctcagtttatatcaatccagcaagtatctgtgagtgtgtacaagtgtgtgtgctcacgggtattagagtttacttcttaatgtttctggattagtaagctctgatttggtatctgtagagttgatctataatgttttgagtaatgagattcataataaccagatattttataggagagtcttgatcatatgtctctgctattttgctttgcttgtgtccttgtaccgaaactgacggtgcttattgatatgatattttgttgcagcttattagtttggctgatctcgagtttgattatatcaacccttacgactctgcatcaagaataaactttgtggtattaccagaatccattcttcaaggatttttatgcgtattttacctcgtaacgggtcattggttcatggcactcctttgcgttccttatctctactacaatttccatctgtgagtctctcttttttaaacaatcttggatcaagtttaacatccaacggcaagctgattttgataatgagtatatcattctttcctgttattaaaggtactctcgaaaacaacatttgatagacgtgacagagatcttcaacttgcttgattgggaaaagaagaaacgactcttcaagctcgcttacattatcctcactctctttctcaccattttctggtaactagacctttcactgtctttactcaatcctaaactcgtaccaaaacattgaaaacttatgttgcaacttcgttacaggttaatctattcaacacttgatgattacgaggactgaatcacgcttgaagatacacccctgtgacaggcgacaacaaacggtttggtcaaacccctctcttagtacttgacaccgcgcttgatacaatggcatgagaaggaaggcttttaggttatgtaagttaattaatgtggcattagagagctgtgtaaaccagattttatagtcattagaatttcattgtggatctttgtggtgaagccaagcagtgaattgttaaccatgattggaaccctctaactaagtcagaaggttttactttttattttagctgcaaaattatttattagtatataaataaattggtaaattctccaaattgtagtgaagaagccagaaggatttatctttatcatcgtggtgagttctttctctagattttttatcctcctccgaatcgaaattctctatgattttaagatcgtcgttggattctgaaactctttaactttgatttctacttaaaaccctaactaatgttttgacgactggaaaaaaaaaaccaaatctcgttcactcttttgtttttttgttttgttctgaatttcgtgtggaatctgtggacgtaaacgcggaacaaacatagatttgttggtgatgtaaattgcaaagattgttactcagtaatgaatcttcttcgcatatgttatattgtttcgtaagaggattaagatgacaatagcattagggtttatataatagagtaaaaacaaaattaagcacaatgttaactagtaatgtaaattgttgttaatttgagctacgattagtgtcaataaacatcaataaacatagttaccgagctttgactgaattttgagaatttttgagtgttgttgtttactgcagttttagtcatgttcttgaatacactctggtttcagtttcttctctgcttcaatggttaaactccattgttagttttgatctacgatcagtttttcgattaaagcacaagtaaaccgagcttttgatttgagtccaatggctgaagactctctttatgatgttaaaaaacgatgttgtttacagttttggtgattcaagatttctaatgttttttgaatgtgttattgtttcaggttctttgctttaagattcaatggttaactcaatcaaaggagtcttcatctcatggtacattacataacctttcttgttaatatactctgtcgagaaatcgtatcttttatctttgttttttttgttcttatagtgatgttcccatggcacagttcattgcacatttgaacaattcgttgcctgcttcacagaagttcataattcaagtactgaaactggacactactagtatgtttgtgaagccatatgctgaggagatgatccgtgatgccgtcatcaagttcagggacgaaaactcttacgcaaaggcgaattgatcgttttttttcttcttctcggtttcggttactagatgtcgattttggatcttaatgtagtgtggagatcaacaaggatttgtgggaaatctctgatggaaaatatacatgtttgttaattattaatgtacaacgaatctgaaaaaccgaattggtttattttgacaacgcaacaaaactttgcaaatgatataatttgaaaacgcgaactggtcgcagctgggaagacttttggacatcacgggtactcgttttttgttgttgttatggctttgttgactaaggttacttggaacaacatcggaatgcatcagccacaaacgaattggtacaagggcgtatggttcccctactcaacgcccaagtactcttttcttttgtggctcacaatccaaaacagactatccacaggggatcacatcaaagcatggaactctgggcaacaagtcacctgcacactctgcggcaatgctgaagaaacacggaatctcctattcttctcatgccattacacctccgaagtttggagaacccttacgcagcggctcctgtccaacgactactctcgtgactggaaccgtctccttcctctgctctgcaatacaaatatgccaacggatcttctctttttgtttcggtatgtcttccaagcctctgtttaccacatatggcgagaaagaaatgcccgacgacacggagaaatcagctcaccaccaaaccggctcataaagttcatagacaagaatgttcgcaatagaatcaactcaattcgagacactggagatcataactacaacgcttgcctgcagctatggttctccacgaggcctctttcatccacacactctctctgaattttcctttcagctttgtaatttcagttttctctctaaaacactaaactaaccgttgcagtcattgtacaatggttttgatagaataaaatttgagaatattacactcttagacacttttttaaaacttattccgtgtttaggcacttccaaaagagtagacactttctctatgtttttttactaaaataccctattaactaaactactctcttaatccttaatccacgttctctctctctctctttctttctctctctcttcatctttgtaaacaactttagttgcgtctacttcaatggaattgttcaaaatagacagttctcaaaaaaagttatttgttggatgttcaaaatagccgatctccttataattatttgttgaatccactcactcatttctttattttagtattttagatgctatggagttcttctttcagttaaaggatttggtattcaaattttgcagaatttgagatttctatattgtagaattactcggattgttgtgagattatggattgattggagagttcgatattttattcgttttcactgattgtagattgtgatttattttgcaatttaaatctttgttttgacataaatttgagattcagttctttaagaaacttcttcttcttcaacaatggcggcttgatttgatttttgctctctctcatgtatcaaactcgtttcatctacgtagcatcgagattccagttaatcgaatctcctattatcatggacatgctatatagaatggatataaatcagtaaaaaggttttcgaatggatatatttaaatggatttgttattatggacaccaaaaaattgtttgttgattttttttttcagtttgcagaaacctccacctttaagaccttatggacatgaaactttggtttctttacaaaacacggttaatcgaatctcctgttattattgacatggtatatagaatggatacggatcagtagaaaagtttctgaatggatatatttaaatggactcgttattatggataccaaaaaattgtttgttgatttttctttcagtttgcagagacctccaccttcaagaccttatggacatgaaactttggtttctttacaaaccacagttaatcgaatatcctgttattatggacatgatatatagattgaatatggatcagtaaaaaggtttccgaatggatatatttaaatggactcgttattatggacaccaaaaaattgtttgttgatcttttttacagtttgcagagatctccacctctaagaccttatgaacatagaaattttaccaaattcctaagataatcgagatcgaattgtttaagaaaattctcccatttatttgcagaatcggtaccatcgatttttggtgagccgccgccataatcgataagaggaatcgagcctagaagttatggagacgtggagagagaaaggcactacaaatcatgaaagggggagagagagagagagatttcttttattttgcgtaaggattgtggaagagagagaaaatgtttaatttgtattaaattttaaaataaaagtagttggttaaattaaaggtaaaaatgtctttaaaaaagtcaaataatagaaaaagtgtcctctcccttataagtgtctcaaaaggaataagattattttaaagtgcctaaacgtgtcacattcccataaaattttacattctttcaaaaaaaaaagaaaacgcgaaccggccggtaatcaccaaataacattaaaataactaaaccggtttggcattcactctcttcctctctgagagtctcagactcacacacagtggtggttcgtttagggtatttgttgaatttttcagagcttccgaatcagagagattgagaagaaatcaaatagagaaaatgatgttatcgtttgcgattgcatatacagcgaagagatttgttcatcggagtcttgtggtgagaggtaatgctgcaactgtttctccctctttttccttttgccggagaagagctttctctggtaagactagttatgattacagagagaaactgagtagaaatgggctgactgaattaaagttagatgacgctgttgctctgttcggtgaaatggtcaagtctcgtcctttaccttccattgttgagttcaataaattgttgagtgccattgctaagatgaacaagtttgatcttgtcatctctctcggcaaaaagcaataaatgagggttttcgaactcattggttcgaacgaacaattcgctgaaatgtttaaccggacaatgtcggaagcttccacattgattatgaagaaggttttagaagtttacaaaggattcgaagatgtaaatactttggtggatgtgggaggaggaattggaacaatcataggtcaagtgacttccaagtatcctcatattaaaggcatcaatttcgatctagcatcggttttagcccatgctccttttaataaaggtacacggccactaagtgataattaaaattaaaaagttaccgctcttaaaattatcatattactcttgctcaatattacatataggagtggagcatgtttcaggagatatgtttaaagaaattccaaaaggagatgccatcttcatgaaagtaagtagaaaatgaaatggttaatgattgacactttgacagtggatactacatgattggactgacgaagattgtgtaaagatcctaaaaaattattggaaaagtcttcccgagaaaggaaaagtgataatagtcgaggtggttacgcccgaggaaccaaagattaacgacatttcttctaacattgtgttcggtatggacatgctgatgttagcagtaagctcaggtggtaaggagaggtctctttcccaattcgagactctagcctctgattcgggttttcttcgttgtgaaatcatttgtcatgccttctcatatagtgttatcgaattacacaaataggctcgacattttaccaacaaaaattacgattcatctctcgtacagtcgtacttgcggagactatatagagtggttgtaatgtgtaaaataatctgtgtattgttttttttatttatgtgatttaaacaaatagcatggtattatataaaaaacaatgtgttgatataccaaattggttaggattaagcttcaaagataatgcattgagatcagtcagttcagtttttcaagactagttgtatatggaaacagaagtagagtaaaataacagccatcaccaattttttccacaattcttatctcttgcttgtaaatccggtttgagactgtacttagtactactgattgagatcaatgcaaaagattttctcacaaaataaaccggttaggtaataagttctaaaccagaaccccaccggtttgcatatctcatccctccgtgtagggttttgcgatttccagagagagagagagtgagactgagattgaagtctcctgaatcagctgaagccaaatcgataagatgcagagatcgatttcattgacggccaaaagattgtttgttcattggaatctccaggggataggtaatcctccaactgttccttctttcttcaatctttgcggttccggttgctgggaacgatcttttgctagtgctagtggtgattacagagagatattgagaaataggctaagtgatattattaaggtagatgatgcggttgatctgttcggtgacatggtcaagtctcgtccatttccttccattgttgaattcaataaactgttgagtgccgttgctaagatgaacaagtttgaacttgtcatctctctcggcgagcagatgcaaactttgggaatttcacatgatctttacacatacagtattttcatcaactgcttttgccgacgctctcagctctctcttgctttagctgttcttgccaagatgatgaaactcggctatgagcccgatattgtcacgctttcttcgctgctcaatggctactgtcacagtaagaggatttctgatgccgtagctttggttgatcaaatggtcgaaatgggatataaacctgatacctttacattcacaactctaattcatggactttttcttcacaacaaagcttcagaagcagtggctttagttgatcaaatggttcaaagaggatgtcaaccagatctggttacttatggtaccgtagtaaacggattatgtaagagaggtgatattgatttggctttgagtttgttaaagaagatggagaaagggaaaatagaggctgatgttgtgatctacaacacaatcattgatggtctttgcaaatacaaacatatggatgatgcactcaatctgttcactgaaatggataacaaaggtattagaccagatgtttttacctacagctccctcataagttgcctttgtaattacggaagatggagtgatgcttctcgactactcagtgatatgattgagaggaaaatcaatccaaatgtagtcactttcagcgcattgattgatgcatttgtgaaggaagggaagcttgtagaggctgagaaattgtacgacgagatgatcaaaaggtctatagatcctgatattttcacttatagttcactgatcaatgggttttgtatgcacgatcgtttagacgaggccaagcacatgtttgagttgatgattagcaaagactgtttcccaaacgtagtgacttacagtactcttataaagggattttgtaaggctaagagagtagaagaaggtatggaactcttccgcgagatgtctcaaagaggattggttggcaacacagtcacttacaccactcttatccatggattttttcaagctagagattgtgataatgcccaaatggttttcaaacagatggtttctgttggtgtgcatcccaatattttgacatacaacattctgttagatggactttgtaaaaatgggaagctagcgaaagcaatggttgtattcgagtatctgcaaaggagtacaatggaacctgatatttacacatataatattatgattgaagggatgtgcaaggcagggaaggtggaagatgggtgggaattgttttgtaatctcagccttaaaggagtgagccctaatgttatagcctacaatacaatgatatcaggattttgtaggaaaggttcaaaggaggaagcagattccctgttaaaaaaaatgaaagaagatgggcctcttccaaatagtggtacctataatacgctgattagggcacgccttagagatggtgacagagaagcatcagctgaactcatcaaagaaatgaggagttgcgggtttgctggagatgcttcaaccattggcttggtcactaatatgttacatgatgggagattggacaaaagcttcctcgatatgctttcttaatgctatttatctcattttcagtatcaatttttgttatgtttattttctgtcaaaactcaaaagtatctcaattctcatttcttatactttaatatgcaattcctgaaaatcagattattagtgtacatcttcagcaataagtatgtatcaatttccacattttttttctccttctaattttagttgatgaaacagtcaaacagaaattgtttaaactttcatgatgtaccattttgtttttgttgtaatgtgatattttattaaacaacaaaaaattctagacaaagaggtacttatatgttaattcttaccaagaagtctaaagaaaatagatgtgtccgttaaagcagttgaaagacaaaccgagatgaatcccaaaacgaatacggacttattgcgaggaaggaatcgagcatgagagatgacccaagaagagtcgaaagatgattaaattttctgataacttttttttatgcttaaccggatctaacattttgttaaaccaacctaaaccatgctcaattccgattccctaatctgataagcacgaatcacatctgttctctatttgcagagctcgaaatttaagagagaaattgagaagccaaatcgagagaatgcttgcaaaaatatcatcttcagcgaagagatttgttcatcggagtcttgtggtgagaggtaatgctgcaacttttcctctctctttttccttttgccggagaagagctttttctggtaagactagttatgattacagagaggtacttagaactgggctgagtgatattgaattagatgatgcaattggtttgttcggtgttatggcacagtctcgtcctttcccttcgattattgagttcagtaaactgttgagtgccattgctaagatgaacaagttcgatcttgtcatctccttcggggagaagatggagattttaggaatttcacataatctctatacttacaatattttgattaactgtttctgtcgatgttctcgactctctcttgctttagctcttcttggcaagatgatgaaactcggctatgagcccgatattgtcacgcttaactcgctgctcaatggtttctgtcacgggaataggatttctgatgccgtagctttggttgatcaaatggtcgaaatgggatataaacccgatacggtgacattcacaactctaattcatggactttttcttcacaacaaagcttcagaagcagtggctttaattgatcgaatggttcaaagaggctgtcaaccagatctggttacttatggtgcggtagttaatggattatgtaagagaggtgatactgatttggctttaaatctgctcaacaagatggaagctgcgaaaatagaggccaatgttgtgatctacagcacagtcatagatagtctctgcaaatatagacatgaggatgatgcactcaacttgttcactgaaatggaaaacaaaggagttagaccaaatgttatcacctacagctccctcataagttgcctttgtaattacggaagatggagtgatgcttctcgactactcagtgatatgattgagaggaaaatcaatccaaatttagtcactttcagcgcattgattgatgcatttgtgaagaaggggaagcttgtaaaggctgagaaattgtacgaggagatgatcaaaaggtccatagatcctaatattttcacttatagttcactgatcaatgggttttgtatgctcgatcgccttggtgaggctaagcagatgcttgagttgatgattaggaaggattgtctaccaaacgtagtcacttataatacgcttataaatggattttgtaaggctaagagagtagacaaaggtatggaactcttccgcgagatgtctcaaagaggattggttggcaacacagtcacttacaccactcttatccatggattttttcaagctagagattgtgataatgcccaaatggttttcaaacagatggtttctgttggtgtgcatcccaatattttgacatacaacattctgttagatggactttgtaaaaatgggaagctagcgaaagcaatggttgtattcgagtatctgcaaaggagtacaatggaacctgatatttacacatataatattatgattgaagggatgtgcaaggcagggaagtggaagatgggtgggatctattttgtagcctcagccttaaaggagtgaagcctaatgttgtaacctacacaacaatgatctcaggattttgtaggaaaggtttaaacaaagaagcagatgccttgtttagagatatgaaagaagatgggactcttccagatagcggttgctataagatgccatcttagagaatggtgacaaagcagcatcagctgaactcatcaaagaattgaggagttgcaggtttgctggagatgcttcaacctttggcttggtcactaatatgttgtatggggagattggacaaaagctttttggaaatgctttcctaaactatccttgaagtgagtaagccttttttaataagttattacttctcaatagtcaatacaatccttatgttcatgagtatgcctgattagctttctgtgaaccagcattgaagttttagtgaacattttgagttgtgatttggttttttatcttctgtatccaatattgttcatatcttataaacgagacattctcaattatgttaatcaaatttggaaacttttatctttgtttcgtgcattaggaaacttgcaaattgttaatttctcctatagaagaaaatggttctgatgcgaatcatgtatgtaccagaagctgtctttgaacaggtggagctgcatcgcactccatttcacatgggaactcttgttttgcaggctcaatgacggtttcagaagatgatatccaaactaatgtgagtatatgagagagtgtagcagctgtaatctcatcaaatgaaagatatttcagtgttcaagtattacttctcaatgcagtcagtatgttcccatggtgtagttcattgcacattggaacagttcgttcttttttgtgttgaacttgaattactatcgttgttttttgtagttcctagtggaattatgaacatgtgtgtggctggacaaacatacacgtagtaccaggtttagtacttgaattatgaacttgcagagatggttcaatggcatagttcccatcgtcaatttcattgattgaatttcccttgccagaaatttctgttttatcataaattttgagaagtagttttggttttacggggtttcttcatttctgaaattagggattttatttcagggtaagaaatcccaagaagaaatgaagaagaaagttagtacgcatgcatatggagcctgctcttcctttgaagatggaccttgatagaccgattcttcctcggtatggaatgttagatcagtatcattatgaaataattcctttgaattccgatgcttactctgccattagatatgagaatgtatgaaaatcttccttaggttctatagcataatgtgaagattgaaatatggtttgatcagttgctgtttctgacttttgaaatttggtcagttagaaatttacatgaaacttcataatggttacatttgtagactacatagggttttagatattcacatagggcattctcatcttcagtttggtgaatcaagcaattactatatacctatttatctggagtattcaggtttcagagaccaactggcccaattccctcgttgatgcttgaccttgaagtctacacaggagctatagatgattttgattttgaggattacttgaatggtaattgttttacagctctttctcatactttttagactgttttacaccaaaaaaaaaagaaaccctatatatttgtctgcttctacaatggtcattgctcaaatagtgactatcatatactacttgcagtgtgtaaaccaagcatccttgtcttgcagaaagttgaactctttgagtatataagagaaaaactgtttagacttgtttcttttcttagtttcaccattttatgggttgttctgataagtagtatctactccgcagatcctcgagaatccaagatgctcaaaccagttgacttccaccaccacgtcatggaagttggggttagtctctccaaaggcccagcttaaccaagttccttgtaggtcaaaacagtttatactttataatgccatcaaagtattgaaactggactctacttgtatgtttgtgcagcctaacgctggggaaatgatccttgcagcgccgtcatcaagttcagggaccaaaactcttgtcgaaagcttcaacaataagtctggtgactaatatataaatagctgatttggatagtgtgagatcaacatggtgttgctagacaagtgtgcagaatgagataattttatattagaacagccatgtattttcttgtgatgtttcatgttcttaacttctcttatttacacggttcctttttgagctgctactgaccatgagaggtgttatgtgtttaacgcaataactttttgttagtgccttgaaatatatgttttctcatgtaagttgtccttgtaactaagcttttcataattgatgacatcagtactgatctttttacttttatttttgttaatgatatattataacctcgagaattttctcatatgtagacgaaatcttggaaaaacttctggtacgtattattttcttaactcttggcatcttatttttgaaatcaggtgtttaggtcaatagcggaaacagagcctagtgatgtgaagttagggctggacttggtgagctctatgaaggaagagcttgagttatgtccttcaacatgcttgtgccaatgccaaatataagcagaacgctagctctacctgtatggaaagagtacaaatttgaagaacttccttacaatgtcctcacaagtatttaatgcaagagctcttttatctcctacatttaaaagaatgattttgaacttttcttagtcatcgtatctaaaagagtggctttttcttagtagagagttctttttttttttttgataaatcctatcgactaatccggtcagcctcggtagaaacgcaccgaagtacttcagagtagacttctccccgaaagaccacactgtctgtctcgagtttggaattcttagtagagagtttaatagggcacatcttagagatggtgacaaggaaaagtttactcttaaaaatgttcataaaagcaaggtttattaaaactgaaaattgcaagtgttgttcttccgtctaatggtttatttatctgattctcgtattgacaatatggagataatgtttctgtttatggaaaagcaaggtgaagaggcatctttacctacgctcataaacctgaacaaaagagacattaactgaacaatattaaaccaaatcgtaccagagaagagaagtcagagtgaaccggtcggttattaaaactggaatatttaagaagaaatcttgaccgtcaaaattaccaaaatgatccaacggcgcagaaacgcgagatccctccgtcttcaaggttaaacaataatgacaagttgtgttcatttagggattgtcgcatcacaatcgaagaagatgagtttggcgaagagatttgctcagctgaggaaagcttctccattgttttcccttcgaggtgtctatttctctgctgcgagttatgactacagagagaaattgagtagaaatgtgttgctcgatttgaagctagatgatgcggttgatctgttcggtgagatggtacagtctcgtcctttaccttccattgttgaattcaataaactgttgagtgccattgctaagatgaacaagtttgatcttgtcatctctctcggcgagcggatgcaaaatctgaggatttcatatgacctctattcgtacaatattttgattaactgtttttgtcgacgctctcaactccctcttgctttagctgttcttggcaagatgatgaaactcggctatgagcccgatattgtcacgctttcttcgctcctcaatgggtactgccacggtaagaggatatccgaggctgtagctttggttgatcaaatgttcgtaatggagtatcaacccaataccgtcacatttaacactctaatccatgggctttttcttcacaacaaagcttccgaagcagtggctttaattgatcgaatggttgccagagggtgtcaaccagatctatttacttatggtaccgtagtaaacggattatgtaagagaggtgatattgatttggctttgagtttgttaaagaagatggagaaagggaaaatagaggctgatgttgtgatctacaccactatcattgatgctctttgcaactacaaaaacgtgaatgatgcactcaatctgttcactgaaatggataacaaaggaattagaccaaatgttgttacctacaactccctcataagatgcctttgtaattacggaagatggagtgatgcttctcgactactcagtgatatgattgagaggaaaatcaatccaaatgtagtcactttcagcgcattgattgatgcatttgtgaaggaagggaagcttgtagaggctgagaaattgtacgacgagatgatcaaaaggtctatagatcctgatattttcacttatagttcactgatcaatgggttttgtatgcacgatcgtttagacgaggccaagcacatgtttgagttgatgattagcaaggactgtttcccaaacgtagtgacttacaatactcttataaagggattttgtaaggctaagagagtagaagaaggtatggaactcttccgcgagatgtctcaaagaggattggttggcaacacagtcacttacaacactcttatccaagggttatttcaagctggagattgtgatatggctcaaaaaatattcaaaaagatggtatctgatggcgtgcctcccgatatcataacatacagcattctgttagatggactctgtaaatatgggaagctggagaaagcattggtggtattcgagtatctgcaaaagagtaaaatggaacctgatatttacacatataatattatgattgaagggatgtgcaaggcagggaaggtggaagatgggtgggatctattttgtagcctcagccttaaaggagtgaagcctaatgtaataatttacactacaatgatatcaggattttgtaggaaaggtttaaaggaagaagcagatgccttgtttagagaaatgaaagaagatgggactcttccaaatagtggtacctataatacgctgattagggcacgccttagagatggtgacaaagcagcatcagctgaactcatcaaagaaatgaggagttgcgggtttgttggagatgcttcaacaataagtatggtgattaatatgttgcatgatgggagattggaaaaaagctatctggaaatgctgtcttgaaacaatcaatcctcgagaaacgaattggggagcaaccatcttcccttgtgattgcatatgtgaggtgaatcgccttttttagatagctattcttgtgtttacttctggacccgttttcatgttaaatttgttcttgttgttgttgagtgtaagtttcgtggacatgactggtacagttctctgcagtcagtatgttctcatgttgatatagatttgtttcttgtctaatcgatgatttatcacctgaatagtattcttccagattggttaagttcatacgttcaaagaaatttaaagaccacgctccttattcgactgattgatcgatgaaatagcagatccatcagtcataaacggcgctgaagaaacacattaacacaccaaatttatgtaccacacgacaacaatttcttcatatgtacagactacagagagaaaaacagagttttgaaaagatcagacaaacaatttgtcggttcgtctctcttctctccatccattgtaaacgtttgcaatgtaatcttcaatcctgctcgtcaatgtgtcatcatcaacatcatcaccataggcatgattatcatcatcatcacggttttcaataccatcatcaccaccatcttgattacattggctaaaatcttcatcatcgttccatatacaaccatcattatcaacttcatcaaaaccatcataatagctaaaacaatcatcatagtaatatcttgtgaaatcacaacattctctgttcttgtctatgatttcaccatcaagcatattgtcttcttgaaaagtgtacaaaacatagaaatctccggtttcttcataaacagagcgattacgatcgatgataagtaagaaaagaatcgtacagaggaaaaagaaaagaagaagaggattgttgaaatatctcaagaagaaaaagagcattagtgttgaaacaattgttctccagatgatctccatgacattgattataatgttcaacatcttcatctggactctatctatatcaataaaagagtaactttccgggaaaaaaccatgaattctgctgagataatgagtggaaaaagtctgttgtgtgaagttattgtaaaacttaacatatataaaataaaggttttaatattctaaggatgtgttgtacacatgtctgtttcttgctgcgcaagttctaagaatttgtgtatgtgtacctttagtattaatatatatgttcttgagagagaagtttacgattcttgaagtgggacacaatgagtttttaagttatgattgtaacaagtatgtcatttatctcattttaaaagtatgtttttctaatatttaaatctatatatgtagatgagaatataaaaaatatggtgtagtttaatttaaggtttttgtgatccttactctaagatcatcaaagtatgaacatgccaataacaataataattcgtattgaagaactttgcacaacctatttataggacctaaacccttaaatccccaccattgtataaaatcttccaaatcaagaataaagtaagattcaaaattctaatcataccacattttctacgtacatttcatctagatcaaaccttttctaccatgcatctccaaaggaattgaatccttaagccaactcacgtgaaatcgaataatccattctcgcttctaagttgagaaaatccaatatttcacgttctagaatcatgacgtacgcgtgacatttagaaatgagaccttaaccttttaaaagtcattgataaaacattacaatatagtttcttttataagtagtacaagaaaactttgtatttataatctcggtaatatgatcgtagtagagaatgtttaagaaagaatacattaatttgtatgaacaaaatacttttgaagatgtttttttattggactccataaataataaattcagatattttcacatcatttccatgactcaacaaaactctacctacaatatgtctaagagagtcaaagactatcatcctcttctataaccaaaaattggtttgcacacacatgacatgacatgaacaagaaactactctcctatttatattcactctagagccggccctgttcctaacacataaatcaaattcaattcgtttaaaaatggagagtcaaaagcaagaagataatgaatacattttccgcagtttgtatccatctgtgcccattcctgacaaacttacactggtaattaatatagctaagaacagtttttcatttccggtttcggtttattataatttaggttaagattcggtttataaatactaatggaattaactaatggctatgtgaaaaaagcctgaatttgtgctccaaggagttgaagaatacacagagaatgtagcgtttgtagaagcggtgaccggaaaagctgtgacgtacggtgatgtagtgagggacacaaagaggctagccaaagcgttgacatctctcggactaaggaaaggtcaagtgatggttgtggtcctaccaaacgtcgccgagtatgggattattgcccttggtattatgtctgccggtggagtcttctccggtgcaaatccgacggctcttgtttccgagatcaagaagcaagttgaagcttccggtgctagaggaatcatcactgatgctactaactatgaaaaggtaattaaacattactgttttctatatgatttggaaaactttttaaccagcaaatgtatgcacatgataatttcgttcggtttggttgctgcaatatatggtatagactaaaaaccaaaccgacataattccacagccaagctgaactaaaccaaccaatcaccaaactcgatttatttgtgaaacatttactgtttgttttggacaggtgaaatcactaggtttaccggtgatagtgttaggtgaagagaagatagaaggagcagtaaactggaaagatcttctagaagcaggagacaaatgcggagataccgacaatgaagagattcttcagacagatctttgtgcacttcctttttcttcaggaacaacaggattacaaaaaggagtaatgctcacacatcgcaatctcatagccaatctttgctctactctcttcggtgtcaggtctgaaatgatcggtcagatcgtgacgcttggtttgatcccattctttcatatttacggtatcgttggcatatgttgtgctacaatgaagaataaaggcaaagttgttgctatgagtcggtacgatctaaggattttcttgaatgctttgattgctcatgaggtttcgtttgcgcctatagttccgccgattatattgaatcttgttaagaatccgatagttgatgagtttgatctttcgaagcttaaacttcagtctgtcatgactgctgctgctcctttagctcctgagcttcttactgccttcgaagccaagtttcctaatgtccaagtccaagaggtaagacttaagacttttatgttagttattaccttattattcatgttcaatgatgttttgattggttatatatatatatatatattaggcttatggattaacggagcatagttgcattacgttaactcacggagatccagagaaaggacaaggaatcgcgaaacgaaactcggttggtttcatacttccgaatctcgaggtaaagttcatagatcctgacaccggtagatcactcccgaagaacacttctggtgagctatgtgtgaggagccaatgtgtaatgcaaggttacttcatgaacaaggaagagactgacaagacaattgatgaacaaggttggcttcacacaggagacataggttacatcgatgatgatggagacatcttcatcgttgatcgtatcaaagaacttattaaatacaaaggttttcaggtaaaatgtttataccaaagattaaacataattcttccttgtttcatattggccggattttcaaagttgaagcttttccaataggttgctccggccgagcttgaagctattctactcactcatccatccgttgaagacgttgccgtcgtgccgtgagtatctatataaatatattgccctaatgatttcttgaaactgatatattaaaacatgaaatgaaaaggttaccggacgaggaagccggggagattccggcggcttgcgtggtgataaatccgaaagcgacagaaaaggaagaagacattctcaactttgttgcagcaaatgtggctcattacaagaaggttagagccgtccattttgtggattcaatccctaaatctctctctggtaaaatcatgaggaggcttcttagagacaagatcctcagcatcaacaagaagtagaagaaagaaaactcttacaagcttttaattaatctactttgatttaagaatgtccttgaacaataaatactctttgtggtttttattattgctccttgattaggaaattctacagttcaattctgcaccgcgcaacaactaaaaagattaaactatctcctcgaaagattttaatcaaaacattgatataactcacggaacaacaattttaaaccgcaaaaacacgctgctttctcatgctgtaaaaagttatactgtagaattagatattgaactgacttactttcattaattcgcaaactatgagtatttattcacaatgaactcaacaagatataaacacaaactcctaaaatataggacataaactctatcaccaaagatatcgtactaatctaattctcaatttttaatcttcatagttccttattatataaccaagataatagttgtctagttgaaacttgaaatagctcaaggatggagaatttatcgtctttcactttacttttcttttattcaactttctcactttctccaatgtataactacttcagtacttcaatactcactagaccagggaaaatgtatgaaatttcaattgtatatttgtatgcatgctttagatatttatttttttccaagattcagattatatcgaagtaacattttttgtaattgtgggcattggtcaaacacctagtacttctgttttatgtcagacttgaagaatctagagaatcttaggaacagtagtcagactttgatgtttcgaaatatacaaatataaacagtaccgtacttaatcaacggtcatattataaattcatacaaataaaagacaacggggtattaaatactgaagattagagaacattttaagtcttttatggatttatgattcagtgattcaaagactcacagtgcaatattgatgtatctaggaatttacactaagaaatcgacagtgattataaatagtactcagttgcttggacaaaactaaagatttataaagaaaaatccgacaaaaggcataattgggaattgaactcttttttgacaagaaactttggaatgaagttttgttgttgttcaagcatagtttttttttttaatatgagtaattttgaatttactgcactgttctaggtttccgacctaaagggattatttgataaatctttaaacatttactagtattacatactccttccgtgtcaggtatcactttaattaagtgatgttcactatatttaagtttgtcttttggtgtatgtttttatattagttgagttcattttgggatgttcaaataattagttccgccaatttctagcaaaacaaagaacagaaaaagcttttccttatagattttaaacttttgtatggaagaagtctacaaaaccggaaaataaagggtgagaaatttaatttatccattaatttttgtgggattacgaattcgaaaaccatttttgtgggaatacgaaaaccactttgaaggtttaaagtaacaatttttttattttgatggtttattgtgagagttcaaaatcttgaaagtttttaaagtgtaagttgttgctactttgaaggttttttataagatttttcggtaaaataatcttattctcattaaataataaataatacaattaaggttttatatacaattgataaaggtctaaaccagaagccactaaacggaaaatctaagactggtttatacaataccaatttgtatagactctctatgaactattgtatatacaacatttctatgcaatcaaaagctatatacaataatattgatatcacttaatcaaattcacaatgttagacttgttttgcgaaatatcattaatttgaaaactaattctataattagataatatttttagaatttttgattaaaaaaatctacatttcgtatcattcataaataacttaaaaactgtagaatcacaaacatgatcaaattatacataaaaatttattttatcttatttatagtttctgaaatacattgatggaagggtttgattggtgtaggcaacaaagaataaatgcttgatggtacaagacaaacagacaccttcttctcccactcttaaattacacacacttacttacacacacataagcttgcacgtggttcttgttcacatggtggaagccacagatgtatatagagagacagagagagagaggaaacaaaaccaaaccttttgctgcagaagagacagactattaaattgcttcacctgctttacttactttccagccaaggcacactctccacgcactcatcttttctcaaatctctctctatatagatttgtgtccagaaattaatgggtttggttcggaaacttatgactggtaatacccagatcttattctatgtttcttgaaactctcttctcgaggcaaatgcagctacttcttcatgcttttgttcttcttcttcttcgtttatcaagaaattgttaacgaaatagcttaaccgggtttgagttcggtttaggatccgataaccgcaaatgcagattgggaaattgatttgggtaataatgttcatattcgttcacattattattacatcatctcgaagtttctcggattctattattaccgaacgagagattctacttcaattcaaagacaacatcaacgatgatccgtacaacagtttagcttcttgggtctctaatgctgacctctgtaacagcttcaatggtgtatcttgtaaccaagaaggattcgtcgaaaagatcgttctttggaacactagtctcgccggaaccctaacgccggcattgtctggtttaacttctttaagggttttgactctgtttggcaacaggattacaggtaatttacctttggattacttaaagttacagactttatggaagatcaatgttagttccaatgcattgtctggtttggttcctgaatttatcggtgatttgcctaatttaaggttcttggatttgtcgaaaaatgcgttctttggagagattccaaattctctgtttaaattctgttacaagacaaagtttgtttcattgtctcataacaatctctcaggatcaatccctgaatcaatcgtaaactgtaacaatctcattggtttcgatttctcttacaatggcattaccggtttgttgcctcggatctgcgatattccggttcttgagtttgtatctgttagaagaaatttgttgtctggtgatgtgtttgaggagatatcgaagtgtaagagattgagtcatgtcgatataggaagcaattctttcgatggagtagcgtctttcgaggttattggattcaagaacctgacttattttaatgtgtctggaaaccggtttagaggggagattggtgagattgttgattgtagtgaaagtttggagtttttggatgcttcttcgaatgagttaactggtaatgtacctagcggtataaccggatgcaaaagtcttaagcttttggacttggaatcgaataggctcaatgggagtgtacctgtaggtatggggaagatggagaagctctctgtgatcaggttaggcgataactttatagatgggaagctaccacttgagctcggaaatcttgagtatctacaggttttgaatttgcataatctcaatctcgttggtgaaataccagaggatttatcaaactgcagactacttcttgaactgtgagtctttgtatctcttctatgctgatatttagtgagtttttgattcgtttatctaactttttagttttgttaatctttgttgtttgttgtagagatgtttctggaaatggtttggaaggagagatccctaagaatctattgaacttaacaaacttagagattcttgatctgcatcggaaccgaatcagtggaaacattccgcctaatctcgggagcctctcgagaatccagttcctcgatctttcagagaatttgctttctggtcctatcccgtcttccctcgagaatttgaaaagactgactcatttcaatgtttcttacaacaacctctccggcattatcccaaagattcaagcttcgggagcttcttcgttttccaacaaccctttcctctgcggtgatcctcttgaaacaccgtgcaatgctctcagaaccggatcaagatcaagaaaaaccaaagctctaagcacctctgttatcattgttatcatcgctgctgctgcgatcttggttggtatctgtctagtgcttgtcttgaaccttagagctcgtaaaagacggaaaaagcgtgaagaagaaatagtcacttttgataccacaacacccactcaggcttcaacggaatctggtaatggtggtgtaacatttgggaaacttgttctattcagcaagagtttgccttcaaaatatgaagattgggaggcaggtacgaaagcattgctcgacaaggataacattatcggtattggatcaattggagcggtttatagagcatctttcgaaggcggggtttccatcgcagtgaaaaagctcgagactctaggtagaatcagaaaccaagaagagtttgagcaagaaataggaaggcttggaagtttaagtcacccgaatcttgcttcttttcaaggttactacttttcctccacaatgcagttaattctttctgaatttgtcacaaacggaagcttgtacgataatctacacccgagagtctcccatagaactagcagtagcagcagcagccatggaaacaccgagttaaattggcatagaagatttcaaatagcagtaggaaccgcaaaggcgctttcttttcttcacaacgattgtaaacccgcgattcttcatctcaatgtaaagtctaccaacatactccttgatgaaagatacgaggcaaagctatcagattacggtttggaaaagtttcttccggttttgaacagctccggtttgactaagttccacaatgcggttggatacatagctccagagctagctcagagtttgagagtgagtgacaaatgtgatgtttatagctatggtgtggttcttcttgagcttgttacaggtagaaaaccagtggagtcgccgtctgaaaacgaggttgtgatcttaagggatcatgtgaggaatttgttggagacaggttcggcttctgattgttttgacagaagattgagagggtttgaagagaatgagctgattcaagtgatgaaattaggtttgatttgcacaacagagaatccattaaagagaccgagcattgcagaggttgtgcaggttcttgaactgatcagaaatggaatggaatcatgaaaagaactcgtttatttttgcagagaaattgtgtagtgtttactgttaagttcattcatttgtgattcttttgtctgttttgttgctaaaattggtaaaagttccattaaccgggtcttctctaaccttaaaccgattctggattgatattatccggtttactgatataaagagtctgattcagaataaaccaaataatcaaattgtaatcaattttgagatttacatgtttcacaaacttttctaatgcggttcataactactggcacatctctctcagacaaattactgaaacagatacggaaccatcctggttcgatacagtgacaacaagatcctggtatgacattgatcttgccaatgttcaagagcttgttccacagctcaatctcgcctttttcgctgtaagatgaaatcaatcctcgcatatcagcccaacagtagaaccctccattgcttcttgtgcactcgatccctaactctttcaacccctccacgagctccgtgtagatactctgcaatctctgcctgttggttttcacaaatctctgaacattttttggattggagattgcggatatcagcaaatgttgggttggagatgagacaggtgagagcgtcgtgagctttcttgaagcggataaaacactctcgttgaacgagtagatagcagcggatctaagcccccggaaagacaagtctttcgaaaggtcatacacgatatgaactctttccctgtcgatattctcttccgtgtcaactatttcagccatgctaacaaactctccttcttctccgtggactgacccagcaaagatttcgtttgatataatatgaatgttcctctcacgggcaaagtccaaaagcgcatagagattctctctgctcagtaggcttcccatgggatttgaaggattcgagattataatgccgcggattcttacacctcgtttcttagcttgatagaatgctcgatcaagcacgaccatcgacatattgaaattatccgcacttctacatggaacgtgtataatgtcaactcctgttcgccatttaacatccctatcatatctacacaaagaatgtccccattcagtattctctcgtagcattagcatcgggtccaaacagtatagacataaagttttacccgggagaacacggagttggaacaaggaaggcgtttcccgaatcagctaagcagaaggaaagaatctcaatagcagatgatgcaccagaagttaacactaactgtgatggatcaaaagtcaccgagtttttggtagcttcagtcataaatcctgccacagcctatcacataatccagaaaacttctctcaagaacacatacaaatccccaaacaaaacactccagtgaataagattaatgaaacaaaagtttagaactttagagtaagagatagcaaaccattttcagttccaaaagtccatcagaaggctcataagaagcaatgccactaatactcaatccatctgaaattgcttcttttggattctctaaaacccaatcatccaaactcaactattataagaagaaagagatcagtcaaatccaggaaataatcacacaaaaagtttcaattttttttgaagaaatttagatacaaaaccttgttgttttgagctaaaccaagttggataactccgtccgggttacccaactcatcatacggatcatcctcgacccgtttttgaccaacgtagtaaggcgaagaatctccacctttgagtacacaattaacccgacccgaaaccgaaacagctccaccggaatttctcggcgagaggagaatacgagagagagaacgaggtaaaccagtaagctccgtgagatgaccagcggattgtgaccgggtgggatccggtaaacccgaattaggagaagaagaagaagaagctgaggagttttgttcaccggaattatctgattcgtcgtttttacgatttcgttttaggtaaaactgaagaaagtagaagaaagcacaaggaatcacagagcctaagaataaaccaccacgaccttgtaccacaccttgtaacggaacaataaccctcatcccggtggttctacctccgccgacgttaccggaattcttatcggaatcggaattggagctccggctccggtttggttcggtacgggtcattgtagtgaactcatgtttttaggtaaataaatattttagtgtttgaaatcaaaatcggagccactttgaaggttttttaacgggtcgggttaacggataattgagtccgacggcgaagagatttgaaagagaaagagaagagttttgatttttaggttaaaagaaaataaaattcgaatttgtttgtttttgctttttggatttttgtttaatttctgatctgttttatttcgtacgctcgtttttgggtcgttgagattttttggagggagagaggagatgtaaattactatattacccttttcttttttaacctgggtccctgaagtttttggattctctggaaacttttctgtctttttctataaaagtttaaaaacttgaaacaaattatagtgaatgtgagtgattattttaatttgtatgtatatatgtttttttcgggatatgtaattggatttatatgtaagaaaataggttatttgtatgttttagatgtgcggtccaaatggagagttttgattgaattgatggtggatgagtgaaatattgagtagtattgaatctgaatctaaaaacaatttgagtatattcctgacattgtaaacaaatctttggtctttgtgttttgttatttttgtacatatgagctggacacttgaatattttagtttctaattaaaacttaggaaaattataagggatatacccagaagaatgaagatttaagtatttatgcatgcttttttcttaattaggtgggtaaagagagagtggtgtttttatatttttacccttgtcagatagaaaaagttggaaatgaatgagaagaaaaaaagatgaaaaagttcaacgtctatgataactcataagttaccggtgataaacgaattaacatgataaataaataaactaatacataaattaatattttacaagaatagataattgttaatcttttagttaccgaatattaacatgatataaaaataataatttgttatgtataatagttatctataatgtagcatacaatttaccactttaaaagacatgttagggtgataactaaattgttaatgtataagttaacaataataattaaattaccaaaataaataaatgtgttattagataatacatattatataataccagatttaacacaagaaccatgttttcgacgtaagatgaatagtgctttcaccttgctaatgttttttaaagacatgtttatcatactaatcaaataattaactacctaaacttgttaccgccaaaactcattttttgttgttggatataaattttttatcttaatatttttcttgttaacgttatatgagacgaagggtatttttgacattagtatgagtcagatgaaagagaactaaataacaaatcttcatgattagattttttatttttcattcttctgagtatatatattaaattcaccctaaaacttatatagaatgataattacttgttcatagtaatggtgtaatgtgaggcttggaaaaattaggacacaaaattaaggaaagggaatgttatgttgaatatgaaaattcttgatattgataaccaaacaattagttctaccagaatcttgagaaaatttagttttcaagagtttaacaaaactagtaaatatgaaataactagctatacagatagtattattctacacatatcaattgttttatagtcaaatatttatataatgccgataaaagaaatctatatcgaataatgtccctataattcttccaaattgcataagccacaaaaacatttgatatataatgacaattattttcgtgaaagaaatatataaaaaaaatttgaattagttggcattggaaaatgagagacagaagttgataaagtagaccaaatggatttggcttagtttgtgtttcaacctcaagttgagattggctgcggtttttagtcgttatatgtaaaacatgaatcgtcatgtggggctcttcacttgtgctttcgttttaatacatttcttaaaataatcacaaccacatgtttataacatctaacccctattatgtgttaagtttaagagcatgctcaatggtgatttctaaccatagtttctaatctactaaagtaataataaaataaaaaataatattatttaatttgaaaagtttcttaaaatagttagaagagtcttcaaaatctcttgaattagaaattctcttacctttccttagaaactatcttaattaaataatattatttattattttattattattattataggttagaaactttgcttagaaatcactactagatttaagaaactcaagattgcaagagactaaatcatataacttctggtctccaaagtacttgggcctgggattatataaaaaagatatgtttaagttgggcctgagatcagtattatctagatgtacttgttgatttctacaatttccataacaatttaccaaaatccatttgggccttgaaatatatatctgggcctcttggaagattataaataacagaagttaattctgctgaaccagaccatgttacaaacgtttttagtttcaatttctttagaaactattaaaactgcaaccaaaaaccctcaattgaaacaaaattataaagttcaattattcatctttaaactgaagtatggtttaaatttatttatttagacttaatgttatttttagcttaaaatttaattctactactttaataatcaagaatttttttaatattaaatttaatatgtattcatatttaaaaaatcgtgttaacgaaattaaaaaaaaaaaaaggtgaacaagcacagaaaatatagaaaaccagtacattttcaccttatttaagaaattttgcagataaaaacaaaaatctaatttttctcctaatcaatttttaccaaatttggatcctaaattcctaaatttagtcattaatacatttactaatcaattaattaaataaggtataagaaaatctaaaacataaatctttacaacaataaaattaagtccgtcactttgccttccactgagtaaatatcaattctttctctttctctctctccgacggagaagaagtctctccgactgtgtcaaatgatgagccatggtggtggcggcggcgtaagtaacggaggaggaggagacgctgaacgaatgctagctcaagcagagaagctactcttaagcggagacttaaacggttcaaaaacctacgcgatccgcgcatgcgaagccgatcactcactcgtagaccacgccgaactaatcctcgccgtcgctgacactctagtcgccggagaatcacgaatcagaggaacaacctccgatcttcccgactggtacgccgttctccgcctcgttcgtttaactcacaaccccgaactcgtcgcgactcagtacagtagactcgccgtgttgcttaacccgagtcggaatcggtatccgtattctgaacaagcttttaggttaatctctgatgcttggtatgttctctctgatccttctagaaagacattgtatgatagagaattgcatctgagtcaatttgggcaactcggtcaattagggtttcagcttttcaatcaaacgccacaatctcagtctcagtctcctcaacatcatcagcaacaatctcaatcgcctcaacatcctaaccagaaccaaacagtgtcgtttcagaatcagcagttaccatttcagcttcatcaaccacattttgctcaagctgttcagactcagtctcagtcacagcagcaaaggtctcaatttgatcagcagttattgcaggagcaacaacaagcatcttggaggcaacaggttggtcaagagcatagtagtggttcgagtggtgactggaaaagaccagtggaagaagtgaggttgattaatttgaacaatgcaactgaaagggttcaatctagtcgtcgttttgctgagccagagcggccgcctagtagatcctttgagggatcttctcataggactccttcaactgaattgacatgggcgtctaagcctactccagtgtctgagcctgtacgtcactctgagcttgtaccgtggcaatactctgagccggctaggcaatatcagttatctagtaggtctagtgaagctgctcaactctcgctgctgccttctgtttctgactcatctcatgcatctcagccaactcgctcgaatcagtcacatgcagtctctaaaccgcagcctgtttctaagccacatccgccattcccaatgtctcagccaccaccgacctctaacccatttccattgtctcagccaccatcgaactctaagccgtttccgatgtctcagtcatcgcaaaactctaagccattcccagtgtctcagtcatcacaaaagtctaagcctttgctggtttctcagtcatcacaaaggtcaaagccattgccggtctctcagtcattacaaaactctaacccattcccggtgtctcagccatcatcaaactctaagccatttcccgtgtctcagccacaacccgcttctaacccgttcccggtgtcccaaccaagaccaaattctcagccattctcgatgtctcaaccatcatcgactgctaggccttttccagcatctcagccaccagcggcctctaagtcattccctatctctcagccaccaacgacctctaagccatttgtgtctcagccacccaatacctctaagccaatgccggtatctcagccacctacaacctctaagccgttgccagtgtctcagccaccaccgacatttcaatcaacctgtccctctcagccacctgcagcctctagttctctctctccactgcctccagtcttcaattcaactcaatcattccagtcacctcctgtttctactactccctctgcagttccagaagcctcgactattccttctccacctgcccctgcgccagtggctcagccaactcacgtttttaaccaaaccccacctccagaacagactcccaagagcggggctgcaagaaccgattctgagccggaggtttcgagtttctggactacttgtccatactgctacgtgctttacgagtatcccatcatttacgaggaaagcgtgcttaaatgccaaactaagagctgcaggagagcttaccaggcagtgaaagttccttctccaccgccagttgccgaagaagatagttactattgctgttggggtttctatccaataggattctcagaagtggtgactaaaatcccagtcactggtttacatactaaaatcccagtgagtgatttacccaaatcagcacccaaaaaaccatctccaaaggtatactattatgacgacgaagaagaagatgatgattcatacattggttctgatcctagtgaggacgacgacgatgatgactggctgatgaatggtacaaaaaggaggaagaatgtgaagcagagtaaagctaaagcaacaaccaaaccaaaacgtcaaaaagtaattgaggttgattgagtaaaatcagtcgggtagggaacagaaaaagaacaacttcagtaaggctctctctgttcttcatttctggctctgttgttgtatttttagttgtagtagtttctgtttatgtagtgtaggcgtgtaggtgtagcgtaatgttgcttgcttccgcggtttccatgttctgcttaggctgggtctgatcggtctaagctattcgggttaagtttagaagtagtggctgtaacttgtaatgttttggtgcctctttttggattaatgtagtttctggaaaaacttgcagaagaatcgttttgatctgggatttgttctcttactgctagaaccaacgaaaagtgaataatccataaacatgttggacttaactggtccagttgatccacggcccaatattacaatccaacaaagtatagtttagttatggcttttttgagatgtagtggaacactgaaacaacaaaaggtgagattggagttttgacttggatttagtttggttcagaaattattaatcggttcagagttgccggtttagatctgaaccagaattgaatttatcaaattaaaaccatcttaatgatcgcatattattatcattcatgaattcgtcatcacctacaaatctgtgattctgtagttgcatgaagatcaatatggacaatggacactaacaaaatagatctttaatttatcatattaaaacaatgttaatgatcataaaaccatatcactaattcgtcatcactgatcacatacaaatctatgattctgtaggtgcatgaagatcaaaatggacatgcaaataagggaccccatttaccaaaatgtcagacctaatcctgaccacatttaatatattaattacttcactaacaattattgcaaaccattcaatggttttttgagtgtccacgttatcatctgcaattacactccttaattattgcgcgtcattactattaattaaatacaagaatcttacttaatctccttttcactatactaataaacctttacaaaagatttgtgttttctctttagtctaagtttaacttcaaattcaactaagctgtcacataatttgtatctgccgacttaaacttgatggctcgttttatttgtaatgaaaatatattaaaaaaaaaacatgtgccataataagtcgataacctcaaaactaagaattatttaaagtttttgaaataaaaatcagtcagtcataatattaatttcacaaataatgagttaataaagtttatttgattaaattatttatggtaattaactacaccttatcatgtatacaataaatacatgtcaatcttcttatattcaattaaatgtggaaaataaaatcaagaaaccttgacataactactcaaaataaatgatgaagagatgacattaacaattggtagcaacaacaatatactaataattgacacaaatcaataatcttcggtcttcgttcaaaaacagtaaatgtttggtccaagagaagaaatacagtttggtccatcaatgctgcacgagctaagcaaatattcagctaagatccgaaatctgaactctagctgtgttaagtactctttgttttaaaatatacttcctacgttctaaattaagtgtcattttacatatatactaaattttgttttaaaataaatgttgttttatatttgtaatgccgacttttgatcaaagttacaactgaatctattgatttagtgaattgacggttattttttgtatattgataaaaagtaaaaaaaaaatgtttcttctctccgttttaattaatttatcattttaccacttaaattttgtctcgttgtcattttagatctttaaggcaaatgtttggtaaaaattccagttttttcctcaaagttttgatatcttgaccaattaaaacatttagagaatatattgagtaaaaataaaataaaatttaattattttcttaattgatgtgcaaaaaccttaaaagacaaatactttaaagcagaggaagtatttgttttcttaatattctatgtattatatcaaaaccttatatggcacttattaataaatggtgagagtatggtgttttagataaaacacacacactttaagaaatttatcttttctttaacaactatcatttaatacttgattaaagaaaattcaattaattatataaaagactgcaaaatacaaatatccattaaaaacaaatatatttacagttaacatagaaatctgtaaaacatcatatatataatgaaaaacagaatctctaaagtatcatattatactataataaaacagatggagtattttttgaccagaaaaaaaaactttaaattttgtatatatcttatatatgtaattgaatactgcttggaaattcaagtgaagagtcaataaccaaaataaaatccatttcaacattttgtggagaaattttttacaacagtaagaagggaaatgacttgattagtatatataaatgatatgagataatcttgttattaacctttgagttggaaccatgaaacttaacatagtattagattctgaacaacatatgttgtcttgtttccggtcgaaaaaattgccgaccatcctactaattgatggtccaatagaattttcaattccgttgagatagataggatagtattatcaaaaatttcataagaatttgtaacatatccatttgtatgaatgtttaagtgtaaacatctgtatatatttttatatgaaacccatggattaagaattattgtgaagctgaaatttattggagttgaaaacttaggtggtgtgtaatgaaggtgagatgtatatgttcaagcacatttaaaacatacgttcccattcttatttgacgtgattattaaatggccactaaatgaacagcgcaaagtttaatttaatagtattattactatcatctttaatttaatcccaactactcatattttgtggagattttagtttcttcgagatcgatcactaacctatcatcacatctgtccaattaaagaggagaagaaacaaatcttggaggcaagtataaagagcctcacaagccagaaagtcacaacactacaagaaaaatcaaaccaaattaaaagtactcatagatatcaaattccaatggattgtgttccttcattgtttatgcctgattcaacctacgaagatggattactattttctgattcttttcttctttctccgtttatatcataccaaaacaatgatgttttccattcgatcacaaacaaaattggtggaagcaataagaaacgaagtttgtgtgatataacatatggtgcgaatgaagccaacaaaaatgatgatgatcgagagagcaagaagatgaaacatagagacattgaaaggcaaagaagacaagaagtttcatctcttttcaaaagactaagaactctcttgccatttcaatatatccaggtaagttatctagtgggagatatttcattatgattagcttgagaaatattttatatttttatctctatatatagtccttaattacatactaatttacaaaaccatttcatttgttaaagtgcaagcgagcagttttctttccattgaaaaggaaagtatatagagaaccttagttttgaaagcttttactaactattcgatcattcatgctttcgtatatacttttaaaacaatttttttacataattaaatctttcgtatatatattgtggtaccactttatacatagaattagaaactcttacacattcgtattaatatctaaaatatataaattgaaattttgacaaatagttttttttttcaacgtagtgtaatactcgaattttggataccacatcaaggaaacatcttcttaaactgatgagttcattcttttttcttaacactagttaatatatccaagtacattcttgaatcaaataattgctagttagttgttctaagcatgaccatatcatttaacatacagggtaaacgctcgacatcagatcacatcgtgcaggcagtgaactacatcaaagacttacaaatcaaaatcaaagaactcaacgaaaagagaaatcgggtaaaaaaagtcatatcggccacaactactactcattcagctatagaggaatgcaccagtagtttatcatcatcagcagcatcaacactatcatcaagctgctcatgtgtaggagacaaacacattactgttgtggtcacaccttgtttagttggtgttgagatcatcataagttgttgtctcggacgaaacaagtcttgtctctcgagtgttcttcaaatgttagctcaagaacaaaggttcagtgtagttagttgcctctcagctagacggcaacagagattcatgcacaccattgtttcgcaggtaaaattgttactaaaaatataaagagaaaaggttacaagaatttacaaacttttgggtctatcatagttgctaatatcagtttttagttcacataccattttatttgctaatttctatacaaattataatctgtttgtaaactacttttgtggttatcaaaaatacaatgaatatacttacctgaaattagaattagataaataaattactaattttctaaaaaaaagttttagtgtttgatcttttcttgccttaattttctaaaaacaaaattgacactaatcatcatttcatttcaaattttcaggtggaggatggcaaacagatcaatattttggagcttaaggataaaataatgactatgtagccccatgtacaagaagaaaattagttactatgacaaatgaaaatattacgtggtttgaaattggaattttactgaatttcaatgtatgcattatttgagttgttagatactaagatcatgctattttagtgtatcggcttacttctgagtgcttagattaatgttacaaactaatgcttgtttttcatttttttttttgtaaaataaagtttgtttttcttggcattctaattatgatatacttcattttaattactattattaaatagaaaatatatgatcgttacaagggtgtatatatagaatctctaaaatatggataaaacatctccaaacatatgcaagtccaatcttagtaaaaagcttaggaaaagtggtaattacaagaaacatgagagattcttgactggctagttggagatatggaaatgataatcaattagtcatttgctcaataatttctttgggattaaaataccctattggacaacaatttttccattaacattcctttaaaaatcggtcacaagtgatttttttgatagatataaaaattgggaccttgctaaacttgtaacaaaatcatatcttaacatgttaggtacgttcatttttgaaatttgaatgaataattaaaaaaatataatttgtagctttctttagatatcatcatattcttcaatagatttataagttttaggagaatgtcgacattatcctagttcgaaaattggttgtggagaatagtctaattggtctttggtccgaatacgatacgtggtgtcaaaacatattccctctcataatataacaaaagaaaagaagcaatctcattattctgccagtgattaataaatgaagtgatatgttatcaactagacaccttttgttataaatttgaccaaaacaaaaaaaatgaaagaaaaatatatgaagacattagaaagtaaaactaactaataaaataattagaatgcgaagggaggcacagaccaaaacaaacatgaacgcacgtccattacttacttgttcatactcttctttcatagtgtttctcacgttgaaaccaattttttcgcctttcatttcagggaaatttttttaagccattgtattcattatatatatgagatcttatgcattagtaagacttggctttacagagagataataagagtaggcgccctcaagaaaacagagtaaaaatggatcaaaatttgtatcgcaagtgcctggttattttatcgatgatggcaatgatcggcacatcaatggctacatatgccgggaccccatggcgtacagcctcagccactttttacggtgacgacaccggcagcgcaactatgggtaaagtccatatacttctacattgtattgtatgtagaagtagaacacaaactatatatgactcgattccatattatttgaaacgattgtttgtttgcatttctatgttttaatgtactaatcatatatcataacataaaaatgcaaacaagatgaaacaattatggcttatttataaatacatgaatctttaatttcgaagatcattaaaatgtactgacaatttttaacatgaccatgtatatcgatcaggtggggcttgtggctatggtaacatgtatgacagcggctacggggtagccacgactgcgctgagcacagccctgttcaacgagggttatgcatgcggtcaatgtttccagttaaagtgtgtgtcgtcgcctaactgctactacgggtcaccagccaccgtggtaactgcaaccaacatatgtccaccaaattatggccaagcatccaacaatggtggatggtgtaatccgccacgagtccattttgatttgactaaaccagcttttatgaagatcgctaactggaaggctggtatcatccccgtctcatatcgcaggtaatattcacatttcattagagcattacaattatagaggtagattgaaaacgtaaagaaatggtttatcttaaccatagtgaaattatatatatttatagtcaaatattttgaatgatatcttgtttgaatgcaccatttgcaaatgctaaaatatgattatgtcgatatatatatgcagagtggcatgtaagaagatcggaggaataaggttcaaatttgaaggaaatggatattggctacttgtgtacgtgatgaacgtaggtggtccaggtgacatcaagaccatggccgttaaaggtagccgcacagggtggatcaacatgagccataactggggagcttcgtaccaagccttttcttctctctacggtcagtctctctcgttccggctcacctcttacaccactcgtcagaccatttacgcttataatgctgctccggcaagctggagcgcgggcaagacctaccagagcaaggctaattttaactaatttaggtcatattcaattccgagaaaccggtttatttgaatatacggttttgccatttgttgttgagtccgatcgatcgagaggttgatcctttttttctaatgaataactccctttggttatatggtagtcattaattcttgtatatccatcattgggttgaggaaaatttgttgatttttatgtgtgtttaaaatttttgaattatcttctcattcatatattagcatcaaaatgattgatgggatcattggtactttttttcttatcagaaaatgacttttctaattcaagagttatcaataaatatgacataacgattagacgatatgatcatgattcgccaatgtatgatactcacttcagtttaatataaagatcgtttgacaaattttgatgcgaattaagagagtttgtatacaataatagtacattcttagaaaataattgctgttttataattctgatctatttaatacttaaaattaaatttgactagagtaaaaatgaaaaatttgtaaaagaacgttatacacaaacattgaaacgtcagttatttaaaaaatagaaaattatatattctataaaacgtacactttactcaaaacaatctcacgccgcctacagtttcataccccaagaaatcatatggagtagcataaaaactatatacatatatacataaatatatctatcaaataaaagcaaacctgtcccttcaatccaaagccttcaccaagctctaaaaagaaaagagaaactcatttctcatgatcgactcttcctctacacttcttcatcgcatcttctcatcacctcaacattcaaacgtgaacaattactccaccaatatcgaaaatggtaacactaacactctatcctccctctattcaactaataataatcgtattattcctcttccttccctctcatctagagggttcgacttctactactactactcaagaagctctcaatgaatcctcaaggcttcttgatctcattctaagagattacactctcaacttcttcaagaaccaacattattctatcaagaccggtgttattcggcgtgttcatctcccgtctgactactccggcataaaacttgacgccgttaggttccggtgtgggagtctccgacgatacggagcaaaaatcgaagaattcaatattggcgttggagctattcttgagccgtgtggtgaacgtcttttggttgtgagacaaagcttgggatcaaagtggtccgatatatattacaaaaactatgatctctccggttatagacttgtgtctccggttctagggctcttagcttataacgcattaaacgatgttgttttagggaataacgtgagtagctcttatcagataagtctcctcctagcccgtactaaagatccatccaacgttgattttgggaacgtttctggaccgtcggtggtagagagaacgttcttgaataagccaatgtgcgctacttttgaacttgatggaaaagtaacgcttgccgccgaagtgaagccgtttgtgtgcgccgttaaaaccaatggacattttggtttagtggtgacggatgatccaaaatcgaatggtggaggagaaaaggagatgaagaaggagaagatcggacggtggaggaaggttgttggagggcttgttgggtctgtgacggtgggggtggtgcttttagggctggtggtggcggctgctgtagtgacggcaaagaaaaggagaagaagggcaaaaagggaagaaatggagagaaaagcttatgaagaagaagcttttagagtagtgtcaatggtggggcattctagggctttcgttgcttctgctacaaggacttctccaggtttcatggaatatgagtttgttcctaattaattaattatatttacgtgtgattccgtttttgtggattgttttcttttttttttcttttgtaaaaacggttttaatttatgttaaaatgcatgttgttgggggttttgggacatatatatatatttcgttggtgacaagtaaggtacgtatggtgatgattttttctttctttcacggtgatgaatttacaaggtaacaccgctagtggcctagtagtaagtagtaactattaaagaaaatcaaatgagcaaagttacattcaaagtcattgataaacaataaaacatggtcattttttacaccaaaaaaaacaacatgatcgttgcctacacgttaattaacgaggcatcaagaattataatttgatgaaatatgccgtctggcgtcttcataagaatacaatatgtttgatgaaaatctacctctaatcaaatggtagtttttttttttttttgaggagtcacatagctaggaaacgttttatgctagtaatatcacacacggaaacaattacgaacccatgtgtacaagtgtttaggctttgagaccttaatgaagtgcccaatgagaattatttttaggtccaccaaactcacaatattatatggcccgtacattaaatcactaaaacttagtatcgtgtcactaatagtatctcattgttctctgattaatggccgcattattataagtttttttttgtgtcaaaagcattattataagttgagaagtcgttttcataggaccacaaattgtttcagatgtgagatgtcttaaatcttaggcttaagagaacgacaattctgtccctcttttctttgttcgaccaactctgtctttgtccctctttattttgtttctttcatttttctatacgaacgaatatttttgatgtcattgcgtaaaacaaaagggaatttgtacataactacataaaaagggagaaatggaaagtagtttttccatattggtgaaggcgtgcattattctctttttcatttaataatatgcaaaatcctcttttaatttgtattttttatttttgtttatagaatatattatgtgctattattttagttttttttgtgtcatgtattattggcattattaaaaatatttgatctaatcctattacgatataaactacatgcaacatatgcaattacaacgaccaaggattccattgttatgatgaaatattattttagtttttgtaattaattgcagttttttttttgcaaaaacttaagactacttggatggctattggctccaatatgccaagccggaggaaaaccagaagatttaagaatatatttttttaaacgatgaagtggaaaaataatttttttaacgtccaacatgtatgttcagaagatttgtaattctgaacggaactattacatgacgttacaaaaaaccatgccacaagagtatccggacttaacaacgtttcacaacacatcaattttttttttttcagttttatggatatttctgaaattctagctaaaaactattagtatatattaaagttcatatatcaaactattgtttgtgtgctatattaacttcatatcaaactaggaaaaatatgaaagcatttttctatctatcaaataatactgcaattaaattatcagagtgttactgttttaaggttatatgactaagaaatggtgcatcaaagctgtatcacattttgtccaaaaaaatttaactgtatcacgtaattgagtatttaatattttaaaagaataactaattatatttgttctttaccaaaagaagaaaacaaatatactatatttctatactattaaatagtattatcaattaggtgttaatactatttgttaagtgggcgttagaggattaggtgtgtctaccggtcctgtcgttaaaggtgggaagatattttattttcctcattctttttcaaaatttcaactaatttttaagttcaagttgttgatcacttattaggtcttaaatcattgtcacgagaaggaaaataaaagtgtttttaatttttattttaagtttacattttatatacatacatatacacgtatttatgatttttgtaaagcacgttgttaacgtgcacttttttcataactttacgtcaaggtatatatcagcatattgtggaatcaaacatatatatagtagcagttttctagactaaagtaattcagattaattgtaaagataacaatcaccgtataaaacaatcaacgtccgtgtgtttgtattcacatatctgatgaaaattagtaattctagttttcagtctttcgattaacaatacaaaaataatactttcaatataatttgatctatgtaaaaataatatatggtatggccggaccagacccgtgtataacaaacattgttttaaatgtattttgtatacaaataagacaaaataatctataaacaaataatgtatatttttagaaaagaatggagtgaaaaacaattaaaggggaaagaaatcaggacagctttatataggttgatttcatctgacaattctctctctctctctttttctaatcatacgaacacaatctgcttcaagaattagggttttgatcagacacaaaaagtatctctctccggtcttgtgtcaaggttatgcaagaagcggcactaggtatgatgggagccaccgtaggcggagacggagacaccgcggtcgtggcggagcagaatagacagttgaaaggtgagatagcgacacatccgatgtatgagcaattattagccgcacacgtggcgtgtttaagagtagctactccaatagatcaacttccgatcattgaagctcagctttctcaatctcatcatcttctccgttcttacgcttccacggccgttggataccatcatgatcgtcacgagctcgataatttcttggtacgtttgaatataaatttattagttatattttaaaaaataatcttgtttggttaaattacttacaagttctgtttctatcttttttcatttgaaagtttttttttgatggtttctagtggactaactttgaatgaagttatgattactaaccaatctctgttgggaaattatgtttcaaacaaattatgtttttttcaatgattttcgtgttttactttttacaagatcgttgggagttttatcgatcgaagatgtaaaccttttgtcaatatatcaacaatttctataaattttataattactaattcctcttgtgggaagttatacttcaaacaaattatgtttttttccaatgatttaagttattggtatttttttacctgatttttgtgaagaagtggttttgttcaactttcatggaaatttatgtatcttcacacgaatgttcaaatgtataatacacacacatagatgtagatatggttttttgtatagttaggtgctaaatttcacatagagtgagtcaatgttaaatgtcattttgtaattaaattgaaattctatttaaactttgaatattatcatgttagttacgattgattttctactccgacctaaaatttgcaattgcattaaagttggaattgatattgcaactataattttggaattagcttgtgaaatgttccaaaaaaattcggttttatttatatttatttaagttaggtagaaaataggactatataatgatctaaccgctcaaaacacaccacaccagaagcacatatttatatgtgtgtatgcatatatgtggaaaatgtttacacattgaataattatatgaaatgtgagaggatatataaaacatttaacaattataattaattggaaacaggcacaatatgtaatggtgttgtgtagcttcaaagaacagctgcaacagcacgtgagggttcatgccgtcgaagctgttatggcttgccgtgaaattgagaacaaccttcattctcttacaggttcttttcttttccacttttttaatggtattttttataacccaattaaaaaacataacttcatgataattacatgttattatatataccacatagctatagaatcagaaagtacttaagatatatataattaaaattcctgttaaaaattagcgatagttaaaacaaataatagagttaggtatatctaaaggttcttgctgatcataccagatatgaacaactagtaaacatattaaatgtaaggtgttggaagatgatcaggaagagtatattatatgcccacacaataagaaatagagattttatttgtgcttatatagttatattatatgattagtctaaagatgaaatttcttaattatacgaaattattaaaaatatttatttttgcactgatgaccacgtaaagcgtgggatgtattgattaggattattgtatgcgtaagggcatatcaggcttgagcctaagtttgggcttgggcttgacgtctaaatcttgtagtttgactgttggagtaacatttcgtttaaaacgttctgtattcttgtaggagcaactttaggagaagggtcgggtgcgactatgtcggaggatgaggatgatcttccgatggatttctcgtcagataattccggcgttgattttagcggcggccacgatatgacgggatttggtccgttgctaccgactgaatcggaaagatcccttatggaaagagtcagacaagaactcaaactagaactcaaacaggtataattaactaatatgttatgattcacaatagtaatacagttattttactatttattttcttgttatgacgtttgtttatttttcggataagggttttaaatcgagaatcgaagatgtaagagaagagataatgaggaagagaagggctgggaaattgccaggagacacaactactgtcttgaaaaattggtggcaacaacattgcaaatggccttaccctacggtgagtactctctatattttacgaacaacaaatatagtttccgtctaattgtttgtttgggtttacgttttcatgaaataatatgataatcattataacatgaaacaacaaatgaagatagatatgtaaatgcaaagaaacaatcaagacccattttggttacactcaaagtcacaacatgcattttttttctattcttcaaacatactgaatttgttactaatactcaaaaacactatacatctctctcccgttcaatatttggcacaagccaaaaaggtggactacagtctaaagttgcatgctatagtggaaaagaaatagcctttgacgctatcagatctgcacatgcattggcctctcttcgttgaaactgaaactgattgtttttgttttctttcctaaaatgtcattaacaacaacaaatttataatgtaaaaaaatatgtgtcttgaacaggaagatgacaaggcaaaattggtggaggagacaggattgcagttgaagcaaatcaacaattggttcattaaccaacgcaagaggaattggcacaacaactctcactccctcacttccttgaagtccaagcgcaaacactaatctcttcttactatattagttactacctctacatatattcatactaattacactgctaagacatgcatgatacatacgtaattcatgttactgataataacgaggtgtgatcattaatatcatgtacttacttagcttattagatccaccgactactatatgatttgtgcgttgcgtgattactggttgttactagattgtaattcattttgtttgtattgtgcattcaaatttatctttttggtaagaacactgattttgtaacgtgttttccgtggatgactagaccatcatttggaaatataaagtaatgatgccgacaaaaaaggcagtgttttataaaatataagccatatcataatatctttggaccgatcaatgaaagaaatcgtccataaaaatggattagtttaattccagtttagattattggtattctcaaaaactaattaacgtatagttttctagttctttatttgataccaagatttgtgtaacttaatattttcaaacgagtttacaaacacaactagaccgagaaatagatatatgatgtattcattaaaaaagaaaaaatagctcttgagattgagaacttgggatcttactatcttagaaaagtcaccacatgccgccatcatttgtccactacgattcagacagaagatccgatctgtttatatatatatatataaaagtaaagacattactttatgccttatggtaacccccgattactataacattaaactactaattaatttgacaaaagaagttggactgactgcttaataaatgaatgttagtgacatacgtatatattttcgataacgtgtatggtatttaagggcagggggatttgtacatttggagttttatatgcttaatatatcaaatgttgtatagatccagatctttggtttaaacctcattagtttcgatgtcaaatcaattacaatatatatagaaactttgcaattacaatatttagtaccaaaaatcggtggaattatgtacatatgaatatgatataaatcactacattaatttgtaattgagatgtatctgtatatttattgaaatgatactatgtttaaagggttaccgattcgttaacgggttcttttgctaagttagctctttgatctcataagattcggatgcttaatataatatacgcatttatagtcgataattgtgaattgtaaattcaaaacagtaacgtgttttaagtgtttttttctttttcttcgaactttttaattttcactattaaaaaatagtatgagtagtagttgaccagaaaaagggtggtaaaaagaaaaaaaagagattctttaattaaaattgcaacgaataatacatattttaaattcagacacccaatgaagtggaatctcctttgtgtttaactaataatttctcacgccaccgctttcacagatctctgtctaaaattcagacaacaataaactattttaaacacacaaaaccactacgaaacacaataattcatgtttagggtgatctgtcacatattatattcatatattgaaataattttttgttattcctactaacacatttttttcaatgacatttccacgaaataaaatttataaagtcttcttatatttactgaataaaagttctacattatgctattaaaagtgtataaagtaacaacaaatttatacataataacaagttttcttataaaaatattaatagcatttttttttatccatagaactatttttatcatataattttaaaaacgggataacttgtttattttatgttaaatttaagttaactagttgtataagtactaatgaaaacattttcttaaattcaataacaaaaatttatcactactccaattatctacacatgttttgcttaatttttggtaatgtcacctaaatttaacaatttcctaaaatattcatgaaaaaaaactcatgggtcacaaatctcaaataagaaacgatgggtggtcaaaagaaaaaaactaaaaagattattgcttccccgagaaattgggataaaaagaagcaacaccgatcacaacgtctccctataccatctccttcagatccacacactctctcttatatctctccggcgaaaactttccgatcaccgacaaaaaaaaaaaatggttgcagacgcaaacggttcatcatcaagctcatttaacttcctaatctacggtaaaaccggatggatcggtggtttactcggtaaactctgcgaagctcaaggaatcacttacacttacggctccggtcgtcttcaagatcgtcaatcgatcgtcgccgacatcgaatccgtgaaacctagccacgtgttcaacgctgctggagtcaccggtcgtcctaatgttgattggtgcgaatctcacaaagttgagacgattcgtactaatgtcgccggaaccctaactctcgctgacatttgcagagagaaaggacttgttctgatcaattacgctacgggttgtatatttgagtatgattcgggtcatcctctcgggtcgggtattggattcaaggaggaggatactcctaatttcaccggatctttctactctaaaaccaaagctatggtgagtaactttttacattttcaatccttttatttatgaataacttcagatttgatctgtatctttagtttcttctttgagtaaaccccaaaatctaagattttttagtaaattaagttctgatttgtgtgaattgttgaggttttgacttttgaatgtaagattagctctcaaattgtttcagatgattgtagattagacttgtgagagcttcgttaatttacattttgacccctttagttacttaggacattattcagatttgacctgttgctaatttggtttcaatacttgtgattgcttaggtcttagatgttaaattagcaataaaaatgttccagatgaaatactttgaccagaacttattgattcatataatcattatcatgataagctcgtgtattgactgttggaatctggttttgatcttggtgaatcattcaggtggaggagctgctcaagaactatgaaaatgtatgcacgctaagagtgcgaatgccgatttcatcggatctaacaaacccgagaaacttcatcacgaagattgctcggtatgagaaagttgtggacatcccaaactcgatgacaatcctcgatgagcttctcccgatatcaatcgaaatggcgaagaggaacttaaccgggatctacaatttcactaacccgggtgttgtgagccacaacgagatcttggagatgtacagagactacattgacccgagttttacttggaagaacttcacattggaggaacaagctaaagtgattgtggcgccaaggagtaacaatgagcttgatgcaactaagttgaagactgagttccctgagttgatgtctatcaaagagtctctgatcaagttcgtgtttgagcccaacaagaagactgaagttaaagcttgaaatgtggttttgtaaggtaaacggttcttaaccccaaaaaaacaaatcaaatgaaagacaaaaaaagtttgggtttttaaaagaagtatcttttttttttttgggtttatgggctgaaaaaattgttgtgttttttgtattttatttttttgtttttctttttcccaatgttgttgtattgttaaaataaacttttgtttcattacaaataagaaatgtactattttgcattatttactcttgttaatcaaactatctttcatccagaggatcagaaagatcttagccttggcctaaaatattacatttgaaatctggatcggaacgtaaatatgataaacaaatgaaacattgccagagtttccagcatatgctgcattgttcagctagcgtttttggtaaacagatgaatgtcactactcacttcctcaaacttcagtttccattggtcccggatccagtttgaaacaccaaaattgacgatcattccattattaagatcaattgatttagttggaatctccttgaaatactacttttctttggattttgcaacacactttgcatcgttattgtaagagtgatgaaattcacctttcaaagccgaataacagagtatgtgtttgatatgatcatgcatgaatgtgactacaccatgtcattttttaatacttaaaatcacaatttgacataatctattcaaaaacttcttttaaacattctcagtctcaaaatatgagacaaaagaaaaaagaaaaaactcgacccacgcgcgtctattgggctcagttgtggattttgcttaaaagtggcctaaatccgtggactatagctggcgtttatgacgcaacgcgcaacgcgcgtgaggaccgcacgtgggattttcctgaaacactctcaggttgtgagaatttttttttgtttggtaataaaagttcagagagggttgtttgataaaaagaagggaatgcaaaacttctacatagtccaatagtctgatgaaattcacctttcaaagccgaattacagaatatgtgtttgatatgatcatgcatgcatgtgagtacaccatgtcatttttttatacttaaaatcacgatttcacataatctattcaaaagcttcttataaaacattctcagtctcaaaatatgagacaaaagaaaaaagaaaaaatgaccaataaatgataagaaatagaggattaatttacttataggaaacatacgagttttagttgaagtctagaccattagctaattccatttcttgttctagatttctagattggtgtgaggcaatagttaaaagatacaatacatatagggttacatgattttgtttttctcgaacataacattgtactctaacttagatctagatagatcaacacagtctgttctattcggtcgaattaattattgtcaaaagaatacaaatcatatgttaaaaggagacgaagaggaagagtgtacgtacctttgatttcttctctctttcatgtgtttaattaagctgaaccagtttcagggcaactctcctttggcaggtcatttataaatcgatcatcggaaattttcgatattcatatatgtatgtgtatatttggaagtaaaggacctgccaatggagaggcgccctaaaactagtgagtttacatgtttctcttcatctctataagatccatatgaaggcttgtgtctgtatttatatatatatgcgtgtgtggacatatacatatttaaagatagataaagaattttggacaaggaatattaggtttttccatgatgtctcttcataatgctggacatctaatttttgcagctttttatttatctgaacacatgaggtgagaataattatataaaaagatatgaatgttgaaaaaattggtgattactgtaaaattagtattatttgaaaggtgcaatgaatccggttttagtttgatttcaagttttagttatgcggtctaatttgatacaatttgagcttcagtttccagaatctgtttttggccaaatttgtcttagtagaaataattcgttacaaaaaggtaaaatcgatgcttctttattgtctagtttggtttcattaattttggttacggtattatttatatatttttgggttgtttttcgtaaaactaaacaccttggtacgttagaaataatcaaaattcaattccaaagtgttaagacatatttcagtctcgctactctaaaaagttttgtaaaagatgtgccatatagaccgatagcatatgccgttggatattctgttgtgccatacttactttaaatgaacaagaatagcttcgcagtcccaaataaaactatttctagaagtgaaaaacaaattaattggaatacttatcttgttactttatagagtctaaattcatagaaagaaaatcgatgaggaatatgttatataacccacgttacgagaacgttattttcattatataattgcatttttttatttagatttagattgtccggtaattatgtattaatatgatcaaaaaatttcgatataaacaatttcttgattaaagaacattatatattgtcgatttttgaacatacaccaagattcgaatggaaaagcaaaaaaaatgaccgagtttcattgaatcgagatcaaaattttgttgaaccgtgattaaaccaaacatcaagattatcgacgtgagtattaaaataactcacaacaaaaaaaaatatgggttgaaaaagatgatgaacacaaagttttacaaatctaattagtcgataagaatggtattgcgtcttctagaaaatgtatcttggtaggatgacctcccacgatcatatagatgcccttgagagagacatatacatatcctccaacagcacctattcccatttgacattcgacattttacacagggcgacgagatcgccacaatacgatctaacagacccgatgatgactgcatggtatcctttaaatgaaacattattttctaaaaagccatagtagatgtcatccgcgccaaatgggtgaactgaaaaatacctcaaatccgttaagatcatcaattggcactacatatatgatcctttcactgaagttataggaagggattgaaagtattttcatcaagggtttaaaatccaactgatgataaaactaaataaataagtaaatatatttattagttggaaataagttttaaactaatatatatttatcattttcattggaataacctaatagactattgatatccatttatcttgatgattaaaagcatgtcctaactatacataattagttggaaataagctataaataatataaatatttatcatttttatcaaagtaagcaagtagctagttacattcagtttattgagaaaattaagatcgttacctcatatttttgctgaatatcaatttcataagtgaattaaatataattttcttgataatacaccctccgaacatttttgtagtataacaacaaatagattttttttttttttttgctgaatactattgttcaaatggacattccaagacacatagcagttaagactttaaatctaatttaaattaaaatgtcgatatatgtcaccaacatttaattttggtatgatttaaggttttggttaatcatagatggtgaaacaattgaatatgttagtcttggtctggtggtacatgagattaaaatatctaatttatgtatatgtcaaagtcagataaacagatatatcaacataacccaattggctcagaaaacatgcagagtacacagttacagattcaacaagagaaccagaaatggatgtgcatggactaactggtatataaaagcagataccaaataaaaacttataaatttatatgagaatttattacaatacttcagaaaaagaatctcacaaaactggaatttccaacaaatggaggatttgatattcaccgtatatatacgaatatacatactatatgtattataaaacacatatacacccatatgaattagaacaacaaaaataatcaaatcaaagagaggatcgatcatacacactgttttattctattttgtaaaatttggtagcaaaactccaaaatcaatagagtgagttataagtacaacaagtagcaacgatggagccaatgcagatgacaagtgatggtagaagagtggcattcaggagatggcctcttcccaaatatcctcccaatgttatggttgcatctgccacaacacgagccaacgttccagcttctgttgagagcaatcctccgttgtacgttcctttcgatagccttgatgacattacccgcgataacaacgatagattcacacctaaagaaaccaaaaagggtcattataagtcagttgttcttttaaaacagaacgcagaggtttgtttagtttataccttcgagtacttcagcagcaacaaacattatgagaccagagattacgtattgaggtacagtgtatggaacaaacaaattgaaactgaagagaatcccaaggaagacgatgatctcagatgttagaaggatttgcctgtaagagacacaaattgcaaatcagtcaccaaaaaaatgaatgatatttttggtttggtttgagctcggattcaaaagattacctgtcttcaaacatattactgatgtaacttccgaccaaaatgttgattggtagcaccgtgaggccaaggcaggccaggaagatggcaacagagcttgttgtccaactaaagtagtatgaagtaatgacacttgattctgacagtaatatttccatcgaatatttgagcatgaagtagatcaacagttgaacctgccgaccagaaccgcacaacacagctttcagccagataaaactttaaaggaaatattccgagaactttttatcaagaattcatcaatgtcttaacagatgtttaagaaaagtgatgaatgataccttaacagatggagtaaggagtcggtatgcttctatgaaagaatttgcaggtttgtgagaatcttctggggattcttcactttcatcgcattcctcttcatcttctggcttgattcctgaagtgatcagcaacggcaatcgaagaccttcctcgactctgctactttctactctatctgtcgctgcatcaaccaagaatccattcaatactcgttaataattgttacagacagaaaagaaaaacagcttttactattaataatgacctgatgttgtttcatttcgattgtttttttctccatcctctgtgtcacgcaacggctctctgaatgaaatgcatagccataccaaatagaacagccaagccacagccataacccatcccggcaaagtagattggttaaatgtaaacttgtaaaacttgaatttgatttggagtaaaccggcaagcgcagggccacaagccattccaagagcacttgcactcacaaaacccgccgatgcctgcattcggattctcaaaggcacacaatcgctgatatatctccggttaacagctcttgctgatcccaacctgcaaatttaaagggttgaaatcagttgaggaaaaggtttcctctttgacacgatatataggaaaatgattgaacttttaactcacccacaacagacacggccgagtaaaagaagcgctatggaattggcatcatatgccaacgcatacatcaaatttccgataaagagtgcgatgctgctaaacacaagaggtttgaagtaagatttgttggaccatgcgctgaaataaaccgatgaaaatacttgagccacagccatagatccgatgacaacaccacaaaccgttgctgcagctccaaggctcatcgaatagtcatccgctgtagggacgatgatataagtgttgaccatgtacaaaaatgtgtttcctagattcaggagtaacgaattaaaatggtaagaccgctcatcgattgtatcctctgaaggagtcaccaaatcatcttgcatgataagagcatgttgtgccaagaagttgaggaaattcgtcgagaaggttaacttgtccaccgcgttatttattgcctcaaccactggatcctgtggagttttgaggaaaagattaggatttacaaagcctgtatagaggattctgatttgatatatttgaaatgtagtacctgagccggaagaacgggttggtcataaattgaataaaagcttccttcattttcttgaagctcatgaagattgcgggaaattgctccaacaacagctccaacaccctacaaattccatacacagaacatttaagattcctaacaagaagagcctacagatgaaaccagtgaaagggtggtaagaaaaattcatttaccacatgcttaaaaacttgttgaagctgagagtaagggtgattagcgcgggtcttcacgtaataatcagcgaatctatatccaaaccttttgtcgaatttcttaagtatcttgcgcagaccaatggcgttcaactcaacgaatttcaggagctgaagaaggtctcgtccaacatctctgtatgcttcacgtagctcgaaaattcttgatatgtcaggctgctcaagtatagcatcatgagattccctcaatttggctaatcgccctgaaagcaacccttgttgttccaacatgaaaaggacagttgtctcaatctgcaaacaatgattcactttcaatatctcgaacaacattttagaggagttccatctgatcatcagaatggtttatttcttaaatgtcttatctaattaagagaaacaatgacaaacactggactgagattactcgtatgtagccatatataacctcggagatgcacagaaaataacaattcagtgaggataatactcaaacaagatcatctcgacaattatctataacatacctgagtatcgagcatcctcgagaaatctttgagaacatggcgaggatgttgagatccgccttggatttgttcagcatattgcttcactttcttcttcatcaatttgtaattgatataatagctacaagggaattatcaaaacttcattaggaaaaaaaaatcagatgatcaaaagatatggctagaaccgagatgtcgtaagcaaatgcatacccactccattcttcgatttgtttccgctgcaagtatttcccaaaagccaccatcttttaatcgcagaaagcagagagcaaagtttagattaaagcctgagaagtgagaagaatgtggaaattagaacactttgatatcacgtatataaagattttgctctctgtcaacttgttgaaggaaatagagaatgggtctgtggcatacataatatgaatttaatacaaatacataataatagtatccaaagtcaatgacactccagaacagttttaaatccacattcaaagctcctcaatacttatagttacatgaagatttcaatccaccaatccacaataagccttactcaatggaagctaacaacatttcataaaactcgacctgatcattacacagacaatttcacattttgcaactaatgatcagacagtcacaaagagagcaacatagatagatttcaagagacataagcgataaagcagattcaagggattaacacaaaacctgttttagaaagagtcaaggacaaaagtacaaactgactcaagcacgaaaagatcaaagagcatctaaaaggaattatacctctaaatggatttttgaattgctgtgaatctgattagtgctcaagcacaattctaaaactacaattatagaagccaaaacaagaacgcaacacgttttataaaaatacttataagcaagtcagcgctacaagccatgtgcatagatgatataatcacgcaaaaccagtgaggacaatttaataccaaatcaaatcaaatccaaattcagcttatttctacttcacacaacacaaagcctcaagaacaagaacacaaagcttatttatactttaaaactcgtgcatttcaagtgaaaaagatgataaacaaataagccaaaagcagagatcttgatatataaaaataatacctgtatctatcctcgttcttcctagttcttcttcaatacacaaaagctgatcttgagatcttcttatacagattaaatctctgaaaaaaaatagattaaaataattacaaatagatcagaagacacgagcttagcatgaaggtaataaggcctacacaaaatattatataaatactagatcttagtggagtcaatgatatatgattgataaaaagaagcagccaagacaagttgctttagtagtcacaaaattgtttttttgccaattcagaaaattccacaacttgaaaaacaaatgaaaaacgccaaaaagttttcaactttttctaaaatggagttcaatcaaaaacctagattctcttcttttgtctactttcctttttattctcacaatcaacaacaaaaactcagtacctgaagagagaaacccagttgcaaaaatcgcaactttgtcttcttgagatttagatgaccatcaacgtaatgagcctgaaataaacaaaaaaaaaagagccttcctttatgaattaaataaacagagaatcaaacaccaaagatgggttttttaaagcttctctcaatcacaaaccctttgaatcttgtaagcgaggaaattggtaaaaaggtgaagaagaggagaatcaaaagacgactagtttgcttatagtagatcgcagactcttatcgcgagtaatgtgatcatttatcaatcgcatttactctcggacccaatcattgaggaaatatcaatcaaatcgtggatgctttaagtcctcaaattggcacgtttttgtaaaagggggtttttgcgtgattctataaaacttctatggggtgttttttggttaatgtgtaagttttggggtcaaagaggaataaattatttaagacggctgcatattaataaagaaaactactcatgtagcgttattatgatagggatattatacgtgttgttatagaattacacatgatctaattacgcacatgatccgaaatattattttattcttatgaaacatcctaaattatttacaacctccttaattttatgtgtataataagttgatagctactaatttataacgttattccgatagtgatattatacgtgttctaattacacatgatctaattaagcacataacccgaaatattatttgtttttgagaaaaatcctaaattatttacaacttccctaattttatatgtataataaatgaaagtcatggaatcgtattcaatttgccttcagtttattggtattgtaatggacatgtcatatgtgtaggtatacaatttgtatcgttgtttttttttattttatttttacataattacaaaagatagcgacacaattttagttggaaagtggaatatttaataatctggcagacatttttttcttattgcgtatgtgcgttagtaatttagtatgatgagaatgtggacaaaattataatgaaaaatagggttggacaaaaaaagttaccaagaataaagagaaaattatatacacatatttggccacctacaatacaatgcttttagtataagttacctaaaatattcacaaccgtgatttcacgtgatactcgtttttcaaaatatgaccaaagttgatactcgttaaatttgctaggccaatcatttcttttgtttccttatcaatttatacatgtattatagctattgatgcatatatgctactttcgtcatggtgctattacatgtgtattttgcatgtttctttttcaattagtgtgttgcatctaagtatgtaaccaaaaaaaattactggtgttaaaaataaatgaatacgtgtaaatctacaaagtactattgtgtactaattaatacccaatagtactttgtagatttgcaacactccactgagacagataatttaattggcagcacatacatatttccaaaattttatctagtaccaatagtaacttacttagtagtgtttaaatactcacttgatcaaactatagaaccaaaagtaacttaacgacactttaacaaaaaaaaaccgatattttatctgcagttatatgattatgtatggtgtcagtcagatattctcctgatttaatagaagtacacaaaataaagaatactatattttagttgtttaggtaaccgaatagctgttgcattcaagaatcacccattcacaatgtccatcactacggggttacttcttagtggttagaacatttaaatcttatcttttgatttgctaaggttctccgatcgcgaagaaaagaaaatgcttaagctagtggcgatatgtattcacgacatgtgtaacttcactttctagacagagataaacaaacaaaaaaaaaaactcgtttaattaatattttatataaaagtatcataacaaaagcaagtgcatttgtggacctgtgtaagaaagtattgagtagtacactatgacatgcaactctgtagaagctacatgaaatatctagaattttttttaaaacaatatatagaattagtgtatatcatcataatattgtttaaagttgtttagaaccaaacataaaaaagttataattaagtcaattgctgaaatggtgattgagattagtgttttttgctatgaatataatatcattaataaatgagatgtttaggtattaaagagagtttttacctacaaatttgttaccttggcaaaaaaagctttaaaacaaagtaacaaatgattttagtacaatatgagtgaacttactgcagctataagagcattaaccttcgaaaatgtttcctgtattttcttgaggggtgatgatagtgttggggattttctctgatcaatacatttgaagataatatgtggagatatttagattagtattacttaaaggctttggttacttataagaatcataagcaaattgcaagaaaactaatctaaaccggttaagagaaagaacaaactgtatgctattgagaaccgatctaaaccaggaaaaaacagagcataaccaagagaactaagtttcacttctcataaggaaaaccgaagatgtaataaggatcatttgcaattgcatgaagacggatataaacaaggtaaagaacagaaacataaccggatatttcatagtcaaaccggaatttgcatggtttacatacagaaacagaaacagaacagaagcctcctttgccagcttctcgttgctgcttccactaagtaattaacctttaagcctttaggtggaaggcaaaaggtattacatagtgaaaggagcaaaaagaagcttagagcaaagccaaaaggcttttcccctatatctatctaatcactttttaaacaaaattacacacaacttcatacattgttcgatattataccgcagaagagccagtctttttttttactcttacttggctgttcacgggttttcggagaaaccaccggactcgagtgtaccatttttaagatactttgacttgtagaagttcattttctttggggcaattatctttgttgctcccaagacacacttgtggtatgagaagtcttcgaatgtcccgtctattcttacaacctcgaagcaacaagaatctccgtgcttcgatttagcgacctataaaagaaacatggtcaggatctttatgtctttaaggattctgaaacatatgagccttgatttacccggattcctttgacgcctggtccaattttctcaacactgttggggtgcaactgcagaaccatcttcacaagtccttcgtccctctcattcaacagttcattgatctcgtaactaacaaagattaagccattgtaatttgcatcagccaaaaggaagaaagaatctttacggttttttgaacagtagaatcttacctgtggagaatgcgtttcaatgactgggaaagcaactcgatgtttttccatgtaaagatcgttctaagcagtgacataggaatccctttcccatcgagtaccttgatatctttcaggaatgcggaatgtagcaagccaaaaggctggaccgtggctttgtctgatttaggcgcagagtttgttctacgcatcgtctttgtactactcaaaaggtcatacacatctaccggtgtagtaaacccgtgaacctgatggcatgcataaagacacaaattagaccactgaagttatgtggtctaaacggatcaaaagatgtaaagttaatttacctttggcgaaatgatgatttcgaactgatctccagttccgaaaccaggaacttttccccaagctaaagcgtcgatagacccttgaagatcgtctctgacaccttccttagcagctttgagaaagcattgacttgggctctgcagagattaagcaagcactaagtatcaaatgaaatcctatataagctttgtataaccaaaagaaatgggattttgttacatactgagaagcatgcttgagtaaaaggtgcaggcgtggactcgacctgtctttgtttactccaacctttggcgtttaatgccacaaactctcccgtaacagagagactatcagctacgagaagcagatgctctcttagtatctccttaccagtatctgacaccgcggactccaaattctgcggtcacaaaaaaaaaacttcaaactttagaagctgcgagagagaccaagaaaatgttaaagaaaccgatactgactgctacgaaaatgctgcgtccagcatctattccataaactgagcagcattgtcggatattatcaggatggcttcggccccagtcaatcatatccatgatgggaaggcaggtttctaaaagagcggtccaacagtttcttttgccccgatctccatacattgtaaccttcaagtacagctcacccgccaaatgattcccattcctttttggcgcttttggtcggtcagtccacaaaatattcacctttttgatcccttgatcacctgcaaaaacagatgatagaactcataagaacgataataacaaaacaacgatctgttcagcttgctcgtctttatttttcatccggttttacctttgacaggagagtcaagaagaaaagggatcaaaacgagacgaatagcatccagttccaaaaccgagtgctttgaggcttcaactacagtcaccgtgatgcaaacgttatcatccttcattgcctgatcgtctgaagagcagtggtttctaatccacaacacataaatgtataacaaatcagtttctaatagacataaaagcgaaacaaaacatgtctgctacaaattcaagaatgttcttacgtgttttgtatatctaagtcaactatatcaagcttcagttctctgttcctgctcttgtactgctcgtttaaagatgaaacaacggattctgcgctcagttgtttccgcttcagtactttctgtgaaattaaagaagaggttcattagaatctgtacacatatatatatatgtttgtggctttatatgggtatgagtttatacctcagagatatgaaaatggcaaacccacgggcttaacggtactttcgtgttagaacttggagagaatctatgaaccaagaagacaataaacatttgttaagagaagcccttaaccaaaaagattcatatagacagttaaaagttaccaacattatcatagatgttgaaacgatctctgagaaactaagtttctccaagtggttcttgatctcaagtgacccgtattcgaacccgtgctttttctttgaaaggtattcagacaaatacaaagacattgtctgttctcgttgacctttctttgatccacactccaatacattctgtagaaagagataaaatctagttagagaaatgcaaacgacttaagtggaaatgattcaataaatcaagaagcgaagaataagaagaggaagaccttaagattcagaagcggcgaagtttcaagaaggctgattggctggtccagcgcgctgtaagctgcctcagataatgcacaagcagaaagtgagccaagtgcctcacctgtgatatcttcaacgggaccatcagtctcataagtaaactggactaactggtttccgaaagaatttctcacagtgccatcataagcagcgtatatgtcccgcatgaagaacattaatcttctgctcagtgtccccgggagatcagcattaccactgaatgaactgtcacgacttgtaactgaatgaacaaaagattccaatggattcagacccgttagaaacgagttctcaatgactccataaggaacatatgactcagtagtggtactgtcttttccctttgcgccacgaagtggactgttcgggtcattccaagcagcgcaagtcagttcacgcggaaacccaaaggacaaagaaactgctgaattctgcagaccgatacacatgctgtgctgaaccagcttcccgatattccctttgctgccggctttcgacatgatcaaaaaagagttggattgatcaccatacctatatgctagtgcctgaacatctctgtaagcatccttaaaagcactgactgcaagttcgcttaatgtagcggatttttgtctctcatagcagaatcgggccaaatccgatactgaatcctcttccttatcctccccattaactgcaaggaaatctctccaagattcaaccattagctgttgcttgttgcaaacttgctcagcttcccgcaacccgtatgatatctcttcagtcaagttttttcgagactgcagatcagaggaaaggtacaaatccgccaaggacacactcaaaccgcgcatcagcaaccactgagatagcatttcttgagcggaatagatgatatcaagaactttccctttgtcgtgtttgagcaatctctcgatgaaattcccttctccatctctgagccaagcagatccttcagagaaagacaaaagctcgccgttactcacaactacattattcagaggataagtgtagtcaaacccgggaggaaacagcattccgaatagctgcattcccgtccattgaggctcagtgctcgaaggagaagctttgataattgcaggcggaggaagctgaaatgggcaatacatttgaagctgctgcatctgagctcgattaagataacagttcttctcaacattgaccagataagccgccgtcaagctatcttgtcctaaagaaagcaagttccgaccattctgtctgttgataagctgcttatccaaagcaacaagctcatcaagctcgacctttgcttgaatggactgaggaacgtaaccgtggagacaatctccatcaaaatcaccacggaacggcaaacagcagatcgggttcaaggagacaacagaagtcgttgggaggattctaactgtcattgcaataagcgaatgctgatgaatcgaaggcggtctgttcatcagcacagtgtctccatccattaaactccggaatattttgtctccggtttggaggtcattgacttgaatagccaccaatctatctcctcttctcacatgcatctctttattgtccaacagtgtggggacaaaggaagtgacaagcctttctttattgcactggttgagatgctctgatacttgaagcctttttgcgatactctcgggtatgccaatctcgttgagcttcaaggacggatcaccaacaactactgtccggaatgtatgatcacttcttttaccgagcagcacgtctttcatgaaccttagaccgcaaagttttggtgtatcagacttcttctggtacggatttgcggaatctttactcgaagacacagtttccgaaaagagctgtgcaaaaaacaagaaatactactaaccttcacagaacagaaagaagagtttaaatctatcaggaaccactaacttactctggaatattgcatgcattccatcacacgagaactcaattcaagtgtgtttccctcaaagccgactagtttcttgtagatccgagtccgttcatccttcaaaaatgtgacagaaactcgaaaagataagagaaataccatagtatatgataacaaattatataaacaagcgtttttagcttacaaatattagccgagctccgttgaactgatgaactatttcggttacacggtaaccatttggtgtaacaggaaaagatgtcagaccaagagagttgaacatagggatatccttcttgatgagcctctgatcaatccctaataacagagcataaacctgcaaaaaggtgaaattttcagaaaactatatatagtaagaagtcatggagatggtacatttcactcttctatacctgtgcatgcgttattattcgccttgttggtttcaaacagctctcgtcgatattagagtcttgcggcaaaaaactccaatagtcaggaggcaatgttaacactccccgtttcttgagtttcatcagactctcttcgtttacttcaacaacgattccggatcgcctgaagacttctttagtagttaccctaaacttcattagaggataaccggtattcaactgatatataacaacaacaaaaaccgaaaattagtgttggaacaaagttttaaactgagaaaattagttgcaatcatatattcttacagtgcagtatctacatctctcaggctggtcttcggtaatctatatcaagcaaaaatgacattagtatatgtagttccaaaacacacaaaccaacaaaggatttggaaagactagtgaacctgaaactgcttttttcgaatgtatttacaccccggacagattttgtttaacaacgcagctacctccttgaggaaatacgggtttattatcgagtacgcgaagtttataaccccgaaatgccctaaaacagagagaaaagtagcaaactcagggaactaatcataaaatgagctaaaagattggaacaatatttgccaaaaccagattctttatgataccttcgcaaacttttcgatctttgctgccacaggttctgcagacagaatccggattcggtaatcctagccgagaatcagtcacctgattcggtgcttcaacctctagcacagacattttatcctataataaagtaccattacattaaatatttgctccatctactcataaacaaatcaagaagaataaataaggacaacacttactcgatcattgttgtttgaaatgctaaaacctatcgaggttagagttcccacgggaacctgaagctcctcacaatcgtcttccatgttgaagagtttcctacaagaaaaaaaaccatcagtaaggaaaatttagatacgtaagtaaaaacatcagtttttataagcaagttttagtgaccaattccaatgtgcagaatatgaaacaaaaccaatatttagcatttagacagacaaaaccaaaaaactcgctctgaccaatactaaccactgagaaacagacaacttcacaaactatctctgtgagtggccacttagaatctagcatatatccaaagaaaagagagaacatgttcagggaagaagattctagctcaaaaatatttgacgaacacacaaaatagttcaaactttgaacacacattattgaaaattaacacttacttctgtaacataaaacagagctaaaactcacggataaatcgtcgaaaagatcagtttctatctgtaccctctatcatcaaatctaatgtgcagcagaatatgaaacaaaaaccaatctttagcatttcattgaccagaacacaaaaaccaaagcaaactctctctgatcaaaaaattgaccaaagagaaacagacacttttgttaagggacaaaagtgttaccacaatcttcctctgtgactggcctatcaaaaacaagttatagattcgaaattgaatttactaatagaatctagcatgaacccaaaaaaataagagaatacatgttcagaaaaagaagaaagaaaaaaaactgcagaacatacacacaaaaaggttcaatctttgaacatacactattcatggattaaaaaaaaaaaaattcactgaccaaaaaaaaaaaaggacaaattttccaaatgttcttctaaaggactcacacaaacccttagtgcaaaaacattcgccgccttaagatgatctctaaacgaaagaaatcgatttctcataagaacatgcataaaccaaagtacttaacttttcacaatcatccaaagtaaacaaagttcatagaaacaaaatcggagttcaaagacaacgatcgatcaaatttaaacaaaagaaccgtgataaggaatcagacacagtgatcaatcaaaaaaaaaaagaactcaaattgtttcaaagagataaaaagaaaattaccgaaaaaggttttaaaaaaaaaaacgaaagaaaaaccagaagagaattgaggaagaacaacaatgtagttacttactcgtttcgtcgaacagagaatcctcactatgtaatgatccaattgaaacagtgcacagacaaaaacttctgatccttagctccgacggaagatgccggagaagaagttgaagaagagactctaaagaaagaacaaaaaaaaagagaggaaaaaaaaatcgaaatcggaggcttttgagaagccgccgtttgtattcccaaaggaaacgggaaaaagtgagaaagcagagaaaacgaaaaaaaaactcttctctaagtccaatggggactttggaatgtgagacaccaaaaaaaaaaaaaaaagaagaagaaagagtgtaaataccgaaactaccccttgacctgtacctctatttacctactttacgagtacaccttttaccttttggaaatctttttacttcctcggttgtattattttaattactttatgattttctgtttctgcgaattttaccttatttgtataaactctgaaactgggaagaaaagaaaaagttgaaatatccttccttaagtatattatattagctgtattagttttttacttttggcctaattttaaaactgacaaaaagttattagaataattaatactttttattagtttaatgtaatatttaaataaataaaaataagtgtataactaaattttcatcttagcaaaaaaaaaaaatcctagtggtttttatttctagcttgatttttggttcataactataatatgaatagcgggaaaaaaaaatataatttgaaccaaaaacaaattccatttcttttcttatatgattttgcgatttttctaaatactagttataatctctaaataatctaaaattacataattatacgaatttatttgtgaagtttgtgttagtatcaatcaaagtatgatatgtaaaataaaattttgttttacgtatagttgaggctataaatttgttatctttgattcgaaacatttatatttcgttaaaatatatttttgttcgataaaaaaattatgtgtaattaaaatatattttttgtttgaaaaacaattacaattagttagctgcttagacaattatcatataattttataagaggcgaaatgtgataaataactaaattaattgagacaaaaatagattaaaatttataagatctagaatcttatttgagagtatgtgaatgtccattaataaatcaagatatataagtgaaatcagtttttcttgtcggcgacgtgaaattagattcttgtttacgtgaagttcacgctttcgtttgtaaaacagttacatagttagtttagtggttatttattaaaacagtttaacatataattattactaaaatatactccttctatttaaaattagttgtcgtttaaggttttttgtcggcggcgtgaaattgaatttttgtttacgtgaagttcacgctttcgtttgtaaaacagttatatagttagtttagtggttagttattaaaatagttttgtttaaaattatttgtcgtttaagattttttgcagtgaaaataaaaaaaaacaattaaattttctactttacccttgttcaatatagtttctaaaaaaattattggtcaagacattaatactcacatttttattaaacatttgcattaaaaaactaaaaacgataattattgtgagattaaatttaagtgctaaaatgataattaaattaaaacaaaatgagtatttgttttgaaaaacatgtagtagaataaactagacttaaaaatgtcccagtaaattttcttattaaccttataaactgtaaacatttggggtagtctagttaataaaactatttataatgccagaaataaataaataaaattgtgagaaaaactattattgagtttgacaacttgatgacccattatgtaggctcacatcacctgactagacactagactactaaaaataaggatataataaattttcttcacctatgattgaacaaaaattaacagttgcttttcaaatccaagcatgtttagaataaaaatttcgtcgattaattcattactactatatgttaagttaacaatttgaaaataaggtttgtgttgattcgtgatctctcatttacagctttctcctgaagtcttcaaagaatcgtacaaaggtcgaagtgtgacgacagcagtcaaagaggggtacaactgtaaactcatcattttgtgtgcaatatattattcttaactcaaaattatacgtttctttgttcgcatttaaagttgcatgcattaaaacgtttggtttacgttaaaaataattaagctattggacgtttttgataatcattttttttcatttactacaattcatgcacgagtctggatttgttaattgtaacacggcaactacaatataacacatcatcatgaaagctacaaagtaaaaactctagttctcaacaagtaatgtaaccgtttgtaatacaagaaatctttgctttcatatctaaattttgtttcaaacatatcacttcaccaaacgggatcatacattcatacattaccaaaaaatttaacttcaacactaattttctttcaaagtggttaacttagaagactaacaatcgtaaacattagaatcggaaaagatttagacaaattcaatcttgatttcattcatatcttacttgagaaaagtcacaatacaaattaagatgcgtaatttctacgctgctttctttcctttttgcattggaacctgatcaacccatcaacatgaatcgacaattggtattcattattcgttgtattattattctttgattcctttatttttttgcctaatttgtcaacttctaaggtgcgttaatcaataccgaatttcaagcatttttgaatcatttaccgtttacactgattcatgaaagaaagacaaacagtacttgtattaactacgaaacaaaatttaaaccaagattgaaaagtaagtaaatttatacttcgaaaattgtggaagtaaaacaaaaaaaaaaaaaaccaagggtccgctttttgtaaagcgacctataattttccactagaatctcatgttctgatgttgtaggaagtaccttttttttagtttcaatatttttttctttttatcacaacttgtaataatgagattaagattctggttgcactattaaaataatgatgtatgtatctgtttctgactcatcgtatggtattgttccctaatccctatcaaataccactctctctgactatatatatgcatggcatttttatattcacatagataaggacatcatttttgtaatgtgtttatacatagactatgtcacaatttaaaaatggaaacaacttgaatttgcagatatggatcgaatatctccagtaagaaatctacattaacgagttttgcagaatgcagagtactgctatacattagggagatagaaaaatgtttgtgtcagttaatttttttgaaatatcgttgtaacttttagccaatcctctcatgtaaaataggcaaccgggtcgtgccattggcaataaaagttaacttcatgcatggtcctacttctgcgatacataaaactaaaaggattgctttaacgagtttgccaaatagccgcacgagacaaggaacttcgctttaataatttgtccgccgatgaaaaatgaataatcaaagaagttgttttcacttattaaaaagttttaaatatagtattagtattacacatcgtcattacttgaaagaaaacaaatactatagtattagtaacaatgtatttgaccctaccaaaataagaaaagtacaaatgtatttgattttatatacgagggaaacttgaagagtatcggattaatttcgattagttcatatctagtccacttaattaagggcatttcccttcaaatattttgtcttttaagttggttactcgcaacgtggttgcgtgaaggcagaaaacttacattgtcatatactgtctttacatatatgaaatcttaataagaaagcaaaaaagagattaaagtttttttttttgttgtcgaagattaaagtttttatatgcatggaaagctagctaatattttaaaagtcgctttatagggataagctttctgcaaatggatttttccgtgaaagttatacttaatcaaaaagatcatatccgtgagtcgaatacttaaataagaccacgtttgtcgttggtatagtgatccgtttgtgaccattggatcatagtcactggcaacaacaaaagaggaagagaaagtaaaaaaaacatcaatttttttttgtaaactttggaatgagactttcgcatgttagataaactaatgtggcgggattctttttccgtttattacaaataaaatatactcagaatattttctaaccaagaaaattacattgtatgattctactacatgcatctcgaccgattcatggtgatatcatatgattttactgcatgatctatcgatcttaaattcttaattaaactttatagctactactggaaaaaaaaaaagatcttaaccaataatgggatttttccggttatgaaaaaaaatatgatttttcttgacacgatagtacgaatacgatacgtcttgtttttgtgagcatggtatagtacatacaactctggtcaacataatatgggttacatacatcccattattgtctggaaataaaacagctttattatttataagtgttttcttttcggatttgccattttatttatctgagaaaaatattgaattctccaacacagctcaggaaagctgaaaatagcaaagaaacaatcagaaagaacccgatggaagagacagggatagagaatccatattttctcagtaattaagaaacaaaaacaagaaaaggacaaaactctcgtcttcttgtgaattatgggcctttcaatttagaccttttatttagcccaattgagatttcaaagcccactattgagtgttcttcgaatggaatctgaaccaaagatgttatttgagttgttgttttgtctcatgagttattgacttcgagagagagggtttcaaagtttttttttttttgggatgtatattaggtaagattgtctcaaatggcaacaacatttttgattatttcttaataaaacttatactaatacaatttggtaaatacctaggaaactagataaaccaaaaaataaaacacatttaacatataggctggacctatcatatctatgcccatcattaagcccatttattatgcatacatacacatacgatctttggttttttaacacatacgtattttagtaactccaaagtgacaaatcttcgtaacacatttcttcgtccacgtacacactcgtattcatatcaatgtacgatcttggcggcgacatcaacggctcctccgcgagcctcatcatcattccagcgactccttcatccgacgtgtcaaactcactggctgagggtaaaaccgtaattcctgtactaaactccggcggcctgaacatctccgctgcttcggccgccgtgcgcctgatcgtgtccggatcagtggatgccggcaccggcaacctccaagcagaatcggagaaattcaaacacgcggatctcccgcgcagagcaagaaccgccacgtcgtgagcacgtgcggccatatctgccgtcggataagttccgagccagactcgacgctgatgaatcggttcacggacttcgcatacccatttgtcgccgtccctacgccgcacgcctctgtagattgggtgacgtgtctccttgaaaatcctccgtccagcacgcttctttggcttcatctccgccacggtgatatcgtcgttttccatctccgatctggttctgctgaaacagagtaaaatgtcaagtaaaagtaaaaaacaaaaagatgaaagtttctttattctttataactctgttaaaaaattaacagagtaaaatgcaatataagacagagaattcaaaatatcaaagaagacacttcacaatggtgaaaatgtataagaagaaaagcttaaattacctcaaagggttctcgaaacagaattgaaatgaagctttgtgttgtgtgttgctctgttttgtggtagtgaagtagaagagtgaagtgagaagagatatataggcgttggttggtgggaaccacaaagaacgaatcgaacgcgcgtaatacatactaaactgattcacttttagttgtggatcattgccatgctggcaatatatttttttgctaaacttgtaaatatcataaaaatgagattaggtaatataaaagagtactaaagaagactaaccaagccaaaaagaaataaaaacaaggttacaatagagctttaaaagatttgggaagagctaacggatccaaagcaccataagctcccgccaacgcttcctatgtcttctcgacgagatgacgttgcgaacctcacgatcaatcaaacgaaagacccctgagacggaaagccgaagggaattgtgaagaacattgtttcgctgcctccataggctgtatacaagaagctggcaatatttaaacatccttttttttatattagctgtttgttaataatgttttatatgtttgatagtgatttaaaattgtaaatcaataaatcacactattttttgaagtgaaaaataattattgattttcagcaaacatttttctgtgttatatactctgtaatatatcatagaactgaatgtaaaatgcttttcaaacaaacttggaaaattattgacaataaactagaaatattttaagtttctgttattgttacacgattagtctttacgagtttgaatttgatgttttatacatcactttatttattggaaaattgaaaattaacattaataatcacagaaatatttgatccattatttttattttgattttgtatcaacaagaaataatgtttacataagaatttaaaaatatcatggaacaatatgagacaagtacaataaaagttaaaaaaaaaatggtggagcccttatatatattttcctcgtgaaattgaattttaatgcgttttttggattgggtgaattttatccacgttgccttcttaattaaactagctgcgaatatcacgtggggttagcgtgggggtaacatttcttttattaaactagctgtgaatattcagtttaagacttgagagtttgaagggttcttattatatactctttctttgtggctccgagattcactctcatggtaatcttacttctttgatccgctttaactagctgtagtgtatgatggttccgtaggcactcatttcttttcctaattctcatgtaatcgtctttattaagaaaaatgaattcagaaactaaaaggaaattagttggcattttaactagtagtatatattgtgaacttaccgtcaccaacagatgattgggttacgaaatctatttaatataacatctgaaaaaattaaaagctacatgaagtcgtaaaacgttagaattgatctaccatatttgcaaccctatatatatactctagtgtatacgaaaatacctatgaaaaagatgtgatgtgcatgaacgtctcatatatttcatttaagtttcgttgaatttcttaatatttttgttcagtaatgaatgtgttgtaataaaaacttgaatcacatatatatatgttttactgttttagcctttaatatttgtcaaaacgttttcaaaaatgtcaaaactatcttctgtttattttaatgttaagtgttattactttctgtaagtttcttatttccactgaaattaagtgacaacaattttagagaaatcgatcgatatcctgcaattcatctaataataataagataatcatgtatatatgacaaaatgagatgagttatagaaagcatatatggcggggtcgggacaagagcccaatcatattttgttggagtaaatgcttaatagttaatactgttaagttgagttaaacactagtcatttgcgcgtctgcttcacaaattttaattctttaatctttaaccgttgtagctctttatattgtaatgtttatttcttgtataaaatatacaaagtaattaccctatatatccttaagaaaagaataacactatatccaaacatggttaattaactctactggttgaatgaaaaaaaaacaaagttcagcagaggatgatttgtgaggtgaggtcactgtatagaggtaagagtcagtggctctcttggttattgagttaaactaaaatggatggtttaaactgcagaaacacctagtcaataattaatgggaagatattcatatgtgtgtgtattaacggctaatgtaacattacaccggccgggacaatagggccaacgaaccctcgcgaaagatatatatgcccaaataaatattgggctattgggcctaaacctaaatatttggattcagatttatccagaccagacccatgtattttgtatcttgccttcaattcattttcttatctaatgccatgtgtttgaattacatgcaatataaccatgatggtatttgtaccattgtatttcattttggctgaatcttgattgtatctgcaaactaattcgaacatgaaaatgttacattgttctcatgttttctatgaaaatctattggctttagatgtgaagagaagaaaatcgcctgtcacatacatatgtctgtatccattttaattgactacacaaaaaaaggtctgaaatcaataaaaagtttaaacaaaaataaattaaaattgtattactttcttacagctattacaaaaaaaaatccccaccaaacacaaacacaaacaaaacacacttttgggaaaccccacgcaataaccacgcactctcatctcatatttaacaaccttaatttctgatcacataaaaccctaatctatttctatccatatctctctccctatatctacttatatataacaaataaacacataagttgacatatatactatatacaagtatattaattatacatatatggctgaccctaacaatcctatcactgaacctaaagctataatccaatcttctacttcatcgtcagttactattgtgccagttcccacgtgcggtgacagcctctctgactctgccacgtgtgaaaacccttgtccacttgatactatcactactactactactactgtttgttttgcggctccttcttctactgcaagtggtaatgatattaatactttaatggccactgacaccgacatctctcgccggaaaaagaatccggtttatcggggaattcgttgtcggagtggaaaatgggtgtctgaaatccgagagcctaaaaagactacacgtgtctggcttgggacttatccgacgccggagatggctgctgccgcatatgacgtggcggcgttagctcttaaaggtggagacactctcttgaacttcccggattccctgggatcttaccccattcccctttcctcttccgcagctcatatcagatgcgctgcagctgcggctgctgcgactaggggtgcggctggagcggccgtgaaggtaggtcaaaagaaggaagataaagtttatgatacggcggaatcttcaactatggggtttgtggatgaagaagagctattgaacatgcctggtttgctagcggatatggccaaagggatgatggtggctccaccgtggatgggatctccaccgtcagatgattcgccagagaattc

SEQ ID NO: 1011 - DNA, 100512 bp, Arabidopsis thaliana
gaattctcagatcgttctagtcaacaacattcacagattgtaaatctttgatccgaaaagtcaaaacatttaaacacgtacatatatacattcgcagattttcaacacattttggacaatacccatcaacgaaactcaaatgggttctaaggatttctgaaaaaagttagattattagggggaaaaatgatcgaaagcttactcagaaaatctgcgtcctcgagacctttggcgctgacaagaacaacttcaagagttccatgaggcatttttttttgtttttttctcttgtgatctttttgttttcaatttgaagattcagatcccaagagagagagatgcgaggcttttgtctgatttgttcgatcgttttgagcacgacaaatatgaatataatggggaatttaggacatcgctgtagcgcgtgggcgcgtgtaactaacgctcagtgccagctttcttttccttaattagtgtaatgaaaaatagttggtctttgttgaaaacttagttagatgattttaataatttcaaaactttgtgtcaaacttgataatttcaaaaaattatgatattgttacagtcctacagatgttatatctttcctaatgagacttacaaattaatctattaataaaatttgatttattaagatttttttcctcttctaggcttctagcactgttttatgttttttttttatgaatgatgaatactagtattgaataaaaacatagaaaaaaaaatactaatgaacaaaaatcaatcctatgattttatactttttatagattattcataaggaaaagcacaatgattttgatataccaccaaatcaaatcttaatgacaggatctcttagataggccgttacatatattttcatatattgcaatgaaaaatagtaaatgttaaaacataaaactttacaaatttggtcaatttttttttttaaattgttacaattcttaatattcataaatttagattgattaattatagtaagaataaatggatgaaaaattggcaattgaaattaataaatattatattctgagaaataaattatgtgtatatgtacatatgctaaaaggcaacaaaaaaataatctaaattgaatagtttttcaatatatttttcttttcttgactctagttaaagtttacattgaagtcatttaaatctagctacaaatcttaatttgatcacttttcttgttccaccgattaggcttttttttgttaaaacttttttacatcttctttataacaatgatatactacgttttactctagttcttttggacaaacaaccttctttctgaatatgattactgtacagtaatttgggaacctaaacagtactaatttctaaaaattgatcacgtaaggaaaagataaacaaacacaagagagtaggaaaaagtaaattgactcatggcgtaattgaattgtcaacataaaagtcactgatataaagttaactatactaaagtagctcttgtgcttgaaccaaacatcagcaaaaaccataccttaaaatcaatctgcaaaaaaaaaagtaagagaacatcattagttacataaatgaatctaaaaacaatcatttaacccaaaagtaacggaaaagaaaaacccatgaaacaaaacagagatgttagaattgaaaacaacactctgtccgcaataaacaaagctaactaattaaatctttcgtctcttcacatttcttgtgggatctttcacacttttgacgaaatttaagttgaatacttgtatagttctactaaacaacagacctaattaacgttccaaaaacaaaactattatttcccatataggtttcttgcaaagcaagcaatcagtctaagaaattctttgggctaaggagtggaaaaattcatgaatacatgataaatagtaccttcaagttcattgattatcgatatgtctcttgaaataagcagccagtttatcaagatccccaaacattcttttcctgaacttgaatcccttagggtatagaccgatgtactcgtggtgcggatttgcggatcgtatgtaagacaatataaagctccctggatgttcatgagaaacaccaaaactgtaaactaccattttcggattcacacccttctcaacccgaagaagatcatctatttccgattttgtcccagtccgaaatttccggtggtttagcattgtcataagatgagttaccaaaggatcaacataccgatccattacctgaaatattgaaaacgcataagtattttcacttgtaccaaaactgaaattttgtaagaatataaagacgaacctcatctagatcctcgaaggtttcattcccaattttcagtgttttcccaatacgttgtaagctcactatatctttgttctccttctcaccttcgattatctccttgttagcatacacattatcagaaatcttgatcatcaaagtcaaatgattcagtcctcgtgagcttggacgaacaatgctttctccaatattcttatcagacaaatacactgttgcttgctcggcagtgatgttctgaaaccgaggatgaacaatcatccgagacttaaactgcttcttttctttaggaactttctctttctctatcaggacactatttcgtttctcctcgtggtaataatcatcgacatccccgagattcctgtgctttctcatttcgctttctttgcagacaagtaacacatgatacctttgctttagaatcgatttgaccttgcaagtaacgatatcgccttcacacagtttgttagacaaatcaacgatatctctaccatcatctgagtaatcttccttcaagagaatcccaggtaatccacaatctaatacacatttggctttaccacttgtcactttcttaacagtggcctgcacaatcctcccttcaccaatagtttctttggtttcacctgaaatcatataaaactcctcatctgaatcaacctctttaaacagactccgccaatcctgaaatccacagcttaattctctcatgatcagactataagtttccttcttattctcttggttcttgcttctcaagtactcatcaagaacgattttcctcaaagaagctggctcatctctcacatgctctatcgccatctctattgcatcatcctcatcacctcttacagtatcatgagcataaacatctttcgccaattcttgcgcaagaccgtatgattcgggatgtattctagtgtcatccaacagatcaataaattggctgctactacaagccaacccgctcctacgaatccgtaagaaaccagctgcatttacgaatacctttttaccaatcccatgatttatcagttccttgcggacaaatatcgaaccagctctaacaagagacttctgcaaagatgcagctttcctaggaccaagacctgaaacaaactgtaaaggagaaaaaagccattcatggctcgcagccagattaatgtcgattccaacttgattcgttatgtcaaccataacttgttcaaccatctcatacttctcatctggatcaagaaaatcttgaaaagaatgaagcttccaagacagaatatctctacctggaccgcataaagttgagatcattgctaatggattctggagataacgtccaagagaaactgcgcgtttcacaattcctgcttgttgaggtagttgttcacttgagattctagaattttcgtatagcctaggaagagattcatccgcataaaccaatggaaaatcataaatcctatcatctacataattcaacggcagctcttccaccatttggaatatagcctcataaatctcatccttcaggcgtacacaactcaaattaacagctgctaaagccaaaacatctggttgatggtctcttataaactttagaaaacgatcttgatccatttttttacgtttctggtcatttacatcccgagaccgcaatccaatggaacctgagtaaagcacatcaaccagctctcctgatgaatcaagcatcacaaatgtagtttctggatttccaggtccccaacaacaagctaggaccctcggtgcagcttcctcctccgaggtattattattccttcgatatggccctgaagacactttgttccataaaacctgtccatactctgaaagcaactgagtcttcgctctgctagttagcaaggatcttgcttctttctccattgacggcaaaacaaaaccatgaaccgcatcctccagtatcaatttcctctgctcgttccagagttgagcatacttactaacaccaacacttagatagtgttcactgcattcactaattatcctattcatctgattctcaggcagcttgaaagttacttgaagaagcttctcctcttctgctttctgaatgagaagccattgtacaccatcaaactttctcaatggcttctcgcttaaccacttaaccgcagaaaaccgatggaaggaatctataaccacattcccatctggtgttggactcgttgagactactgcattctccataaaaattccacgaacatactttctaatcgatggctcgcagcttatctcaaccgcagccatatgccttgcacctttaagaacagcttgagaatctccaaacattgcacactcatagttcaatgccatctcctctggtgttttctttgcatcttcaagctcatcaacaaaaactttctcaagagacaacgctagtcccaattgctcagcgctataaccaaacttgtttgcaaattccttaatcccaaatttgctgcagatgctatattgcgatttcctattcggcctcttgtactgtccttcatcgatctcacaatgaggaaaatgcaagttgaactttgagtctacatcatcaacttctctctctgtctccgccgcttgaagagacttaataacagattcaaaaagactcttattcagatcagacatgcaggtttcttcttcaaaacgtttggtatagtaaccaaacaacgcggttttccttttccgcagaagaacccactttctatccaaatcttgaatcatccacaagactttatgccacttggtctcaagcttcttgtcaagattgaaatcactaccatcatgatcatcatcagaactgtccaataaactccgacactgctccttccgatacatagctataaacggtatctctaacttctgcacatgaaacatctctaaaaacttcacaatgtcatccttattaatcaaacaaccctgcccttgttcttgaagcaatcgagcataaatccagttgctctcttcttgaatgctcatgtcatctagggaaacaattccaatggcttcttcaaatatctgcattctctcaggaacatcaagcttcctaatttcatcatctttctccgtcatatacttctcagagagaaccattggttcaaactcatcttctaactttctttcgatcttttcgttatacttcaaatcctttttccgaagtttcaacaattcttcaggatcaccaaatacatcattagcgtatcgtaaagcgttcgaatcagttccttgcttatatttcattttcttcctcctcattccttgagcaccatgatcatcttcatctacaatgaagtgactcaaatcatcatcatcatcatcattattgatcttatcctcttcctctgaagatttcttcaaacgtttatacttgtttctttggaaagtgtcgttgttatctttaagaagtagataatcatcttcgtgaagagtaaaggattcgtctttcttccttcgacttctactctttttctcactacaatgtctctgttcttcttcttcttctccatcatcagaaccattcactaaaaacccatcgtcaaactcatactgatcatcttcgtcttcatcatcttcctcacggttctccactggatcttcatgaatctggggctctgtctcaaaaacagagtcgaatcgttagaaaaataataataacagagaatttagggcttttgaaagcagagctttttatgtaccttcgtcgatcctattcatgactaggttagaatatttagctatacgaaatcgatgaagatggagatcaaccctagaaactctgtgatcgtaaaactagtctctatttgattctgaattttgcgaagagaaacaaagaaaaaggcttttcgtacttctagggttcacaccagcattaagaggctactaattgaagttttgaagcatttcttatttttaaaaatatttatgaaactctttttttagctgatatttaattaatatatttggtatttttttcgattcattaagagatttatttttcatattcatacaaatttatattgataattcttttttccactaattttttcattatataaactaatgataaaatatataggtgaaatatatttttaaaatattaaacctataaaaaacaaagaaattctcgaaaactaaagcagaatctaccgaaaacacttaataaaattcatagcacaaaaaaccataacaattaagaattgcaaaacaaaaaaaaaaaaaaaaaaaaaaagatcaagcaaacaacggaggatgggataatgaatcctaagaactgaaaaaagtaaagaagcaaaccagaccgacgatcacttgaatcaatagaaaccgagtttgagccaaagacaagtgtttagaagagactgctagatcactagaagcacgaaccaattagaaactctagcacaaacagcaccaaaccggaagcaaacgccagactgatcaaaactacaacgggcactcactcccccaacaccaaaccaaattactattgataatttcttatatcacatcttttgaaaaaaggatttaatttaagcctagttattaaggcgcttaacgttgccaaaaaaaagaaattattctataaaattaatgatttttaatttaaaggttaggtgtttctctagacttaaattattttcttacacgatagaatacttagaggttatttctatttacgaaaaatgagaaaaaaatggaaaaaccaaacggactgaaatcacatggagtttgtatatgcattattaattcatgaaaagaagtgtcttgaattttcaaccattttacttttgaaaatcacactcaacaaaattagcttttggtataagtatttttttttgttgagaaattcgtgaagacgtgtcgttgggtgggttccaatagatattgttctaatattggctaaaaggtgtccaaaaatagagtgattctgcagaatatattagtataatcatctccactggataaccaaaaacaatattgtttgttacatcgtttctcttttgtcatcttatgctatcacatgatgattttttaaaaagtgatgcaagtttgtaaccctctatgttcacatgctacgtacacgcaaattttgaaagcacggtcattcaagaatgcaaaacgtgttggtggtcgagaaggccgtggacccgtggtcattacaattactcaattagtgttttctagtaatttagaatgcacatgcactccccctctttacttcatcttctcatccttatgttgttattcagtttctcgattagctgtaacactaatctcttcgctctctaaaccacatgacccaatccaaccaaaaggttgtggtcttgtaacctggcattttaatttgaagactttttatcagaaaaaaaatgcaaaacgtgttgtcttcatcaagaatgccagattacaattagtaatcacctaaatacctatcatcttggacatcaatcaattttctgttttatgttctctaaccaattaatgccttgataatttggagaatttttttttttggtgcaatgcgtttttcgtgaattggaatcagacgttgtcaatttaaaaaaaaaaaaaaacatcggaaatcatctaccgtagaccattataaattaaatatatttggaaaattctgtatgaaaatttaaatgcattatttatccgaaacaaatagtgagcacatgttaattatattgttgaagaagacctcttatggaagttgaatttctcttgtctaattgttaaactatgattatatccaaaagatatctaagattatgacatcatcttttatctaccacttgttcatacctatgaatcactctttgaattccttaaaactcttcataatatattgtagtaaataaatagaaaggtgaaatactcctttgtaaagttttttttttctttttcttttggcatcgatatttaattgacccttagttaatttctagttttgacatccctcatgtctccaacgcactccagagaccatagttaaagaaacatagaataataaccaatttcaaaatcattctagaatataagaaacaaaaacaggattttgctacaaatctatgatcaatccaaaagctggctatatattatacggaaacaattacttttgcggattagtataggtgaacatcggtgaagcttagtccgaatgtatcccaagacatgatatcttagagcgccacatgtactctagtataagtgaacaattctaccataaactatgaacactaatttagctcactgctcaccaagaaaaccacattggatatcgcataaggtcctatgccaagctgcaaaaatcatgaacataagagaacagattaaaagagattcgagagtatattaacataaaggaagagatgaatcaaaagtaaacgacgggtttaccttttatgtgtcttggaagatccaacgcatttgactgacaaaacaatcaaattttaccgttacaaaagagagtcatatatgcagaggatgatccaaaagagaaagaattatacaaatgcacaccgtaattgctgattcataaacaaaaatgtggcctaatagaaggattacattcgtcatgtagaaagaagagaacaacaataatacctttctgatagggctttggtctgcataatatgtagtcatccgtaacatcataatcatggcggaccctagtttgaaagagctttagcaggttatcgtaaggatctctaacctcaaaggttatgaaatacattctaccaggcccagtacacatgtaagtattggctttgacaaccttgagaaattcatattctgtaaactgttttcacaacaaaaaaaaaacaatttcatcagcaggtaaaactaaaattgatcaaaacaacaacaaagagaatttgaaagcagaccaattctgaattgtagttcttaagggagttttgagacagcctcttgagtaactccgtagtggtttctgttgccaaagaatactctttatagtctaaatcgtctaaatcaacagggcggtaattgaacacagagcgaaactgtgtgaaatcgatgtcaaaaccctaaattatataacacagagaatcgacaaaaatcaacatcaaaaatgaagtgatgaattgaaaaagaacaagaacaagaacaacaaggagaagaagaaccttgctcttcttcacttgtcttctcatcataacacactcttcatgtctcgtgtacataggctctttcttctcgtcccatcgtatatgcggaggaatcaaattcacaggaaacgaaccaacctcgtaacacagatacacacgtcccggcattggagacctacctgagacaagcttatccgagtcagggctatacacaaaattgactatatacaccaaaccctaaagcaaaattggattcgcaccgtctatatgaacctcccccatcgctcctcacggatcaagttcttgccttgtgttgaagaaccctaatttctagttttgtttttatattttctatattaaaaacattatttaatatttagttaaagaaaatttggccaatgaaaaagtttactgcagaatataaatagtcactaaagttcttaaatttaatttttgcatagcaacttgatatttttcttcaaaacatcttatattgtgaatcaaaaataaaatggctaaaacatacaataatatgaaacaaatggtgtatacttaaagtttaatgaaaaaatcaataaaagttggctaagtattttacccaaagcaaacttgaaatttatttcaatagttaaaataattcagttaggaataggattacttcattttcaggcttcttaaggattactccaacaacattatctcccactttctaagacatagcaataaagacaattttgtatttcattggttatatatgcataactttcaaattctcatatgacactagctcatatatcatatacatttcaaaatcatagtctaatatatgacactagctcatatatcgtattctagtttttgaagtatcaattgcactttttactaacgttgttatttgaataagattttttcagaataaagttttcgatttggtagtagttgtacgaaattaaaactatgaggtcaaagaatcattaaaaaaaaaaaaaaaaaaaagagacttgagtaaatagaaagataaagaagggaacgcaactaaaatcactttcaacaaaacgaacagaaaaaagttagggtttcgtcatctcttcttcaacgcaaagtgcgatctttgatacgtgaagagggaggcatgggtgaatcattcgaaggttttgtttctctagactctaggatttgtaaaaactcccgatcaatcaattaaaatcccttgatttcgatttgttatctcaggctggaatgcgtggctcgaagatgcatatttgctatgtacacctgaagatcctgagtgcttgaagcatcactatatcacacgaactgagaaagacgagcctcagtacacagtagatgaagaaattgctatgatgaacgaacaaatcacgaagagcgaggtttttgagagtatggtttttgtttttgtttcaaagttgttgtcataatgaagtattgtaggttctgtgtgaattaggggttcgatattgatttctcgttgttccgatgtctgttcaactaccatcttgttgaccccgatgatttcgatttccttgatgatgaatcagaagaaaccaacggggatttcatgaagaggttttctcaagaatctcttaagcgttacaatgacgaatgtgtaagaaaataataatccatttacgttcctaatgttcttttttgtacacagcaactcaactgagctgaatgattccttgtttgaaacagggtacgaacaaatatgaatttcacgaggttgtcaaagccaattttcacggatcttgtggatatatgtttctcatcacgtttcaagtgtttgatccatctgatgaccaggaaaaaaccttccaagctaggatccgttacactacacattaccccactgaattcgtcttttgtaggccgaaaccgaatccagaaggtacaaaaaagttattgttttggatacttgggttcatagcaaaagcataagtgatgcattgtggagtatatatagttgcctctttctcttgtttaaagatgtatatagcttgtaaaagtggttattatctctggttgttgacatttgttttatttttgattgatttgccagttgactctcatgaaactgccgaggaagatgtcaaaggttgacgttgacgttggaatcttggattgaaatacccattcaaaggtttcttttgtatagtgctcaggaccggtggtcatcagttttctaaacccaaatttacttagccctatatatcgttaacaagcttaagatagttgttttgcttagcactatcattaacaacttaaaaaattgttatcatacaattgaaattttttatcgtataggatttttaaatttaaagtttcaaaaccagtaaacagaaggttgaaagaattacaaactttatagagaaaatattttaacttcataaaacttgacaatttctttatgatggaagctaagacgtttgaacatagcaataagagaatgccgtatttcattggttatgcatagcgatcaaattctctcgtattaaactaaccataatgtgttggagaagaccgtggcgacaactggaggagaaatcggctgacagtgaacatcatcgagcagacttgtttcggagatgaatgtgtggagaaaatagaaaaagtgtcagaatttttagaccaataatcgattactacttactattgttattgtaattatcgaaattcgacatgttttcattgtagtacgtatatctagctagctcaaaaactgtacttcaaattcatatactttttttttttttgtcgtatgctagtttttcgagtattaatttaaagcacttttaactaacgttgttattttgaataagatcattttcagaaaagagttttcgattgtgtgcttgtatgaaactaaaagtatgaggccaaaaaaacgaaaaataaagaagggaaacgtaactaaaatcattagcaattaagtctttttttcatctcttcttcaacgcagggatgggggaaacattcgaagttctgaatgcaatttagtttctctaaaatctagggattgtaaatacacagtgcttgttatttcgatttgttatttcaggctggacttcgtgagtccaagatgcatatttgctatgtacacctgaagatcctgagtacttatattcagattcaacgcaaatttagaatctaatttggtaaaattgattcaaaaacacatggtttgaaaatcaagtaactttttttttttttttttttacaaatttactgtaagccgtgatttcacccatggatatctgattgatcatacgctcattattctacatggaaacaagttttcagttttcactttatgtctttctctaatgacgcaattctaaagacttcattctttttgctatggggcttttacttggttaaaatgtaattgggctaaatccaaacacaagcatgggttttatctcttactccgaaaagtaaaaaaaaattacaaacttttttatagaggaataataaaagataaaatacatcaactagaggatattttctatttgtcgcaatacaagacattaaagttgtagtatttcactagcaatgaaagatactttttcgtatcataattttatccaatgcactttttttttttactaacgttgttattttataaaaagaaagatttgagaagagagagctttcgacaatcgacagggtggtagttgacgaaactaaaagtataaggccaaaagacaaagaaaggataaataacagcgacttgaggaaaataaatttggatattattataagagagttccagaagaaggtagttaagagcatctccaatggatgcaaaatggagttctcattgttggttctcttgaaaaaagagttgaaaaataaatcaaaatggattaaaagagagatagctgtctctcttgagagagtttttgagagagatgagagacgatgacgtggtgccttatcattggtcaattgtttttaacaaaaaaagcaaaaaaaaagcgtgaaagcttctcctgattctatcttgatcattgtttctaatcatgtcgatgttttgacttacattgcttggaaactctctggttttcaggtgaatcgagttcttggatctggtatactaatcttctcggttccgattcttaatcgcagatcatctcgatgttaatgctctagatgtaaaggtcagcttctatctaagggatttgtgtaataaagctgtgctttttttagttatagactgcgattaaggagtgattagcttgtttttatatggtttagtcattagtgtgataaaaatctatgcttctgttgtttaatactgcagctacagaagtgtcgaagagtttcacatagactttcatctcaaatacttatggttctttgccttattcgttttcaggttatctttgtgtgaagaagttgcaggtttggtttgaaaaattgcagcttttaattttttgagttatagattgcaggttttggtgaactaatttgcatgttttggtttgagaaattgcaggattctgcaaggtttggtttaagaatacgaagcagcactaccttctttccaataactgaaagatagtgaagatggaggttgagttgtaggtttcatgagttgcaagtgtttaatgagttacagttttttcttatcaatgatttgagactttgagtagttgcaggttttcaatttgagactttgaattcatgtatcaatattccagtttgttttctgcaatgtttcagccatatcttaacaaagtttaaaatcttgaggtagttctttgtgaggcagaggaaattatttcaactcagatattatcagatgcaaagatgacaactaatctctccctagagaccgaccatatcatgattttattacactaattggttgtttaacaacaaaatcaacagaatttttcacactattacaacaatttcaacatcaaacatttcaacatttcaatttcaaaatcaatagaatttttttccctgagaactccacaaagagagattaccattggactttacaaaattaaaaaaaaaacacataagttctcatctcttcaaattcaaaattttattcttaaaaaaatggtgagaacccaatagagggctctcactattggagatgctctaacgaatctaaaatcactttcccccaaaaaaaataaaaaaagggttagggttcttcatctgttgatcgacgatgtgtgatatcgatggaagtacgatttcgaatttcgttaatgttaagtttttaaggtttataatttaactctatcgattccaatttacaatgtctcaggttgggttgcgtggctcgaacctgcgtatttgctgtggaaacctgggggccgtggctatgttagaccttcatgcatgactaggacggaggaagataagcctgagctcacaccagaggaagaacttgcccttatgaccaaacaagtcaatgctagcgatgtatgtgttgttcccctaattacttttggtttattctatttatttatgatcctaataacaaatcacttttcaggggtttgatatagatttcagttccttcctctgtgtattcaactaccatcctgctattctccattctgatcaattcgctgacgatgagtttgatactactgaggatttactcaagagccttgctcaggaagctcttgatgaccacaatggcagacatggcacagagtatgagtttgttaaagttgttaaagccaattttcactttgcttgtgcgatgatgtttctcataacatttcaagtcaaggatccttatgatgacatggttaagctcttccaaacaagggtacgccacggtaaacatatcactactaactatgtcttctgcagacctaaacccaatcaaggaggtattattatataaaccctaaactcaatttcttctcttgttgaaacaattggttgtttctagagattcacatatatagtatttgttttgatagtgaaatactttggaatcaagaaagttgtcaagagagatattgagcaagttgtcaagagccatgttcccaaagatgtcgtcaagaaacaaaagtaagtgatggaaacatctatcaatttactttgcttttctgattcttgtatggctgattttcttctctttacagattggaggatgagcctttgtgtgccacaaggagttagaatgcagagatgctgaattgtttttataatctatttgcgtcctagatgatgtgactttagttaattacttatgggagctcttgtgttgctagggaatgaacttattatatattgtgcgagttttactgttttcatttatctgtatcgttcattatgttttagaatgaatcttactctctcagtctgaattggtagcatagcttcttcctatgtcttctgattttgactggaaacgaagagaatacaagaaaagtatgaatttctctttattgctctgcttaaatgtcaaaactctatgaagttatgtgatttatctttactctgtaaaagttttaatttcgcgcaaccttttgttatgggtacacacattttctatgtaaaatgttggccgatattttttacaaatttttaagagcttctttaaaagcattttgttcaaatactatgagtgttgtagtctagtgcaaccaaactttagacttcaattcaatttaactcttaaaaacaataaactaaggtgacatgggattttttgctattgtaatggtatatatagtgagtgttatatataggggtttataatatcacaaagaaaatgtatattaacacaagagcatctcccggttctcactccttgtggcatatagaagctcctactccaatctgtaaagtgaaggtgatggtgattactcttaaaaaccatccatacatacaaggaatcttgacatcaaaggaaaaaaaacactcttgcagttaaatctttcgattacctcttgttccttgacatttgtttggacatctttcccatcattgttcttcacaccaatgcattccactatcaaacaaatccaaatactataaatctactaaagaaatagccacgaaaatatataaagaaggaagatcgaaagcttaatccatcttccatggtgggtgaaagaggcaaatatatattccacaacgaattcataaaaaacaacaacaacgtaactagagatggaaaacaaaacaagattagagatacctccttgattgggtttcggcctgcaaaagacgtactcagtcacgatatcttcagcgtggcgaacccttgtttggaagagtttgatcaagttatcataagggtcaacaacttcgaaggttatgagaaacataatcgcacaacaaaagtgaaagtttgctttcacaaccttgacaaactcaaattgtgttctctgtttttcaaaacaaagagagaagaaaagaatcaatttatgtaaatgtgatgaaagcacaaggcatatacaaaggttagttctcactgattcttgattgtagtcatcaagggccttcctagagagcctctcgagtaaatctcttgtggtttctggctcatcaacgaattcatgtgaatcgagataagcaagatggtaattgaatacacaacggaagtgtgtgaagtcgatatcaaaaccctgttgtttcacaaactctcaatttcacaaatttatttatagagctcattataaaccgaaaaaaaatcacaaggataaatacatcgcttgcaaggatttgtttgtcgagtaaggcaagttctttctctggtgagtacttaggctcatcttcctctttggtccaatccctatacgctggtctctcatagccaggatcctcaggtttccacagcaaaaacactggttcgagccatttgatccagcctgagacatatcattggaattgatcgggagagagtatatataataaaccctaacttttagggaaacgaatttcgaatcttaccttcaaattcactcatcgccttgtgcgtacgttgatgtcttgatgaacagaagatgagccctaacttcgggaactctataatgtcccttttattttactcaagtcccttttatttattgatctgtcttcctttgccctcgtattgtttgttttgtaagactaccccctcaaaaaaaaccggtactaaataagagctagtttttttttatgatgatgagtcaatccaacaattttcttaagtttttctatttgttattaatattattttactattctttttgccacacaattttaattccatatactactctttcttaaaaactaaacttatccaaattaaatatctcaaaattttaaataagaaagcttttataagaatattttagttatattaaatgtattatgtttttctattagaaaaaaaaatgaaacaataaaaatatgtagtatatgtatttcaacactaacaaatgacttcatataatattaagttttacattgaaaccacaaatcaataagcctaaacttagaatgacgtaaatgcaactttattttataatataaattaataagatatttaaaatttaatttaaaagtttatttatagacaaaaaaatggattttgggttttttatttatcttaaaattaattttaaaaacaatattaattagaaatcttcataattttgattggctacaaaacatattttttgtaaacactaaaactgctttaagaactacaaccattcaatgccaaaataaccaactgacgtggaagattctcatagcaactccattgcacaaataagttgagtgtcttcctacacttaaaatcttttatatttaattattaatattttataaatttaatattttaatattgttaaagacatcttctttctattgtgcaatgaagttgctctcaggaccttaagttaacgtctccgattccaccatctcaaaatggatattgtggtaatactctagtagaagcctctatttcgtcctatacggctatatctgtagctataagatagcaacattggacgaattcgggtccttaattaacttcaacattcattttgagacggcgatggtggaatcttctcataagctatatcatttcagacatttctaagcttggtttaattattaccttttcacaatgcttactttcactctttttcttagccaacaaataaactatcttgtcttttcctgtaaaatatgttttcacttttttttacttgccagttttcaataacgatgatatttgtttgtctatattattgaagttaattttttaatttttttttaagagatgtagtactttttgaaaactcgcatttgtttacatatacaagttattgtaatggtatagtgagtattataatgggtctttcgatcttggtcattctgtttatgaagcttttcacaatcttaaaaagggaaattcggattgagctagacgaattgacgtggaggagaagtcgaaagcttctgaaatgataaaaagggtttgaataatggtgattaataaattataagtagagaaagagaagaaaaaaaaactaagcctttttacacgcctgtgacttgggttataagcaatcaacatttcgtttatctcaagccaatgggaatatcattattgctacatccgtccaatttgtggtttggtctttgttgcttgacctcctactcgatcgtctttaaataaatgagcaataaaagcttttatctcctaaaaaagtttgtcattttatttccacatatcaagttatgtttcctgtacatctggacacatttacaaaaacaccaaaaaaactataatattaaaaaaaattaaaaatgtatatataatattttctaaatgatcaaattttaaaaaataccaaaaaaatccattaaatccttgttgactattattgtaactttacaaatgacaactcaacacctcataatatttggttttagactctttaaatccttgttgtcaaaaaaaactatctaaatccttaattatctattaaaaaattaggaaactaaatcgaattacacactaagaaaaaacaataaacaaactttaaatatcccacttttccctctaatccttgtggatttggtcataactcgttatccataaacccaaaaatagcaaatgagtcatctctcttttgttccaacaagatcttttttatttggtcaaaaaggtgtataaagtttgttataacaagttagttatataaaccctcacgaattcaagaaaccaatcaaaagcaaaaaagctttctctttctctacctttttccttaatttcacttttgcggcgtcgttcttatctactcacaagaaagcaaccgatcaaataactcccagaataaagaaagactcaaactttattctctctctctttcttaaatagtgaagaaagcttcgattttgggaagtgggtttgttcgaaaaatgggttcttctgtggaacagaacattttggtgactggtggtgctggattcattggaacacatactgttgttcagcttttgaatcagggttttaaggttacgatcattgataatcttgataactctgtcgttgaagctgttcatagggttagggaacttgttggtcctgatctctctaccaagcttgaattcaatctggttagtaccacaaaaaagcttcgatttttatattcatatggctacttttagagtaatcaggattgtatttttatgtatagattcttttggcttgttagattttgattgttttgattaattgcagggtgatctaagaaacaaaggagatattgagaaactcttttccaatcagaggtaatgtgaaaatatttgaaacagagattatgcaattttttattcaggtgagttggttttgatattatgattctttgtgtggagaaacagatttgatgctgtgattcactttgctggtcttaaagctgtgggagaaagtgttggaaaccctcgtcgttactttgataataacttagttggaactatcaatctatatgagaccatggcaaaatacaactgcaaaatggtttaagatcaaaatccttcacttttgaatatgtgttacttgttctagtttagttaccaaactgttctgactcttgactttatatgcagatggtgttttcgtcgtctgcaacagtttatggtcaacctgaaatagtcccatgtgtggaagactttgagttacaggctatgaatccttatggtcgtactaaggtatttcacacctcgaatctcttttgttctgttttgtgttcataatcttgaaggttatattatttaagactgtgatcttgaaaacatttgaactatttgtgtagctgtttcttgaagagatagctagagacattcacgctgcggaaccagaatggaagataattcttctgaggtacttcaatccggttggagctcacgagagtggaagaattggagaagatccaaagggcataccgaataatctcatgccttatatccaacaagtggcggttggaagattacctgaactcaatgtatttggacatgattatcctaccatggatggtagcgcggtataacatcgataataccgtttctttcttcgaaaattctgtttggacttctgatgatagattgataaactaaggtgcatttgacacttgcaggttagagactacatccatgtaatggatttagcagatggccatgtggctgcgttaaacaaattgttttcagactcaaagattggtaaactctttatatgacttttaactgtttgtttttgttttgatggagtcaaccaatgattagaattttaataatgttttgtgtgtgtcatcttaatcttaggctgtactgcttataatcttggcactggtcaaggaacttctgtcttagaaatggtttcttcttttgaaaaagcttctggcaaggtaagattttctcttatttccgcaattatgcaatgaaatttgtgtgaataagaccgaagatttggtctctggatgctataaaatatttgtttctgcagaaaatacctatcaagctatgtccaagaagagctggagatgcaacagctgtttatgcttcaactcagaaagctgagaaggaacttggctggaagtaagtaatgaaccatactttgaatacttttcaaaacacaaaagactaattttttgtttttctttattagggcaaaatatggagttgatgagatgtgcagagatcaatggaactgggcaaataagaatccatggggtttccagaagaagccttgattgattttgttttgtttcaccactcaatataaagaaaaaaaaagatatagatgtcgttttattttcctgcatctatttgatttctctcttcaaaaaaagttgtattgaactcgtcatctttcggttaataaagtataaagtttatctacattgcgtaatactaactaatcgttataatcaacgaatcatttatagttcactgcagaagcattctcaattcaggattgaaaaagagaagatgaggagatacaagatgttgttaacttgttgagcaagtaagtaccaaaacatgttaacaagagtcgacaacaacagaacatacagactccaaagaaaaaagcaactaaaatgtgtaaacatataacaagcaatgtaaacaacaaattgatcaaatctcgaaccctttttctcatgggttcctcagctgctaaatgatacagatattcgcatatttgcaagtttcctcttcttactgttctagtcttctagacttcctcgccttcttcgtagttgctactcttgaggatgttgtatttgcagaggggacaagtagcatttatgtaaagccatttatccacacaaccgcaatggaaatggtggccacaaggaagttctcttagctctgtctcgtcttcataagcggaaagacaaatgcagcattcctgtagattgacagaagcaaatctggttttgatcatcaaaatccaaacagagtctagccacagaggtttacaggttttttgtgttacttactgcatcctcatgaggaagagcatgttcaacgggtgaatctgtaccacattcagtcatcactcctccagaatctccttgtccttgttcttcatcaacagtgtgtttcatagtatcaccaacctttcggaatttgaatttagtaagttggtcaatgtcttctttcgaagctccttcctacattttgcaacagattttcattggaacaaatccaactttcttggaggtaacaaaagaaacaggtaatttgaagctacctgttctgctacggcgtatagaactgcaatgatgcaaggcaagcagcagcaaacagcaatgccgataacacaagccaatgcaacgcagaaaacaacaaagaacacatcgaaaccaagaaagactatacacaacctataaaaacaaagacatccaaacaaatttaagaacttaaacactttaaacattcaagaatctaagagatataagagaaattaacaacaaaccaataaagctgtggggatccttgtgctaactcttgaccaccagaagatacccaataaaatccaataacccaccatataaatgagatcatcgtatttgcagattctagatgcttagcaaaactggttacagaaaacactgctttagccaaaattcacatcacatataagacaatatctgtttcacaatcactgaagcttaaaacaaatgtacctattgttttcattctctaattgacctagctccaagtaacgttcatctgagtttctactcaaacccaaaccttcttcttcatccatagaagaagaagaagaagaagaagaagagctagatcttggactcaaatctcttcttcttctactattcctcctacgatactcaacacaaacacaaaccatatgcatcatacattgcaacccatacccaataatccaaaccctaagaggcatattcggattctcatcgctgctaagtaccaaaacagctgtagcaacaacgacaaaagcaagattccaaacgaaatccaaaaccactacaggtttcgaataagcccaatcgctttgtctctcttcaagctgctcagccgcagcttcacgaacaagcatcgatggctctctcatcatcattctcccgctacttgcatgtcttagtaacctcgccgcttctcttaacccttgtcttctcaccgatctccttcctcctcctccgtcggttaaaatcaaaggcgttgcttccgtcgtcgtctctcttgacattttgctttctcttttcaaagtttcttcctttcttcgaaatttcaaaaattgatatcgaattgatgaaattggtgaagctttacgccattaaattggggcaatttcaatctcagagacaatttcggatttgttagggtttcgattcgaacagagagagagagagacagaaagagaaagaagatgatgagtcggacaaatcgggaaacgtgatgtttgaaaaatgaatataaaaaatcaaaattgtaatgaatttaatgtctcctcaaatgacaaccagagaaattaggggacatatatgtaatattcagttttttcagtggctatatggtaaacttacactaacttgattcaaattaagggtgggtaagaaactgaaccaaaccatattaaaccgaaatttattcttttgtccaactgagtaaaaaattaacaaaaattcgaaaaattttaagcataatttttaatcgaaaaccggaataaatctaaattaaactcaaatccaaattgaaaatttttaatcgaaaaaattatagtttatacgacatctatttagggaacaaacccaaaaaaaaactcaactaatttttatttggacgtttaatacccaattgtttttggttggaaggtaaatacacgaagtaataaaaccgtgcaatttaatacacaaacaagtaattgttgttattttcatactcacgatctcacaacaaaaataaaattccaattttacccttaccatctcaattaattattaatttttttataatataatattaaattttataattttgaataaaaaataattttattaacattttagtttatggtctctaatttttattattattatattattctaaaatttaacataaaaattatagaaaattaaaaatattttaaaatggccggtaaatattcttcgtagtgagaaactctcttttcgattgtatatccttcaagaatcaaactattttcgacaaaatctcaacccgaatctcatcgtatttctcaagatttatcaattcataaaaatggctaattttgtttttagtagcaaaatagctaacctcaacccaaatctcaacgaattagattaatctttgattctaaatttccttaaagagaaaacgattctttgatattgcaacgatagaagaagattgtaataatgactattttaaaatatttttgattttctataatttttatgttaaattttagaataatataataataataaaaatgaaaatttaaattttagagaccataaactaaaatgttaataaaattaatttttatttaaaattatataattaatattatattatcaaaaaataatagttaattgagatggtaagagtaaaattggaattttatttttgttgtgagatcgtgagtatgaaaataacaacaattaattatttgtgtattaaattgtatgattttattatttcgtgtatttactttccaaccaaaaacaattgagtattaaacgtccaaataaaaattaattgaggtttgttttggttttttttcccatctatttataataaaatagaccaattttaaatttatcgaaccgaactgggcataaatgtaacaacgagttttaaaaggcggggctatatagtgaaattaatatactttgggtacagaattcggatgttttctttttataggccctttaatgaaatgattgtataaaagtaaaacccttaatcggatcctccagcaattttccctccaaaccagaaaaccctccaaatctcaccggtcggagattccttctcttccgactgataatggcgtcttcttcatcaacctctaccggtgacggatacaatgaaccatgggtggagaaatacaggccgagcaaagtagtcgatatcgttggaaacgaagacgccgtctccagacttcaagtcattgctcgcgacggcaacatgcctaatcttatcctttccgtaagattttactcttctgttgacactctttgatttaaaccctcctcgaatttgctaaaaagttttaggtttgatgaaaacttgatcaattagggcattttgggtttgtttactgtgtagatttcatgataaagcttagattttgagggtttttaatcaatttctattgtctgccaaagttaatgaaggtttgatttttagaaaatctctgtgtttagtattacttgtggagatttgatatatgattttgtgttgtttggttgtatatccttagggtcctcctggaacaggtaaaaccacaagcattttggctcttgctcatgagctccttggcacgaattacaaggaggctgttctggagttgaatgcatctgatgataggtatgtgatgccaatcttttacctatgggatgttgttctatcttcaatcgttgtttggttagacatcttcaatgttctgttatgtttgtaggggtattgatgttgtaaggaacaaaattaagatgtttgcgcagaagaaagtaacacttcctccagggcgtcataaggttgttatcctagatgaagctgacaggttagtgacttttacttgagtattccttctcaagttgaattgttccagttaagtgtttttttttctgactttctgttttcggtttctaaaaaactagtatgacatctggagcacaacaagcattgaggagaacgattgaaatctattcgaactctacgcggtttgcacttgcttgtaatacatcagccaagattattgagcccattcagagtagatgtgccttagttcgattctctagattatctgatcagcagatactaggccgtctcttggtggtggttgcagcagagaaagtacggatttgccacttttctttcattcgacatgtttacttactgcaattttgaaaattttctaattgcttatgttttcaatctctcaaggttccgtatgtgcctgaaggccttgaggcgataatctttacagctgatggtgacatgaggcaagctctgaacaacttgcaagccacattcagcgggttttcgtttgtcaaccaagaaaacgtcttcaaggtttgaaacaaaaccttaattcactttggcttataaaacacattggtttcatatcatcaatcaaagatctcttcacttaggtctgtgaccagcctcacccgcttcatgtcaagaacattgttcgcaatgtgttggaaagtaagtttgacatcgcctgtgacggcttaaagcagctctatgatttgggctactctccaaccgacattatcacaacgcttttccgtataataaagaattacgatatggctgagtatctgaaacttgagttcatgaaggtatacatctgattctccttgacagctcaaaacatccaaactttcgtctaacaccaatgcttttcttcaggaaactggatttgcgcatatgagaatctgtgatggagttggatcttatcttcagctatgtggtcttctggctaagttatccattgttcgtgaaacagcgaaagcaccttaagttaggtaacttccactcatctctagtgatgaactggtggccggtctatgtttaaaccaagttggttaaatctcgttgtttgagaattcggatagatgttggaacttccatgctgtattgctctgttttctagatttgaattgcttgtgaatgtttctgaatattaagcttaatcctaaccagtttggtataccaacacatttttttatataataccatgctatttgtttaaatcacataaatgaaaaaaacaatacacagattattttacacattacaaccactctatatagtctacgcaagtgcgagagatgaatcgtaatttttgtaggtaaaatgttgaacctatttgtgtaattcgataacactatatgagtaaggcatgacattgtgaaatggtgtaaactcttggtctgttacattgactttatattatgaataaacacacttgtgaccaaaaaaaagaaaaaagaactgggaacaagaaacgaaataaagttatatttattgaaccaaaactataaaatacgtttggttaaaaaccaaatctactacagtaaccataatgatgacacgtctgaaatcttcttctgtagctcgtgtgtgttaacctaacattgaaatacacaaaacaacgtatcagagtcatcttcatgaagcttacagacacgataacaactaaatacacaccatgtaacataaggactctgttgcgaaaaatatcagagtaaagcaacatgattcacctcagactcctcctacctcgaggacaaactgttttaagaaagcatattgagaaagcttttgtccaatctcccatcatgcaacatatttgtcaccaagctaatggttgaagcatctccaacaaacccagaactcctcatttctttgatgagttctgctgatgcggctctgtcacaatctctaaggtttgctctgataagcgtattatatgtaccactatttggaagagtaccatcttctttcatttttctgaacaggtcatctgcttcctgtagtaggcgtttactacacaatcctgagatcattgtattgtatgttacaacatcaggcttaatgctgaggctacaaaataaatcccacgcttctcccaccttgccagccttgcacatcccttcaatcatagtattatatataaaaatattaagttccatttcactcttttgcagatacttgaatatgaccaatgctgtatctagcttcccataactacaaagtccatgcaacaaaatgctgtatgtcataatatctgtaggcacacgattagaaaccatctgtttgaataccatttgggcagaatcacagtcgccagcttgaaaaaacccttggataatagtggtgtaagtgactgtgttgccaactaatcccctttgagacatctcgcggaagagttccacaccatcctcaacccttttacacttacaaaatccatttataagcgtattataagtctgtatatttggaagacagtccttgctaaccatgaacttaaacatctgcttggcctcgtctaggcgattgtgcatgcaaaacccattgatcaataaattgtaagtgatagtatctggatctatagacctttggatcatctcctcgtgcaatttttcagcctctacaagcttcccctctttaaaaaacgcatcgatcaatgcattgaaagtaacaacattggggttgattttcttctcaagcatattactcagtagtcgagaggcatcactccatcttccgtaattacaaaggcaattaatgagggaattgtaggtgacaacattaggtctaattcctttggtttccatttcagtgaataagtcaacagcaacttccacatgtctatatttgcagagactatcgatgattgtgttgaagatcacaacattagcctttattctcgcagcttccatcttgttgagcagatttaaagccaaatcaatatcacctctcttacataatccgtttactacggtaccataagtaaccagatctggttgacatcctctttgaaccatttgatcaactaaagccactgcttctgaagctttgttgtgaagaaaaagtccatgaattagagttgtgaatgtaaaggtatcaggtttatatcccatttcgaccatttgatcaaccaaagctacggcatcagaaatcctcttactgtgacagtagccattgagcagcgaagaaagcgtgacaatatcgggctcatagccgagtttcatcatcttggcaagaacagctaaagcaagagagagctgagagcgtcggcaaaagcagttgatgaaaatactgtatgtgtaaagatcatgtgaaattcccaaagtttgcatctgctcgccgagagagatgacaagttcaaacttgttcatcttagcaacggcactcaacagtttattgaattcaacaatggaaggaaatggacgagacttgaccatgtcaccgaacagatcaaccgcatcatctaccttaataatatcacttagcctatttctcaatatctctctgtaatcaccactagcactagcaaaagatcgttcccagcaaccggaaccgcaaagattgaagaaagaaggaacagttggaggattacctatcccctggagattccaatgaacaaacaatcttttggccgtcaatgaaatcgatctctgcatcttatcgatttggcttcagctgattcaggagacttcaatctcagtctcactctctctctctctggaaatcgcaaaaccctacacggagggatgagatatgcaaaccggtggggttctggtttagaacttattacctaaccggtttattttgtgagaaaatcttttgcattgatctcaatcagtagtactaagtacagtctcaaaccggatttacaagcaagagataagaattgtggaaaaaattggtgatggctgttattttactctacttctgtttccatatacaactagtcttgaaaaactgaactgactgatctcaatgcattatctttgaagcttaatcctaaccaatttggtatatcaacacattgttttttatataataccatgctatttgtttaaatcacataaataaaaaaaacaatacacagattattttacacattacaaccactctatatagtctccgcaagtacgactgtacgagagatgaatcgtaatttttgttggtaaaatgtcgagcctatttgtgtaattcgataacactatatgagaaggcatgacaaatgatttcacaacgaagaaaacccgaatcagaggctagagtctcgaattgggaaagagacctctccttaccacctgagcttactgctaacatcagcatgtccataccgaacacaatgttagaagaaatgtcgttaatctttggttcctcgggcgtaaccacctcgactattatcacttttcctttctcgggaagacttttccaataattttttaggatctttacacaatcttcgtcagtccaatcatgtagtatccactgtcaaagtgtcaatcattaaccatttcattttctacttactttcatgaagatggcatctccttttggaatttctttaaacatatctcctgaaacatgctccactcctatatgtaatattgagcaagagtaatatgataattttaagagcggtaactttttaattttaattatcacttagtggccgtgtacctttattaaaaggagcatgggctaaaaccgatgctagatcgaaattgatgcctttaatatgaggatacttggaagtcacttgacctatgattgttccaattcctcctcccacatccaccaaagtatttacatcttcgaatcctttgtaaacttctaaaaccttcttcataatcaatgtggaagcttccgacattgcccggttaaacatttcagcgaattgttcgttcgaaccaatgagttcgaaaaacctcatgccatgagcagaggtgaatgcatcttttccttctaatatcatgtctttgagatgttccctagtaaaaataaattagaatcagttttagttaacgttacgtgtatatatgtagaacattttgtgaataatgaactaggatcgtaccaaggcttcatacagacttccccttggagtaccatgaacaaagtggcgagagagcccaagccatctccgcggttcaagaaaaacgtgcaaaccggttcagctgcatagaccctctcggtctttctacttccaatgttatctccggtttctaccgtacggtacttcaagattgagtggctggctaacaaaactagcatccggtccagcaatactggtgcctccggattggtgggcttggttgggagaccaagagcgatctcagaaggcgagagccacacgccgtcatctacagaagtgatcatgtcgataacgccaagctccaaagcagttttgagaaccatggggaaggtcatggcatgcaaaatcctctccgcttgcaagctcaccgtatcttcgtgataacgttgttcttctttgattagatccggtttaggaatgatggttaaggaatgttgaagatggttctccattgttgttgtttggttggaaaatcgagaaagataggtaataaaggtatagatggtattcatactttgtcattttttatactcagaaacctcaccaacattatgcctaatatttgatagctaaatatataaattaattaaaatatgggcacgtatttttcatttataaaattaatattcgtgtatatttaaaatgatcatctaatatagattggtgtacaagaatatgtagagatttgttttcacttttattgtgtgttcattagtacaactttcctaattgaatgtgaatgtgaatgttagtcatactcattcagtgtgaatggtctaaaattgttggtacttatccatcaacactccattttaagacggtgtgaatttatatgctttgatggattcattgatgcaactatttttgttttggttggtttgaggacgcttttaaggtaataagcgataaaattatagattgtatacaactccggtagaatgaaactgaactaaactagagaagaatatgaaattgtttctgaatcgattatgacctattttatttggttaattatattttgttttaaaggaatcgaaacaaagttgaatatgatattggtagctactgaatcattatgtgttgtttctatgtttgagtagtttctcaattgggtttggagttttctttgtttaaatagttaacactctactaacgggttaactttactttagtgatttcagttcaagaagaacgcttaatttggtctctgtttaattatttttccgcttaatttaagaaaaacaaattttgtctaagctatactcgtttctcacaaattcggtgtataacttttcatattgattcaatcctaaagtgttacatcgatataccattcgactgtgatattgtgctcatttaattttaatcacaacttaagaaacacattcaataatgtatgcaaagtaggtatggaatcgaaatcaacatttaagaaaatggagacataggtttggaccgtttggtatgagttagtgaatgttcaacaaacaatcaggttttaatatgatatcagtgcgtccacgtgtagaaagcatttcaattaacagtcagtctcctataacccttttggtgagcttgacactttctaaatctgtcttgagaatctgtgatggagttggatcatatcttcatccccatctttgctgtattatttatgttttctagatttagaatgcttgtggatgtttccgaatattatcttctctttttttctttttctttttctgaatattatctttgaatctttagtccttagtcttaaatacgttggataacttttgcagtgcctatacttttttttttttgttcaacttgcagtgcctcttaaatatcgacatttatgtcgtccatatgggcgcctgtttttaaccttagaaagcatagatttagagaatatgcactacataaccaaattctactattatataatatatatatatacaaaataatggacatgaatttccaacgggattaacaaatatcatgttacttttgctattgctgatagtacgtgcttgtttaaagcatatacgaaaacactcggaacaaatgaacagcgccaataaacaaacaatagttcatacaagaaagaaaaatcattacaaatgaaaaaggtcaaggttagtctccactctccacccaaaaaaaactaaaccacccgtagtttttgttggtcaatgttgaacctatatgagaaggcaagacatatatgatttcacaatcgaagaaaaccagaatctcaggcaaagtctcgatctaagaaaaaaaaaaccgagcattgcgtagcaaacacaatgttacaagaagagtcgctcatctttggttccatcggcctaatcatgtagtatctatatataaaatgtccttttatattttcaatgcatcatttttaataaaacaaaaccatttatctataatctttcagcttatttaataggagaaaaaaaaaatcataaatgtacttaaaggtataagataaacttaaaacacttttaaatgtgtgtgaaaaaatctgaaacaaggcttttatgaaatgaagatagtatttgttattgattaaacttttccatgaatgaaatatatatgagtttactttcatgaagatggcatctgcttttggaattgttgtgaacatatcctctgaaacatgcttcactcctatatataaccgatttttagtagatttgattgttcttgacagctcaaagcatcctaactttcgtctaataccaatgcttttcttcaggaaactggatttgcgcatatgagatctgtgtttgacagtgtgttcctccagcaaatttagacagaaaagagctggtcaaaccggtttaaaatattaccaccaaaataaaatccacgttacaaatgtcactgggaataagaatccaaatcaagttatttttttgaaccaaaaggaactagaaactgctagcaatcattcaaaacaagaattataaaatacgtttggttaaaaaccaaatctactacagtaaaaccataataatgacacgtctgagatcttgttctgatgctcacaaattgatctcgtgtgtgttaacctaacaatgaattacacaaagcaaagtatcagtcatcttcatgaagcttacacacacgacagcaaccaaatacacacatgtagcttgagaagtaaacagagtaaggcaacataaagacttgattcacctcacgatcctcttctctcgaggataaactgttttaagaaagcatcttgagaaagcttttgtccaatctcccatcatgcaacatattagtgaccaagccaatggttgaagcatctccaacaaacctgcaactcctcatttctctgatgagttcagctgatgctgctttgtcaccatctctcagatgtgccctgataagcgtattatatgtaccactatctggaagaggcccttcttctttcatttctctaaacaaggcatctgcttcttcctttaaacctttcctacaaaatcctgacatcattgttgtgtaggttacaacattaggcttcactcctttaaggctgaggctacaaaatagatcccacccatcttccaccttccctgccttgcacatcccttcaatcataatattatatgtgtaaatatcaggttccattttactcctttgcagatactcaaacaccaccaatgctgtctctaccttcccattattacaaagcccatctaataaaatgctgtatgtcataatatcgggaagcacaccatcagaaaccatctgtttgaaaactatttgggcattatcacactctctagcttgaaaaaatccatggataagagtggtgtaagtgactgtgttgccaaccaatcctctttgagacatctcgcggaagagttccataccttcgtctactctcttagccttacaaaatccctttataagagtattgtaagtcactacgtttgggaaacagtccttgctaatcatcaactcaaacatgtgcttggcctcgtctaaacgatcgtgcatacaaaacccattgatcagtgaactataagtgaaaatatcaggatctatagaccttttgatcatctcgtcgtacaatttctcagcctctacaagcttcccctccttcacaaatgcatcaatcaatgcgctgaaagtgactacatttggattgattttcctctcaatcatatcactgagtagtcgagaagcatcactccatcttccgtaattacaaaggcatcttatgagggagttgtaggtaacaacatttggtctaattcctttgttatccatttcagtgaacagattgagtgcatcattcacgtttttgtagttgcaaagagcatcaatgatagtgttgtagatcacaacaccaggctctattttcccttgttccatcttctttaacaaactcaaagccaaatcaatatcacctctcttacataatccatttactacaataccataagtaaccagatctggttgacaacctttcacaaccatccggtcaactaaagccactgcttctgaagctctgttgtggcgaaaaagtccatgaattagagtgttgaatgtgaatgaatcgggctgatatcccatttccaccatctgaccaacaagagatacggcatctgaaatcctattcccgtgacagaaaccattgagcagagagttaagcgtgacaatatcgggctcatagccgagtttcatcatcttggcaagaacagctaaagcaagagagagctgagagcgtcggcagaaacagttgatgagaatactgtatgtgtaaagattatgtgaaattcccaaattttgcatctgctcgccgagagagatgacaagatcgaacttgttcatcttagcaatggcactcaacagtttactgaactcaacaatcgaagggaaaggacgagacttgaccatgtcaccgaacagattaaccgcatcatctagcttcaaatcatttagcctatttatcgatatttttctgtaatcatatctaacaccagagaaatctcgtacccagaaactgcaatggctaaaggaaggaggagcagttccacatttaccttttccgagaagactccgatgaacaaatctgtttcccgtcgatgaaatcgcaaacaatctcctcatcttcagctgattggggtttcttccaaaatcactgattcagaatcgtaaactctctgtaaacttgtataaaccctaaatgatgaaccttttgcagacagagagagtaaaggtttgaacttttggttctaccaaaccaaacagagagagagactcacataggctgagagagtgagagtgatattcatccagtttcgcaccaccgttggatcatttgaccggtcaagatttcatcttatcatttttatcaccggtttggtttataatcacataatgtatttttttttggtttagttctaaattgaaaggccagcattagcaaataaatatgaaaaaaacaaagaagattatcaagttttgctattttggttccatatttgtctaactatatttccttcatttttttttttattgctgagatgtccctttctaattaaggtgaaaccgcgtggaccttaccaatttatatcttggattgtaaagatctatatctgtttggttccacttgtatatgatacaatgatacaatacaagtttggtcattatcattttttctaatcatatgtcaacaaaaccaaagtatgcattcattttgcaaaatatacacatctatttgtatcacctcccaaacatttctcccattatacggacttggacaagtattcatacctctgcaaaagtcttattgataaatgaatgtgaaagtacatacaattggtttagaacattaaacacgagtttggtttggacacatggctttcatatactccttagtgataaattatggttaattataaccatctttgaagtttattctaatattttatttattaatttcattgatatggtttcaaacgtcaaggaatattaaaccttttacgaaaaaatttcgggtggatcatataatatcttcccttcaatcctcaaagttctcgaactctaccaatacctacaaggctacaaaaatttatacaccattgaaatatgctgcaacgaagtccatttaaggcctgatgataaattccttggagatcgacaataatatccaagcgattgttagtgagattatagagttagtctttgttggattcaatagtttgttccacaatgtaaaagtcgactattctaaagaagcccttggcaacttattaaatcttataaatagttaaatatcgagaccgtagaaccttttgctatatatagtttttcgtcagaaaaaaaaagtcttcatgctagagaaaaaaaagtttaacttataaataccatgctataattaaaacaaaataacacgtactacaaatagtactagcttatattttctctcttttttaataattaattttctaaaaaaatacatatcttaagaaaatattattaaaattaattatgaatatattattttttgtgttttatatttttttataattaaaaatcaataatatttaattatttatcttgaaatttgatattcatcaataatatctaattaatattgcaaaaaaatctagaaatccatcttttaaaaacacttttttgtataaaaaaaaataaaaaaataaaaccctttttgtaaaaaattcaattaagaaaaaataaaaggagtatatgttttatcttctctttttactttaacaaaataccttgtttttttgttgttttcaagttatatattttgtaatcttgtcgcaggtctgagttgttttttgcactcagaaaagaaacttgtactaaaacctaggagaggaggagctggcaccaccgcctaactcgccattgacacaacaccaaaaactcttctttactttttgttattctacacacatcgataaagattaagaacataattaatagaattccataaataattagatgcactaacttttcaacatcaattcaacggtttaaattcgtgaaaaagcgtttttattttattttaatggttacaactttgtagtttttaccctaaatctctctctgattactgatactctgtctcaatctcttctttcttctaatcctttatttcttgtaagctacttctcctgaatttcgtatttgatccgtttaatccaagtttcgattttatataacaaccacatagacagagagagagagagagagaaacagagtaatggcgaacagagatgtggagagagtagggaagaaaaacagaggagctaataacaattatttctacgaggagtcttctggtgaaactcattggacttcatggctgattccggcgattgtagtggcaaatctcgctgtctttatcgctgttatgttcgttaatgattgtcctaagaaaatcaccggacctaacaaagagtgtgttgctagattcctcggaagattctcgtttcaaccacttaaagagaatcctctctttggtccttcttcttcaacgtaagtattactttaaagttggagattcatgtttcatcttctgggtatctccaaagtctcaaactttttgggagtccaattcgcaattgaatttgatcactattgtctgttcttatggaaattgagctcaaagttttcatttttctgcagtaattaagattacccaattagtgccttactgataacgtcaatgaatttgtagttgaagctcgagattctagaatttgttaatctaagttactggcaaacaagtttgatcttttgggtacctaaaacgtctcaattttttttgttttcaacaaactgaaaaagtctcaatttttgtgttttcaacttggcaattgaatttgatctttattgtctgttagtggcttggaacatgagctcaaacttgtagggtttctcaaagtttttatttttctcctggaattatgtatttagcttggtttggaattatgatttgtaaatttcattggcaattattgtagtgatggtgtttgtgattgatttggttttactcggatatgtacttgtatcagattggagaaaatgggagcattggaatggaggaaagtagtacatgaacatcaaggatggagacttctctcttgtatgtggcttcacgctggtatcattcatcttcttacaaacatgttgagtttgatcttcattggtatccgccttgagcagcaatttggcttcagtaagtcttacctttacgtgtacaagaattattgttcagtcaagttttagactctctttgtttaatcgccaagtgaaacatttgatctttatcgcgggaatgttactgtgcagtaagagtcgggttgatatacttaatatcgggtctcggtggaagcatactttcgtcgcttttccttcaagaaagtatctctgttggtgcttcgggtgctctctttggacttcttggagcaatgttatctgaacttcttaccaattggactatctatgccaacaaggtacttatgcccttttcgctatacgcgccttaaccggaacttaggattaacggcttcttttggcaggcggctgctctgatcacacttctgttcatcatcgcaatcaacttagcattaggcatgcttcctcgggttgacaactttgcacacattggagggtttttaaccggattctgcctcgggtttgtcctccttgtccgacctcagtacggttgggaagcttcccgcaccaacacttcgcgaaccaaacgaaagtatagcatgtaccagtacgtgctgtttgtagtttcagtggtgctacttgtggttgggctaacggttgcattagtgatgcttttcaaaggagagaatgggaacaaacattgcaaatggtgtcattaccttagctgtttcccaacttctaaatggacctgctaatcatcatcatcatcatcataatcatatagtaaaagcttttatatgtgttcttgttaacatttaatctctttgatctctctagcctttgattatttatatatgtgtacattaccaaattcgtcttgtgtaaaaggggatagaaataaaagagtgtattatttttacatttgaacaccatatttctcaaactgtctttaagtacataaatagtaaacaattttattaatgtaaaacataagctgtaattggaaataaattcctttaatttggttatagtacacactttatagtatccatcttaggtcttgtagattattattcttcctttgcttcaaattcttctttctctagatctctttcttcttgagtttaacatgatagccatttggaaattgcaatccaggagttcgaagtatatttcctccactagtttcttcccatctgatgaaatccaagaaacaaaattacaaaatcaagaaccattagttgtcttaacttaacagatgaaaaaggagtagtttcaaactgtattttgtgactgagctatgaaggaaaactgcagtttgaagtttgaactttgctgaagtcagctccgatacacaaccgcattccatcaccaaacgccatgaaattccatcaccacacgccatcaatacaatatataataccaagatatgcaatcatgcatacatcagcttcatgcaatatatgcataatttttaggagatttcagatgtcacaagatcgaattgaacatatattttcaacagtgtgaaatacagttatacggttagggtctgatttttgtttttggtaccacgtgggttttacaagtttttatgatattacaaataaattaataatgcatcacacttcatttattgtgaatgggtgacttttaagaaaacaatgaccaaacaccacccaataaccttcctgcactgtgtcatttaggccttaatggtgcagtggataaggataaagtacgggacatagacaatgcctttaatcatccaccattcacaaatgataataccttgtatacatgcgatgtaacttcaaatatagggatgattgtgtgctttgcggatcaaaacaagaactttaaaacctctcggtaaaaagtacaaattaatggttactctaaacggaaaggcacaggagatttgttatttatatgatgttctcaaacaaagaaaagctactcacacaaatcacatgttgccaactttaagctaaagacccaactcttttctttacgtgtaacagaaaagtggcgcaatgaccttcaatggcttagctcttgacttctcgatggtttgagtttgatctcttcagcgccctgtcatggtttagcattgcgcttacgctctcaaccacgaaaacgatctgtaaagaaaagcagaaacccgtatgcgggttttagtcaagataacccaaaactacaacattctttgatcaataactgatgatctcatcatcctctgcttgatatcatcaaattttgtactatatgagtatcaactcccaactactgaatagaataatgaattttgaaatggatccaggcctatattttacctgaaagcacgcgtagccgatagcgtttccaaagtagaaatttgcatttccggttccctgtcatgaaaaaatcaaaggtagttgtgatcattagaacattttgttgcaactgctgtgaagagttgggttatggatttgagtagaagcttacccgccatatccagagattgtgcatcacagggctgaggagagagatcccgagatatccacagaagaggaagaacgagaacttcatatctatgtgaaacagaagcagagtttatatgcaaaggctaaacaatgctaagaggatgtgaagtatttgcttttacctaataactcattgacaaacaatgcccataagctcaagtataacgccgaatctccgacctattgagagtaaatcaaatgatgaaagcattgttaacatttatgaatataattcctcaaagaagaaaagataacttcaagttcacagtgaattcaactacttactgaaggataagatttaagaatcgaggagatcgctaagtatatgaaagccaggaaacatggccgatgtttcaaccttatggctaagggcagtaacatgaacagaatatttacgtgtaaaactatcagaaaaaagtttctgaagaagtcgaatacttctgcaaagaagtacctgaaaacgagatttaaaacgaacagtaaatagtcttttcataaaagaagggatcccttattcatcacccaatgatatcaccatattaatttattttacttaccaaaagactccaatgtttggtgaaagatcttcaatactaagaatgaaaccatacgtcctacaataggaggcaaagacaaacaaacatcaaatcgcctaaacactacgttgcaagttcttaataaataattatatgatttggaatataagttatagatataatatggctaacggaaactaatcctatagcggttatgaataagatttctaagttagaggctacctcttgaacatctcctcaagcccaccatatttattcagtgataaggcacataaaatcaacacatagagtgaccacagaagtacccagaacaagaagtgtgcgactgttttccataagaaaggaaggtgcgtagtctgtttcaacttggcttgtttagaaacagtagaggttgaactctcctcattttctacacttctggtctgaaggaacaattttataggaggagcatccaaaccatatcccaatagaaagattatctgtgggaaatgcacgagcagttagaatttgtttaatttgagaaacgtgaaaaacataaaataagaaatgatacatactggaattgtcagagtagcaggataaagagataaatgtgtggcaatgactaagccaaatgctgccagaggaactcgtcctgcatgggtagaaaacatcagttataaaatttcaagaaactattgaacaaacaatatgcaagtatcatcatcttcttacgtgtaactgctccaaaaagcgccaatatgacagccaggttttcgatgggagaagttgataagcccacacaagaaactatcgtgaaaggattccacaaatacacaagagcagcaatatcaccacaaggtaggatcactgaggagacaacgaaaaaggagagatcaatatttgccttcaagtaaatagttacaagaaaagagtagaaataagatagatgatacacaaaattcaacaactgacttcaatctacctttatcccttgatgacttaagaaaaccaagtagtctcgcattcagtccataagccatctggagtttctgaccaatagctcgaagaagcattgcacttaatatatctgcaataacaaaaaccaagctgtatccaagagaatgttggtagcaacgacatgactataaagctcttgatgaatagtaaatcattcaaagatcatctcttttccaaattcacatctcacaatctaatcctacctaagattttaagctagctcaaatctgagaagaaagaaaaaacatgtgatcacagaaatgaagggacactgaaaagtacctgcacaagaggtgacttggttgccctttaatcctgcaaacacacaaattgtcttccaataaaactcaagtgggaaaaaatcatgttttcatatgattcaagctcaataaatcacaaatcctaatatcaaaatcgattagtcactacctttgaactgtgagaggtccaagaaccgagagcagcaatggtgagccatgatacatagatcctgctcaaatatgtacaacttcagcttctaatagcctaagaatccaaatttacagaggatcaaatcttaagatagacctgcatatggtgacatcgatgcctgcttcaaccaataaccttcagcaactgaaaatgttcatacaaaacgaagaaatgtgagctgaattcgagatcttagagagctaatgagggagtgagaaagagagaggagatacggcggcgaatgctggtgagaggggtagagacctccggacgggaagagagattgagatttcccgggaaggagatcaagatcaatcggaaagcaatggaagataaagcccaaatccagaatcggcttagctgcttcattttctgctcctccgccatttctccgtcgtcttttcttcttctctctctccggcgagtgaagagagacgactcagatgaaacgacgacgtatttgatatgatcttgttaaggtttggttccggtttgattttttcggtttatgatccatttataattcggtttgattaatgtaactctatatcggttcggttcggtttttgtttgatgcatttcggtttcgtgtttgtgtgataaacatttttccaatgtaaaatatcatatgaagaataatcatatatttacttttttatcttgttgtaattttgaagagaacactaaatacatatattatgcttcgttaaatacttatgtgcttattaactttttatgtttacttaattacgttggtacgttgtgtgaactgctctctcctgcttcgttctttgctttcttctttacttcctctttccttgcttcttcttcttcctttattgcttcatctctagctttcttcctttcctttgcatcaacaaccgcttttcgcattatgtctagggcagtttttgatttctcaaagacatcatcccccatcttgtctacctcgtcaagatctcgaagaaaattaggatctgaatttgtacttcgtataactcccacgcgatatgcaacatgtttagctgtgttgatgatttcctccatttgtgaaaggatcgggtttgtcacggctttaaacgcttcgtctcccaaatctgtgttagtggctttcatgtaagctgtatagaaatagtctacattcgtccttgctttcttggctttggtgtttatctctgtataaatagattgcatcttaagaaccaaaaacaaaaaagagttattgagttttttatataatacgaataagagctagctagagagaattgtgatgatgcacatcctatatatatacacacgtttaacaacttgattagcaagttcaataactatcgcaaaagtgctttattcgctcataagtcataatcaacctcccaatttttttttaacaaagtatagtttatgtgtacacgcttaattaagccaccctcccaagcttagtgtttttttcttactttttattcatcaaactcaaaggaaatgaatgatctaattcaaaactaattatacaaatggaattccacaatgcacaatgaatggttaacgtgggagggaattatgtacctttatatcgtttaagaacaatccttttaagatacaattattttcttatttgcatttggtttagctttcatgcaaagtttattttctttttttggataacgacttttatgcaaagttctctattaatatagctcttatcctgttatatcatctgtatattgtagcatgatttcttacagagcacatgataacaatccaaaataaatatatgtgtatatttgtgctaagtgtatctatatataattatatattattcattaatatatatgttaatatctacttttatgtgtatagtttagattttgtacatagattcagatttgatttttagtctagtgattaactagattatgttcatactattttagtgtttcctagaaaatcattacaacccaaatacttatctaaacatcttaagatagagttttaagatgttaaacctaaaaggtcctagtgttaatgaatgaaaaatatcaattattagggaaaagatactagaaattatatacatcttgaattaatcattaccattagattaaaatgtatttctaaatagtttccaaatatttaccctatttcttattcttatttatcagtaaaattagacaacattttgatacaaaaagaaacacattttgcccatctttattaataggcttattaaaaaaaggtttattaaaaagcccattatatttgctagtaaagcccattagttttgaaattttgtaagctctttatgtttgtgaaatcttgcttatttgtttcatagctattctttggttgcgaattttgttgaaccttaacctagtgtggaagcaatgccggaacctctaattttttgttaacgcaattcaagaaactctaggaaggccagaaactctaatttcttgtgaatgcaattttacacaagtttcaataaaaaaaaattgatgcttagtttcgatttctggtatgttccatgaatattgggttttttttagacgttataaaatgtaaaacttcaaaaaacattgacatacgacaattgaataaattgaattagtattggggaagtattttgcgtagaaaaatggtacatgtaaattattggtataataaaacaattataaaaagatttaaggggatgcgtaagaaaatcataaacaatcattcttactaatatagagaaggaattagtaaatatatttcacaaaactggcaatatttattaatgacagataaatttagtaccctaaatagttatttggactttgtacaatgatcatttgtttttttactgcgaatgtgtcatagtctaaaaaaaaacaatgtcattttttggtgggtgtattaaaaaaagtcgttgttggctttcccaatcagaagtcattgatgtccgtacacacccaacactctcttctttcttcctctctcccaacggtcatatttctccgacaattcacaaacggtcaccaattttctaccgtttgattttaaagatccaacggctcagatagattcagatccctcgtgtaccactcactctgcccaactctaaaaaacaattactgtaaaaagaaaagtcgccaacttcaattctcgaagacccaacaagaaaacaaactctaaaaagttgcctccactatggtatttgtagaagctgtatagtatctcttaacccctgtagagagttagagagagagagagagagagagaaaccaaaagtgagtgagagaaacagatagaagtgagagtgagagtgagagagagagtgaagaaagtaacaatctttgagagtttttggatcttgatcttgtgtttcagtaatctcctagtgattgtctgatctgggttcttgttgattttgggtttctggatgttctgagagatttttcttgatttggcaaaaccagaatggcaaaccggaatggtgaaccgggtttacagcaactctcaagtctgtttatccagcaacttcgaggtcgttcttcagtagtctctgttcgtgatgatgtgaattcgttggtcgtcattatcatctaaatgagattttgttgttttttataaagtttaaggaatccgatgattgttttatggtagattgatttgatttagtttagttcgataattctttcattctttatttgattatatagattcgttggttcttttggggcaggggattcaaattcatttcattcttcaattttttcatataggattcactttgatttcactaaaaccaaaaaaaaaagattcatcggattccatttttttaattgtttgagcaaacacacacacacttgtagaccatctcttgaattgggttaggtagattttgtagaggatgttggcaggttgttcgagttcatcattgttgtcgcctactcgaagattgaggagtgaagcagtagcagcaacatcagcaacagtatcagcgcattttcccatgaacacacagagattggacttaccatgcagtagtagcttctctcgcaaggaaactccttctagcagaccacttggaagaagcatctctcttgacaacagcaacaacaacaacaacaaaccgatcgagcgcaagacgaagaccagtggttgttcgcttaaacagaacataaagcttccacctttggcaacaacaagaggaaatggagaagggttttcttggaacaacgacaacaacaacagagggaagagtttgaagagattagctgaggaggacgagtcttgtttgagcagagcgaagaggacaaaatgcgaaaacgaaggtggtttctggtttgagcatttcactggccaggattcttcttcaccagcattacctttttctttgacttgttcaggtgatgatgaggaaaaggtttgctttgtgccaagtgaagtcatttctcagcctttaccaaactgggttgattcggtgattacggagctagctggtataggcgataaggacgttgagagtagccttcctgcagcagttaaggaagcatctggaggatcatctacaagcgcatcatccgagagtcgtagcttaagccatagagtaccagaacctacaaatggctcaaggaatccgtactcacaccgcggtgcaacagaggaaaggaccaccggaaacatcaacaacaacaacaacaggaacgatttgcagagggatttcgagcttgtcaatttgcttacgggatgcttagacgcgatcagatcaagaaacatagcagcgattaaccatttcattgcaagaaccggtgatcttgcttctcctagaggaagaacaccaatgactcgcctcatagcttactacattgaagctttggctctaagagtggcgcgtatgtggcctcacatcttccacatcgcaccccctcgtgaattcgatagaactgtcgaagatgaatcaggaaatgcattgaggttcttgaatcaagtaaccccaattccaaagttcattcatttcacagccaacgagatgttactcagagcatttgaagggaaagagagagttcacattattgacttcgacatcaagcaaggtttacagtggcctagcttcttccaaagcttagcttcgagaataaatccaccacaccatgtacgaatcactgggatcggagaatcgaaacttgagctaaacgaaaccggagatcgcctccacggatttgcagaggcgatgaatcttcaattcgagtttcatcctgtagttgatagactcgaagacgttagactatggatgcttcacgtcaaagaaggtgaatcagtagctgtaaactgtgtcatgcagatgcacaagacactctacgatggaaccggagcagcaattagggattttttgggtttaatcagaagcacaaacccaatagctctcgttcttgcggagcaagaagcagaacacaactcagagcaacttgagacacgagtttgtaactcgctaaagtactattcagctatgtttgatgcaattcacacgaatcttgctacagatagcttaatgagagtcaaagttgaggagatgttgtttgggagagagatcaggaacattgttgcgtgtgaaggaagtcatagacaagagaggcatgtgggttttcgtcattggaggaggatgttggagcagttagggtttcggagtcttggagtctcggagagagaggttttgcagagtaagatgttgcttaggatgtacggatctgataatgaagggtttttcaatgtggagaggagcgatgaagacaacggcggtgaaggcggacgcggcggtggagttactttacggtggtcggagcagccactttatacgatctcggcttggactaccggagggaattaaagtttgaagaaaaaaaaaaaaaaaaattatacatttagggttttaaagacttttagaaaaaggggaaaatgtttttttttttatcaaagaaaatagggaaaatattgattttattctttcattcattatttgggagcgggtaggttatttttataaaaaaatgtaagaattaaaaaaaattattttgtattagttactttggagtcttttacatgtaacttggaggcttttgaatgttttgctatcaataatgaaactgaagtattatttttctttacagtatttattgcaaatatagaaagtttagtgacatatttgttttattaattttggtaagaaaaatattctattatattgaagacaacaaatattatgtttgaaaaaaaaaatcaccactgtgaattgtgaaatgtgaatgttgatatgggccttgtatgaggtcggcccattatattccagtaattctcattctctactctttggtttgtggaattagtcttttcaaactttgtatcattcatggctagttttcgcattgatgaattttttttttttaataagactagtcaagtcattttcgccagcgttttgaagtaagttaattagaaatatcacttatttattagtattatactacagaaaatagccatcatgcttaagaattgttgaagacaatgaccaattttccataattttgctatgtttataactcaatcaacatcattttcaaaaactagttcataatgtaatttaattattgaaaatatataacaaaaaaatctatgaaatatatctatagtagaaattttttttaatctaattatatatttttttaaataaacgtttatatatatggatacgaacttttcttaaaacaaattaaagagatctgttatccgcgatgttattttgatgtaaaccacatttggattccacccgcatatttctcaacttctcgtctctttagagtgcttaagcgatttctaatgtttttagcaattaacttgacaatcttctctgttgtcgaaaattgctcttcgtgccttctgtcatttctttcctttaatggatcgcattctgaaatacaaacctgaaaataatttttttagttttgtcatgatctttgctcccaaacttcttcatcacatctagccacttctccaagaatttgtataagagaatttcacaaaccagtttttcgcattggaataacaaatgttccgtgtctccaacaggtgtttgcaaaatacatagcttgtctctgcattttgttttccatttaaccatatattctttctcgtgtcgcaactctgtttttcataatcagtcatgtgacaaagctatacctctttgttaaatatatgtaaaatatattgttatgactatctataacaatcacttgacaacggtgtatattacatcgtatacatatatatatatatatagactgctaatgacttcaaaccaatcactgttcacagattttgtttaatattcttatgtagatataaacctaattagtagttcccctagctagtatctatatattcgaatgattttctttttgtaatttagacgcacggaagtatttgtcgactagtagtgtatttcaaatcaatcaccattaacagattttatttagaatttgttttgacgtgaaaattaaatcaaattcgtaaaatatctcttaagcaaaaaaaaaaaagtttgctaaaatcctaacctcaaaaaggtacaatttatttttataatttaatgataaaagggtaccaatttgaacgtagttttatgctataagaaacaaacaacaaaggacaagttgcacgaagtttgtctgctacgtacttcttctatgttccgccgataatgtcataatcattcatttttattttttatttgcttatgtattttacagttgttgtgatgtttaattctgatatttgtcgtctaaactcgagtcttatctcatatgggtcactttcggtaatcagattgtttcgactagtgatattttttctgcctataatttaccaattggtgcatgaaaaggtttaaaccatacaatgaggttggtcggaaagtagttcactattgagtggtaaccacattccaaattatttttgtggtcactaggttaatccaaaaaacaaagaaaataaaatcaattgttagaagttcgtataaactgtaatcaactgtatttatattaaaaaaaaatattatatatttatttgttaaagaaatatgaataaatgttgtccaaagaaaatagatacataaaattaaatctgaaagatggagaatcaaatcaattgttatatagctagagtcattatcagccaagaatagacacataataattaatggagatagagatttttacgtgttcgaaacttccaatacacacaaggactcgaactaactatacgaaactcattttcgtgctgaataattataaacatatacttaaaccaaaagctcatacatacaatttcgtcaaaagtatcctaactaaaactaattaagacactcttcttcttctttttttgacaagaacatcaatcagacaatcaacaccattatcattttcagttaaaattttgaatttcgtaggcttacaaatattcttatctttagggtaagttggattattttatcttgggttgggtcggctaaaacatgatatttaatcatggaatttaatagagtacctagtacctaacctacctacgtgtagcctatccaaatactgataaagactgtatctgtatatattgtatagttaattagacgagcatggtatcataatacaaggattcaaaagaattgcacatgacatcactatataaatagtggattccaacttaatttccaatcatatttgagcaattttaattattatttgttcagtttttttcatggttgtggttggttgcttattcattccgtaacctttcggcagccaaaaatatagcatcagaagaaaattttaaatattatgattctttacacttcgcaattttattgtcttcttttcttttgtggtcaacaatgacatggatggctgatccgaaccaaatttcctaaaacaaatctggaaagtttatacaaagctgaactactttttttttttaacagaacctgtactattgttttaaaaaaaaataaaattacacaagctgaagtataatcattagactactatttttggttttgaatttccactattatgtaaaaataataatattattttaaaatagtgataatatgtaatcaccattataaatttgtctcaaattaccaatttatctgtctaaatttatatgaaatcaatacaataatttaactagtatcgtattcagtttgagtcggtttactctattttgaatatcaaaacaaattttattacaaaatattcatgatctaggtttatttttctttttggtttattattagcaattataccctttattaattaatattcacgtatacctatgatatatttatgtaatcaataagaaatgtaataaaatgtaacaatgtaaatacaattctatatacaatacattttgcatgttactagtaaacaaaacctatattgataaaatggtaaagtaatatgccatgaacttttagaaaacattaaccaaataataaaaaaggattattaaacggatcaattgattattttcgttcaaatctagcagcactagtttgttggtgcttttgaactaccaccaacctcactcaaataaacccttagaaaattggacgactcaaagtagattccagatgataataatattattttttggaatttggatactatgggtctaatttctaaatccgcgtcgtatttttgcatcgtcatggtcaagtccatattacacgtccacaacacgtacattcacacgtgccatgttttccacttctcacctttcacacgtggcccatatcatgtacgcgtagttaggtcgtattattagtactgtatttttattcagcctctatttttcactcaatacttctattttcaactggtcgtcatgccgagaaaacaattgtcctatgatgatctgacaagttatcacataatcactggtcgacagaatgtgggaaataaaaattcattggtcgacagatgaaaaaatatctggttgacaaaagcaaaaattgaataaagtaatagtaacctttacaagatatttatttattttgctaagaatccctgcaagatatttttgcataaattaaaattatagcaaatattcagcctttagtcgaacgaacattcgattttccttatgacacgatgaattctcactattgagtattttctttctattctatcgtatacacatctctttattgtttgtttatatcgtcttcataatagtagtattttatgtgcggtgacgtaaggtttaattaatgctttatttcattgtttgtaatggatgtggaatatttgtagttgaaataattgcaactttcggtgactaccaagggatggcgttgtttatttatagacattccctaggtcaaattgacacccatttttatacatggtccggtgttatgataaacttttgtccgtgattagaaccaaagagagaacgaatacaaatcgtaaataacaccaacaaatatgccagctaatagcacaatgtagagtttgtctttgtgtgctgacacttagtgcttttgcttggattcataaacattatcattggacgtacgaagatgttgtatacattattttagaaagttcgaaaaaactaacaaccaattcgcaaacctttacacgtttttgttatgtgttacatagatctagtattgactaatgaacgtttgttctaatgttgttatggtttaaggaagaaaaaaaagttttcaaaaacaaaaaacaaatacattatatatgttcaaatcgaatttttgattttttacttgtaccaatattgttttatgctagagttagagttttagtaatgtgatcactctatttgacttgtctcttattctctcaataccttaaataaatctacttgtattcatctcttcttgaccaagtctcttagtatttaaaaaaaaaaaaaaatgtctcttagtattcataaatatatattgtagttctatataaatttatgtatctcaatctttatgattatgagaaactttcctattaattccaattctctgaaaccatcatctcgacattttagacttttagtggtacatcgtaagaaaaaatgaaaataacttaatacacgcgttggccgttgatcatataagacttatacgcatttgttactgtacttaccataccttcttttgttttttttattcagcagatctgagatatcttaagttgagcaatgttttgtaaaaatgttacatgtataattttagaaaaaattaaaaattacaatataaatattaattatttttgtatgtaagaaaattatgaaaatttaaaactatatagaatatataaatgttttaaaaaatattaccaaaatttacaaagagttgttattgtgagaaatatgaatagttgtagtgttgtagacttctcacagctcatatattacatgcatttggatgttgaaagagctgaagactgatatttgaaatgaaaaacagaatctaatatttaagttttattttgtaacgcatggaaaaaattcttgtgaagatgatatggtacaaatattttattatatatacacgtttttaagatagtaacatggaaaatcatgtgaggtttataaggcaaaaaattccattatattatacgttacaaaaagaagtttaagataactattttattcatttttttaaagaaaatatcgtaatattttctatttcacttgctatgttggcttttaatataaattctatattagttaagatagaaagtaataaaaactcaaatatattattgaatgatatatgaataaattgaattggaattgattcatattcagaaaaagaaatatctgataattttttaatatatattaaaattctcaaaaatactatatttttatgattgaattaaaaaaaggagatatccctaagatttactttaggacacatttacaaaaacagttattatttttcttatgtacaaattacaaacaaaaaaaaaatgttcaaatgcttagtcacttcatcattatttggataaatacgaatggttatatacttgtcttattgttatatctaattcttacaactcacatatacaaacatttggatgtcgaaaacaaatctacggctaataatttccaaatttaagataaaatagataaaagaaaatccaaaatccaacagattgttttcatactacaacaaatacaagaaacaaaaaaatacatggttttgataaaactgcaacgatttttcacatataattagccaaccaaaaaataaaataaaagttgaagtatattttattgacttagttaattaattaaataaatccctgagtttgaagcaatatatatataatacacatatcccctcccatttgcgtcagcgtccataaatcagaatccttacaagaccatttgtgtctgtctccaccaaacccttcttttctccatttttcttttttgctttgtttctgtgctacgatttgtcaaaaaaaagaaacccaaatcaaaagcttcgaaatttcataagatttctttgtttttctgaagatccaaggcacacaaaaaaacagctttttttgtttcttcaatcaaggattttccagggttttgataaccccatgggttcagggttctctctgtttcaaaagaatttatcgtcttgttatggagatcgagatctgttgcagcctggtttaggagatttgcctgaaagttgtgtggctttgattctccagaatttggatcccgttgagatctgtagattctccaagctaaacacggcttttcatggcgcttcttgggctgatttcgtttgggaatcgaaacttcctccagattataaattgattctcgagaaaatccttggtagtttccctgataatttgcgtaaaagagacatctttacttttctctctcgagttaattccttcgacgagggcaacaaggttcgtctccttttagatttctttggcttcaagaaatttttttagggttcttcagaaaaaaaaaattggggatttgttttgttaaatggttcacatgaacggttttaggaaatgatttcataatatgcaaaattttcctgtgaattagagaagaaacttaatgtttttgatgttttctgcagaaagcttgggtagataaacgaacaggtgggctctgtttatgcacatcagccaagggcttatccataaccggaattgatgatcggagatactggagtcatattccgtctgatgattctcggtgagattgtgtttctcttctgttgcttacccaaatcagattgtgtttgttaagtttgggtgtacaaagttagttgagttaaggttgtagtggatacaaatcctaactttaatctaatgttgtgtgatgctataattctttatgtttgctatgattgaaaaaatgacatattgttcattgtattggatacaatcatacgaatcctaacttttaaccgatgttttgcgttaccatgattcttaatttgacgatatcctctttgttgattcctgcagatttgcttcagtagcttatgttcaacagatctggtggtttcaagttgatggagaaattgatttcccatttccagctggaacctacagtgtttacttcaggcttcagctaggcaaaccaggcaagcggtttggttggaaggttgttgacaccgaacaggttcatggctggaacattaaacctgttcgttttcaactctcgactgaagatggtcaacattcttcatctcaatgtatgttaaccgaagcaggaaactggagtcattaccatgctggagactttgtggtcggtaaatcgaaaagttcatcgacgaagattaagttctcgatgactcagattgattgcacgcatactaaaggcgggttatgtgtagattctgtagttgtgtatccgagctcgtgtaaggaccggttgatgcagatttaagttgcaaaccggagtttgggtgtagtttagaggtttaaaaaagctgttttttttttttaaagtggttttaaaaccttttgtagaatctttgagggggtaattagaaaactcagtgtaaagagaaaaagagggtaattactaattagggttgttgttttattgtttaggtcaaatgtaaactttaagtttgaagttattaaagagttcttgagttacaattttttctgttggaggtttgtgtgtgaagtgaaacgcaacggttaatacagaccggagagataaaccacttgaaatgataaacatatgttaattgcagtttgtgctgagtaaacctattcaagacactttgacgtaactaaacaaaataaaaccaaatcgtaccggagaagagaactcaatcagagtaaaccggtcggttattaaaactggaaatgataagatgatatcttgaccgtcaaagcgagatctctccatcttcaggttaagcaacgacgaactgtgttcattttagagtttgttaaaagatccagagaagtatcacaattggaaagaagatgagtttggcgaagagatttgttcacctgaggaaagcttctccatcgttttgccttcgaggtatctatttctctggtttgagttatgatggctacagagagaaattgagtagaaatgcgttactccatttgaagttagatgaagctgttgatctgttcggtgaaatggtcaaatctcgcccctttccttccattgttgagttcagtaaattgttgagtgctattgctaagatgaagaagttcgatcttgtcatctccttcggggagaagatggagattttaggagtttcacataatctctatacttacaatattatgattaactgtttatgccgccgctctcaactctcatttgctttagcaattcttggcaagatgatgaaacttggctatgggcccagcattgttaccctgaactcgcttctcaatggtttctgtcacgggaataggatatccgaggctgttgctttggttgatcagatggtggaaatgggatatcaacctgataccgtcacatttacaactttggttcatgggctttttcaacacaacaaagcttccgaagctgtggctttagttgaacggatggttgtgaaaggttgtcaaccagatctggttacttatggtgcggtaattaatggattatgtaagagaggtgaacctgatttggctttaaatctgctcaacaagatggagaaagggaaaatagaggctgatgttgtgatctacagcacagtcatagatagtctctgcaaatatagacatgtggatgatgcactcaatctgttcactgaaatggataacaaaggtattagaccagatgtttttacctacagctccctcataagttgcctttgtaattacggaagatggagtgatgcttctcgactactcagtgatatgcttgagaggaaaatcaatccaaatgtagtcactttcaactcattgatcgatgcgtttgcgaaggaggggaagcttatagaggctgagaaattgtttgatgagatgatccaaaggtctatagatcctaatattgtcacttacaattcattgatcaacgggttttgtatgcatgatcgtctagatgaggcccagcagatttttactttgatggttagcaaagattgtctgccagacgtagtaacttataatacacttataaatggattttgtaaggctaagaaagtggtggatggtatggaacttttccgggacatgtctcgaagaggattggttggcaacacagtcacttacaccactcttatccatggattttttcaagctagtgattgtgataatgcccaaatggttttcaaacagatggtttctgatggtgtgcatcccaatattatgacatacaacactctgttagatggactttgtaaaaatgggaagctagagaaagcaatggttgtattcgagtatctgcaaaagagtaaaatggaacctgatatttacacatataatattatgagtgaagggatgtgcaaggcagggaaggtggaagatgggtgggatctattttgtagcctcagccttaaaggagtgaaacctgatgttatagcctacaatacaatgatctcaggattctgtaagaaaggtttaaaggaggaagcatataccttgttcataaagatgaaagaagacgggcctcttccagatagtggtacatataatacgcttatcagggcacatctgagagatggtgacaaagcagcatcagctgaactcatcaaagaaatgaggagttgcaggtttgctggcgatgcttcaacttatggcttggtcacagatatgttgcatgatgggagattggacaaaggatttttggaagtgctttcttaaggtcgatcagcttttcatgttacttttatattggttatttctaaacgcagtcattatgttctcatgttacatgtgtatgtagatttgaatagcagtagctattgtgtataagcttcttgaacatgactgaagttgtttgtcatttacctgctaggttgcaaacatgagttgatctaaacgctcattgatgcaagttcaaggttaattcccggccgggatttgtatttttgtatgttcattgcatttgcacacggaaacatacaagaagacagggatattgtgggtttagtttcattttagaaggttacatatgtgtttccttagctgacagatactatattgcagcaaatttggtgacattccaaagaaaatatgacaaagaatctgtcagttttcggagtaattagtcaatgtttgtctcatttctatgttgttcttgatctacacaaaagaatcaactttcatggatagaagaaagtctttcaaaataatcacggaagtcgggaagaaagagatctagtacagtaactcatcctcggaaattccggtcactggaaaaagtttgggattggtacaatgccttctgaaactttcttcaaagactgaaagttccgagattgggttgctatgttggatctctgtcttctcaacttcatgtgatcattttatacctcacaagcattgagaaatatgaaagatatatacttactattttcttctgttttcatgaaagttattggtttttgtgttgactaagaacattgaggcaaccattgcctgatattaaagacagatagattcttttttctccttttttgaccgaacacgcttcagaagttttagtagcagcaacaacggaggattctttttgatgtagctgacaactttgtttcttttagtattgagctctttcgtttatgtctttgttttcttattgatgggtttttgatggtacagttctcctccctttccttccactattgattgatttcagtatacatacggttgctgttctgtgtaagcttcatgaagatgactaatattgtgcatttgtgtatttcattgtcaggttaacacaagatcagtggtgagcatcataagaagctcttcccttcatgaagatctcagacttggtttgacatatgattattgttctacagtagatttgttttttaaccacagttggttctgtttcttgtacacaaactttttgcatctgtttctagtagtaatataaatgaaacatgtaaaccagctttagttcggtaaaaattagtgaatgacactatttttggacaccttttagtttggtaacaatctaaaagtcgaagcgaggttctaagtaagttggtagcattgatgtcttcatgtagtgttttagatctcatccttaatggtttaatttaggttcaattcacggggcacatagttcatcgatttgttgattaactaactagggtgaaaatgctaccaaaacacagctctggtggtttgatcatagtgctctcgatgtttttttttcccctgaaagtcaatctccggtttatctataaaagagaaaaaagttatgaccggtttaagaaaaccagctgtaaccgaatcgacattgaaccaactgctctcgattatagggtttactggattctgcgattttgctgttagtgtagtagtctcaactcattgcatggggaagccattttcgaagcaaccaagaagatgatgagatctgttgcggttattggcaagaaatgtcttcaccggcacactgtgttacttaaaggtaatcctcgaactactctttgttgggaacgatcttttgctggtgcgagttctgatgattgcagagagaacttgagtagaaaagtgttacaggatttgaagttagatgatgcgattggtttgttcggtgacatggtcaagtctcgtccatttccttcgattgttgagttcagtaaattgttgagtgccattgctaagatgaacaagttcgatcttgtcatctctctcggcgagcagatgcaaaatttgggaatttcacataatctttacacatacagtattttcatcaactatttctgccgacgctctcaactctcacttgctttagcaattcttggcaagatgatgaaacttggctatgggcccagcattgttaccctgaactcgcttctcaatggtttctgtcacgggaataggatatccgaggctgttgctttggttgatcagatggtggaaatgggatatcaacccgataccgtcacatttacaactttggttcatgggctttttcaacacaacaaagcttccgaagctgtggctttagttgaacggatggttgtgaaaggttgtcaaccagatctggttacttatggtgcggtaattaatggattatgtaagagaggtgaacctgatttggctttaaatctgctcaacaagatggagaaagggaaaatagaggctgatgttgtgatctacaacacaatcattgatggtctttgcaaatacaaacatatggatgatgcattcgacctattcaacaaaatggaaactaaaggtattaaacctgatgtttttacctacaaccccctcattagctgcctctgtaactacggaagatggagtgatgcctctcgactactgagtgatatgcttgagaagaatatcaaccctgatttagtctttttcaacgcattgatcgatgcgtttgtgaaggaggggaagcttgtagaggctgagaaattgtacgacgagatggtcaaaaggtccatagatcctagttttgtatgcacgatcgtctagacgaggccaagcagatgtttgagttcatggttagcaagcattgttttccagatgtagtggcttataatacgcttataaagggattttgcaagtataaaagggtagaagagggtatggaagtcttccgtgagatgtctcaaagaggattggttggcaacacagtcacctacaccactcttatccatggattttttcaagctagagattgtgataacgcccaaatggttttcaaacagatggtttctgatggtgtgcatcccgatattatgacatacaacattttattagatgggctttgtaataatgggaatgtagagacagcattggtggtgtttgagtatatgcaaaagagagatatgaaacttgatatcgtcacatatactactatgattgaagcattgtgcaaggcagggaaggtggaagatgggtgggatctattttgtagcctcagccttaaaggagtgaagcctaatgttgtaacctacacaacaatgatgtcaggattttgtaggaaaggtttaaaggaagaagcagatgccttgtttgtagaaatgaaagaagatgggcctcttccaaatagcggtacctataatacgctgattagggcacgccttagagatggtgacgaagcagcatcagctgaactcatcaaagaaatgaggagttgcggatttgctggagatgcttcaacctttggcttggtcactaatatgttgcatgatgggagattggataaaagctttctggacatgctttcctaaatcagtttcatcatccgctagaaaagtggtttaatagatcaaacatctttcctttaaagcatgaatagactctttgtattgcttgtattacttctcaatgaagttaggtgaggttacgttttcatgttaaagttgttgtttgcaagttgtttcatggacaggactggtactactctttgtcaattccttgataggttgcaaacacaagatcagtgatgatgaaagtcttcaatatgcttattcttagatatattgtctgataatgtaaaaagagaaacaacttgggaagaaaaagaaagcaactttatttgaaacaagatcaaagagatcatctatgtacaagctcaaagctcaaaattggaagaaaaattgaaaagataaatgcattttttacttgaaagcaaaaaaacatcttatttgattcttcagaaagttttcagattccctttggagccacgccgacggagttcaatgtctctgcatttcgaggcctttgcaaaaacaaaacaaaaatgttagatttcagatttctattttcttctttccttgaaaagtgtatgaagaaaggtcattgaacttaacaatgttcctcgggatagctcgtttgagcatcattaattaagcagagacaaaaaaaaaataggtcactgaacttacgtggtgaatgggttaggtcgagtgggatcagataagattgccttagatttatcttgaatctgacctactttacgtaaccaagacttgttgataaatttgtcagcagaggaaacacagttttctggatcatcgacttccgcgacagccgctcttctattctttcttgtactgattgccggtgcatgcataagctgttgcttgaggctatgcccggccattagtaccgctaaaccaacaaaacctcctattatagccactggtgcaaactctcccattatggagaacctatttgaaaaatccattgatatcaaaaactttgttgaaatgctcataactaagtacagaaattcaaaccatatatattagtatctcttacttgttatatgtttgtttggcgccatcggcgactgtggttgcaaaacgacgagagccaccaaattgatttccgaccggtcgcaattggctctatagagaaagacaaggaaattattgaaaaggtaatcaacatttacatttcaatagacaaggaaaaaaaaaaacttacggtgattctgaaagccatctcggtgaaaattaatttgctgaggatttaacaagcttgaagagaaagatttgattatatttaaaccaaaaaaaagataagaagagaaagattgattatatacacagtgaggatgagactatttaggatctttgtaactatgaatggagaaaatttcaaatgacatcttataaatagacatacagaaattaaaccttaaccattgattgaatttttttttttttaataaatttggctaacaatgtttaaacaccacaaaagaaaaaaaaagaagaattttcttcctctcgatttagattttttttttgtgaggaaaaataatattcaccctataaattgtataggtcagttagaggaacatataatgagataaggaaaaatatgaaatcttttgtttaacaaacaagagatgaacaaattgaggaggaatgacaaccattgttactttcaaccatttgcgtcatatgttttcgataaaataaaaagaagaagtaatgatatgttaagtagatcgttgtattacaaatgtagttaaaaaaaaactgtgaaaaagaattcacataatctctagtattttaataaacagtttctggtttatgcatttttcactaaatgatgaaacttggttttatttttaagccgagcaaatataatagtcacacttagacttattacagtgctgatggatgttatgaagagaatttccgatactttatctttggctcatcaaattgtggaaatacgaaataagcctataatgttgtggacatgatctcaaacattagtctttaccaaaatcattcagctcagagtctacttggagaaagcattgcattaccttttctaataactatcggaattctactttgttgcattttctagtttttgcaattagtaaattaatcaaaactttaaaatttatttggtgatacactagatttgtgagctaatgtatatatcatattattgtttaaagaaactatcaatgtttattatatcccttatacgtctcataaaaaaaacagtatgagagatacacatctgatgagtaattaagtaataataagacaaagacatagtaggagcgaaacaacaatcatttgctctttagtaatttagacatatatatcctcgttttcattcttcttgttgcatatcttcgaacattttttcatgcatgagtcatacttttccacatcgcctgttgtcatcgctaatacccaaaacaagaagtaaaaaaaaaaacgttttagtaagatccaaaaaattatagtttcttacagttttttatatcaaatagtcatataaataatattcagttttcgtgtttgaaaatatggtttgcttgttccttcaccttttactaaaatatatatatatagatagatataaatatagttgataaaatatatatatagtttgctagattcacaacaacaacttgtaatatcaatggtttaggacaaaaacattcgtatgatccaattaacatttaaactgttcaactaataaaaaaaaaaaaaatcattttgcaaagtattaagctaatctatatgactatatacgtagataaatccttagttaataatactaagaagatccaaacttacttgagctttttccatggtgaaagcacttctcgaaagaacagccaatcatgcaatatgttgatgatttttcttttgattttggtgaaggagaaggagattttgaaccactatcatcaaaatcagatgaaggagaaggggaaggagaatgatgatgatgatgatgatgatgacgagcctgaaccaaaatgttctccattcccattgttaccatcatcaccaccattaacaaggctacaatttttgtgttcatcattttttttctttactcagagatttatctttaataactcaacaagtattttttgtgaattgtgaatgttgatgttgattgcttggttggttatgtgtatttatataggaagatgtgtgtataagtttgtatagaaggtgacaataattattatggtaaaatgtcacatatagaataaaatttaggtgatattccacataatagaattatattctcatagatatggtttactattatctaatgaggtactagatatatttttaatttaattatttattgtgataatttgggaagcatatactgtatgatgatttttatttcctagataagttactcaatcatgtagctttaatagtttgtagatattcatcaaaataacatgattttgagttgttgtatgaacatataaaataaaattcttaaatttttagtttttgcatttccaaaacagttagaagtaaatcaatctttaattaattgtagtgtgattgttggtagatattatgattttctttgcaagatgagttattccaatcatgtatttcgaataaattctatagatttgttatgaaaatagcataataataagtatttttttcattctaaacctaacatataattcttaaaaatctagatgggataaaccacataaagtttcattgcccacaggagggcgtagaattttggtgtgtaaaagggataatcatctatgaggccccttcatataaaacttcacaactcacaagtcgacctcttctaaaactagtcatgtgaccactaaaagaatttttaacttgccatgagtaaacttcttctaaacaacaaatccttaacgatatatcattacgtaaaacatgcatgggctttttctttttcttccggtaacaaatcaaaaattaaattagtccatattttcacattatcatccaaaggtaaatttgataattttcttcatacctacttcgtctcattttccaaaagagatcaaagttaatatttaataaaaaaaagtagagctaataattttacataagtaaagaaaaacaaagttttaaaaatacggaggtgctccaacatcttctcgaattaatagttatactaattcattaaaatttgttgttgtaattaatgtaatccaaattttgaagacaacttaaagtctttctctttctctcttctttacaaatcaacccagagatttggatttgatttcatacaatagagaagagaagagatgcttaatgtgacaactctctaggttgataacattgttctcattacgttactatatatatgagagactacttacttagacctaatgcaatggactaatgagattctcatgaggctactttttgggcttctttgtggtctctactaatctccactatctttacaatttctaaacaaatttttttctttcacatctatttacgacaaattaaaaaaaatatattctttaagaaaattaaaattatttattttttcccaacagttcaatttttattgcttcgtaataacgatacaacttctttggtttttaacactaatgcatatatttatattttcaaaatattttaatatatgttataaattaacatttaatttacctctgcataacatgaacataattctagttattgtttaaagaaactatcaatgtttattatatcctttatatatatttattaatgattacgtctcataaaaaaatattatgagagatatacatctgatgagtaagtaataagacaaaggcatagtagatgcgaaacaacaatcatttgctctttagtaatttagacatatatgtcatcgctttccttcttcttgttgcatatcttcgaacattttttcatgcataagtcatacttttccacatcgcctgttctcatcgcgaattcccaaaacaagaagtaaaaaaaaaaagaacgttttagttagatccaaaaatttatagtctcttatagttttttatatcaaatagacatatataaacataaataatattcagttttcgtgtttgaaaatatagtttgcttgttccttcaccttttaacaatatatatatgtagtttgctagattcacaacaacaacttgtaatatcaatggtttagtacaaaaacattcgtatgatccaattaacatttaaactgttcaactaataaaaaaaaagccattttgcatagtactaagctaatctatatgactatatacgtagataaatccttagttaatatactaagcagatccaaacttacttgagctttttccatggtgaaagcacttctcaaaagaacagccaatcatgcaatatgttgatgacttttcttttgattttggtgaaggagaaggagattttgaaccactatcatcaaaatcagatgaaggaaaaggggaaggagaatgatgatgacgacgatttgcctgaaccaaaatgttctccattcccattgttaccatcatcaccaccattaacaaggctacaatttttgtgttcaccattttttttttttcttttctgagagatttatctttaataactgaacaagtattttttgtgaattgtgaatgttgatgttgattgcttggttgattatgtgtatttatataggaagatgtgtgtgtaagtttgtatagaaggtgacaagaattattgaggtaaaatgtcacatatagaataaaatttaggtgatattccacataatagaattatattctcatagatatggtttactattatctaatgaggtactagatatatttttaatttaattatttattgtgataatttgggaagcatatactgtatgatgatttttatttcctagataagttactcaatcatgtagctttaatagtttatagatattcatcaaaataacatgattttgagttgttgtatgaacatatatataaaataaaattcttaaatttttagtttttgcatttccaaaacagttagaagtaaatcaatttttaattaattgtagtgtgattgttggtagatattatgatttatttgcaagatgagttattccaataatttatttcgaataaattctgtagatttgttatcaaattagcataataataagtttttttcttctttctaaacctaacacataattcttaaaaatctatatgggataaatcacacaaaggttcaattggccacaggagggcgtcgaattttggtgtgtaaaagggatagtcatctttgaggccccttcatataagcttcacaactcgacctcttctaaaactagtcatgcgaccactaagaattttcaacttgccatgagtaagtttcttctaaacaacacttcaacaaatccttaacgatatatcgtcacgtaaaatatgcatgggcttgttcgttttcttccggtaacaaatcaaaaactaaatattccatgtttttcacaataccatccaaaagttaatttgataatcttcttatcaatacctacttcgttttatttttcaaaagagataatcaaaattattatttagcaaaaaaaataaaaatagagctagtaattttaaataacaaagtttttaaaatacggaaatgctccggtatcttctcgaattaagattcatattacttcattaaaatttgttgctgtaattaatgaaattttgatatgaattaacaaatacatgaaaaaatgatctttcttataagaaagtttttgtagtatcttttattataatacaaaagttttgaaaacaaaattttatcaaatcccaaataaattttgattttgacataaggcgtacattaatattgattttgacaaaaggcgtaaaaaaaataaaaaaaaaataaataaataaattatattaacttcccatcaggcatcagaaatatagatcaaacattgagggtattattgtaacttcacacaaacctcgtcaagatcgaaaccaaacccacacgaactacaaaagaccccatcagagagattccgattcagatgtccgaactgtgagagtcgtcgtcgtcgtcgtaactcagtccgagttgacacaatcttccacttcacgcaagatacaaccatggaattgcttgacatgaactcaatggctgcctcaatcggcgtctccgtcgccgttctccgtttcctcctctgtttcgtcgcaacgataccaatctcatttttatggcgattcatcccgagtcgactcggtaaacacatatactcagctgcttctggagctttcctctcttatctctcctttggcttctcctcaaatcttcacttccttgtcccaatgacgattggttacgcttcaatggcgatttatcgacccttgtctggattcattactttcttcctaggcttcgcttatctcattggctggtaaagcttaaaactttatgctatatagtctctaaagcttgctccttttaatcgattttgtgattttgtatatgtagtcatgtgttttatatgagtggtgatgcttggaaagaaggaggaattgattctactggtactcttttttctctcgatttgatggtttattattggtttatgttcttagaagagtgtgaagttagtaggaactattggaggctgaatcttgattgtgattataggagctttgatggtattaacactgaaagtgatttcgtgttcgataaactacaacgatggaatgttgaaagaagaaggtctacgtgaggctcagaagaagaaccgtttgattcagatgccttctcttattgagtactttggttattgcctctgttgtggaagccatttcgctggcccggttttcgaaatgaaagattatctcgaatggactgaagagaaaggagtaagtgtttttctctctcgttcttcggtctatgtacttgtcgaaaaagtgaggttcttgattgtcttgtgtgtgggtttcagatttgggctgtttctgaaaaaggaaagagaccatcgccttatggagcaatgattcgagctgtgtttcaagctgcgatttgtatggctctctatctctatttagtacctcagtttccgttaactcggttcactgaaccagtgtaccaagaatggggattcttgaagagatttggttaccaatacatggcgggtttcacggctcgttggaagtattactttatatggtctatctcagaggcttctattattatctctggtttgggtttcagtggttggactgatgaaactcagacaaaggctaaatgggaccgcgctaagaatgtcgatattttgggggttgagcttgccaagagtgcggttcagattccgcttttctggaacatacaagtcagcacatggctccgtcactgtgagtaatgatgcttatgaggagatcctagagattgccatatcttataagtcttttaaccgtttcttcttattgatgcagacgtatatgagagaattgtgaagcccgggaagaaagcgggtttcttccaattgctagctacgcaaaccgtcagtgctgtctggcatgtgagtgctccttcccttctttgctatactctcagctaagatttggtttgagaagtcttgaaaagtcgcggttctttattgtttacggtgataaaggaatcatttttacatgtccgcactgcgaattctgcagaaagattcaatctttgtgtgctaaagaaagtaattaaaacctctacttgtgtttttatttgcagggactgtatcctggatacattatattctttgtgcaatcagcattgatgatcgatggttcgaaaggtacgatactagccttcatctttcatttaatgttctgttttgattcagtttcagtaaataagtaatctaaaaacttctccctttgtattaaacagctatttaccggtggcaacaagcaatacctccgaaaatggcaatgctgagaaatgttttggttctcatcaatttcctctacacagtagtggttctcaattactcatccgtcggtttcatggtaactaaaaactcttccctccgtttttttcaacggtgttttcatttcaaaaaactctcatttttgtgtgtaatttttcaggttttaagcttgcacgaaacactagtcgccttcaagagtgtatattacattggaacagttatacctatcgctgtgcttcttctcagctacttagttcctgtgaagcctgttagaccaaagaccagaaaagaagaataatgttgtctttttaaaaaatcaacaacattttggttcttttctttttttccacttggaccgttttatgtaaaacaagagaaatcaagatttgaggttttattcttcttctccttcccaattttcgaaaatgattttattttttctgatatatatctaagctagtccaaagtcaactcgaaaatgaacaaaaaggattaaaaagttcatatattttttggttgaaagaggtcaagtttattcgaatctgaatttcttttaacggaacaacaagtgtgacaaaacaagattcttctccggcacagtgttgttctttgtttaatctaaaagacattttttgggaaattaataatattatcatcttaagattacatttaggagacatgatatcgatttagggaaatccgaatctcggaaagagtgattagggtaataaacagaagctttaggagaaaataattaaggttaaaaagttattaatctttgtgtaaacagatgccagaaagaaaaacgttatgattaagaaacattagcgagacgatgagtggaccatacattaatatgtaatcaagtcacatcaaatatatggtcgggaacttactttattcatagtgttcttgtaacaaaaaaacaattctattttatagaatagtttcgattatatggttcacttaattatttgacatgttttaaccaatttgaatgcaataaaaaaaccgtatggtacaaatacgataaggcgctagatgctcgtctaccgactagtgagcacttaacgcgtattagtacattaattagttttgtttaatcaaattataaatcctatctacacacctgaatgatatgtataatataacaattagcatcaattcgatatcgttaaaagtattcctgaagatctaacatttggtttactaaagtaaattcaagagtgattaactgcatggaaaagtttgaatgagatatgaacaaccaaagaagaaaagagaggccgtgtcggccatatgcaccacttttttacttttttagtcaacaaagccataacaacaacaaaaaactaggttacttcatgttgacaaaataaataattaattcaaagttttctgctcgttcaaagtccatgctaaatcgactttcggctattcttggagctcggaaaaattctgacatttatctttcatgttgtaacttgtaagacgtaagaaaaaggaactggaatttataatttctgaataatttcttcgtacgtaaaaaagacaaaaggtacaaaaacgactctagagcaaccaacatgtctcgctcatttgaaaaactagatagaataacaagctaagttatagatgcatggtgaatgcaatttatctccccctccaatagtttgtattttgtattggaaacaatattgtccaactttaatgcttttgttgttttgttattccatatagatatattccattatttaacaatttgtcgtatgacatacaattcataataactgacagtccaaattgatactaatctactaattttgtttatgttacgaagaaacccgtgaatctctatagacagacaaactagcaaaccccacttggccacaagctcttagcaaactaaaaattaaatcacatattgtggaatattagttagatttattatcttgtaaaaagttattatttctttattatttttaatatacttcgatatagtagattcaatgtattagtcacagattagatgtcataatttatttcttgtatttaaaagagaaacaactttaagcgtactatgacttcgatcttagaatttagggaagtacggagacaaataaaattcgctacaaattgtcaccttttcatgtcgacttcaccaatattcacattcaacaaataaatcaaccagaataaaattatattgactctaaaacaatctcgtacatcataaagcacaacttacactgtaatcaaagtacctagaataggttattctactggttgaacctcttaaacataagagagttttttttggaaaaatagtctatgaataaagaacctatattatgtacaatgatttgatttccagtaaaaaaggatatatatatatagcaaagatcttaaacttttgttttgtctcctacctatgaagataattggccgctatgagtcttttagaattataaatttaatggaccctagcgatatcgagaaagatatgatcaataaaacacaaatgtataaatattgcgctttccttatcaatcttctgaacaataatactataatagtcgtgtgtgttcctctcttttttcgtttgttaaaaagttgaattatactgaaaaactgataaggcttggcatcaaaagagcttaagagccaaaagaggagttaaaaaaaaacgatttattttgaaagtgtttcccatcttacatttattttaaccctattctatttttttttttttattgttttccgtttttctttttcatgaaagctcagattttaaaacttgtgtattgtttacttattaattcccttaatttaacaacttaacaattcaatcataaccaccggtcaaccgtttatattaatcaacccgccttttacattagtgttactgtatataaccgttttcttttcaaccaccgaaaacttctgttttaaagaaattgtgttcaccactagctagctagcaccatatatactgtatctatcttttgtgaaattaataagacgttatatagctttgacaaagatttaagcttatagagaagacaaaaaaaaaaggacttttcgatgattcaatgccaaaatcagagtcaattgttgagacatgtcaaatttaagtagtgattttttttacatcatgacactgctttagcgtcagatacgatgacctgagcattatatgcatatttaagtatcgatattttttaatatcgtgacgctctcacctgtatatcagtgtgtgtgagagtgtatgttcaaaaatctagttactctataagtatgattcaactcaaacacacacacacacacacacatatatatatatatatatatattgccattctatacttacaataagtttattttctaagccagaacggattttgtttgtcagaattcatacaatacaaacaagagtataatacaattttctatcatcagatcatagtggttatcagcaaaaaagttgttacaaattagagaaaccttacttatttatgactttatatgcttaaacatatatactacaaaacttttatcaacacaaacaatgaaagagaaaacaattcaactacttcaaacttcactaaatagtaaatactcaaattaaatcccactaaattaaaatcgtgctttatctctggtaactgtcctgcttcccaaaacaaaaaaaaaaaactatgttcatgcatttcccttctgaaattgtacagtatgtatagaaatagttgcaaatttcataattaatttatcatgagtatagatctggtagaaatagttgcaaatttcataattaatttatcatgagtatagatctggaactatatatacacacaaaaaaaaaaaacaatgtcacttaaaaacaccttgattcatcaatctggaagaacaagcagtataataaaagtagtttttagtatcaatttttgatctttagagataaataataaggattatattcatgaagttgttcatatcatcaaatcataagagacatcacaagaaaaaatgagtagatagactaattaataaaaaccctaatcaaaaaattcaagaacgcaccagagccctaattcaagaacactccaaaaaaaatgtgactaaaattgtttgaaaagatctctcttcttgaataaaaaaaagtgaaaatcattacgattatatatttaacaaatcatctctaacaatcataggataaagaaacaaagatgactagcataaacgtgaacaaaggatccaaaaaagatattaaactgctttcaatcgatcaatagctccacaagctctctccatcagaattctctggcgaatcatctgacggtggagatcccatccacggtggagccaccatcatccctttggccatatccgctagcaaaccaggcatgttcaatagctcttcttcatccacaaaccccatagttgaagattccgccgtatcataaactttatcttccttcttttgacctaccttcacggccgctccagccgcacccctagtcgcagcagccgcagctgcagcgcatctgatatgagctgcggaagaggaaaggggaatggggtaagatcccagggaatccgggaagttcaagagagtgtctccacctttaagagctaacgccgccacgtcatatgcggcagcagccatctccggcgtcggataagtcccaagccagacacgtgtagtctttttaggctctcggatttcagacacccattttccactccgacaacgaattccccgataaaccggattctttttccggcgagagatgtcggtgtcagtggccattaaagtattaatatcattaccacttgcagtagaagaaggagccgcaaaacaaacagtagtagtagtagtagtgatagtatcaagtggacaagggttttcacacgtggcagagtcagagaggctgtcaccgcacgtgggaactggcacaatagtaactgacgatgaagtagaagattggattatagctttaggttcagtgataggattgttagggtcagccatatatgtataattaatatacttgtatatagtatatatgtcaacttatgtgtttatttgttatatataagtagatatagggagagagatatggatagaaatagattagggttttatgtgatcagaaattaaggttgttaaatatgagatgagagtgcgtggttattgcgtggggtttcccaaaagtgtgttttgtttgtgtttgtgtttggtggggatttttttttgtaatagctgtaagaaagtaatacaattttaatttatttttgtttaaactttttattgatttcagacctttttttgtgtagtcaattaaaatggatacagacatatgtatgtgacaggcgattttcttctcttcacatctaaagccaatagattttcatagaaaacatgagaacaatgtaacattttcatgttcgaattagtttgcagatacaatcaagattcagccaaaatgaaatacaatggtacaaataccatcatggttatattgcatgtaattcaaacacatggcattagataagaaaatgaattgaaggcaagatacaaaatacatgggtctggtctggataaatctgaatccaaatatttaggtttaggcccaatagcccaatatttatttgggcatatatatctttcgcgagggttcgttggccctattgtcccggccggtgtaatgttacattagccgttaatacacacacatatgaatatcttcccattaattattgactaggtgtttctgcagtttaaaccatccattttagtttaactcaataaccaagagagccactgactcttacctctatacagtgacctcacctcacaaatcatcctctgctgaactttgtttttttttcattcaaccagtagagttaattaaccatgtttggatatagtgttattcttttcttaaggatatatagggtaattactttgtatattttatacaagaaataaacattacaatataaagagctacaacggttaaagattaaagaattaaaatttgtgaagcagacgcgcaaatgactagtgtttaactcaacttaacagtattaactattaagcatttactccaacaaaatatgattgggctcttgtcccgaccccgccatatatgctttctataactcatctcattttgtcatatatacatgattatcttattattattagatgaattgcaggatatcgatcgatttctctaaaattgttgtcacttaatttcagtggaaataagaaacttacagaaagtaataacacttaacattaaaataaacagaagatagttttgacatttttgaaaacgttttgacaaatattaaaggctaaaacagtaaaacatatatatatgtgattcaagtttttattacaacacattcattactgaacaaaaatattaagaaattcaacgaaacttaaatgaaatatatgagacgttcatgcacatcacatctttttcataggtattttcgtatacactagagtatatatatagggttgcaaatatggtagatcaattctaacgttttacgacttcatgtagcttttaattttttcagatgttatattaaatagatttcgtaacccaatcatctgttggtgacggtaagttcacaatatatactactagttaaaatgccaactaatttccttttagtttctgaattcatttttcttaataaagacgattacatgagaattaggaaaagaaatgagtgcctacggaaccatcatacactacagctagttaaagcggatcaaagaagtaagattaccatgagagtgaatctcggagccacaaagaaagagtatataataagaacccttcaaactctcaagtcttaaactgaatattcacagctagtttaataaaagaaatgttacccccacgctaaccccacgtgatattcgcagctagtttaattaagaaggcaacgtggataaaattcacccaatccaaaaaacgcattaaaattcaatttcacgaggaaaatatatataagggctccaccattttttttttaacttttattgtacttgtctcatattgttccatgatatttttaaattcttatgtaaacattatttcttgttgatacaaaatcaaaataaaaataatggatcaaatatttctgtgattattaatgttaattttcaattttccaataaataaagtgatgtataaaacatcaaattcaaactcgtaaagactaatcgtgtaacaataacagaaacttaaaatatttctagtttattgtcaataattttccaagtttgtttgaaaagcattttacattcagttctatgatatattacagagtatataacacagaaaaatgtttgctgaaaatcaataattatttttcacttcaaaaaatagtgtgatttattgatttacaattttaaatcactatcaaacatataaaacattattaacaaacagctaatataaaaaaaaggatgtttaaatattgccagcttcttgtatacagcctatggaggcagcgaaacaatgttcttcacaattcccttcggctttccgtctcaggggtctttcgtttgattgatcgtgaggttcgcaacgtcatctcgtcgagaagacataggaagcgttggcgggagcttatggtgctttggatccgttagctcttcccaaatcttttaaagctctattgtaaccttgtttttatttctttttggcttggttagtcttctttagtactcttttatattacctaatctcatttttatgatatttacaagtttagcaaaaaaatatattgccagcatggcaatgatccacaactaaaagtgaatcagtttagtatgtattacgcgcgttcgattcgttctttgtggttcccaccaaccaacgcctatatatctcttctcacttcactcttctacttcactaccacaaaacagagcaacacacaacacaaagcttcatttcaattctgtttcgagaaccctttgaggtaatttaagcttttcttcttatacattttcaccattgtgaagtgtcttctttgatattttgaattctctgtcttatattgcattttactctgttaattttttaacagagttataaagaataaagaaactttcatctttttgttttttacttttacttgacattttactctgtttcagcagaaccagatcggagatggaaaacgacgatatcaccgtggcggagatgaagccaaagaagcgtgctggacggaggattttcaaggagacacgtcacccaatctacagaggcgtgcggcgtagggacggcgacaaatgggtatgcgaagtccgtgaaccgattcatcagcgtcgagtctggctcggaacttatccgacggcagatatggccgcacgtgctcacgacgtggcggttcttgctctgcgcgggagatccgcgtgtttgaatttctccgattctgcttggaggttgccggtgccggcatccactgatccggacacgatcaggcgcacggcggccgaagcagcggagatgttcaggccgccggagtttagtacaggaattacggttttaccctcagccagtgagtttgacacgtcggatgaaggagtcgctggaatgatgatgaggctcgcggaggagccgttgatgtcgccgccaagatcgtacattgatatgaatacgagtgtgtacgtggacgaagaaatgtgttacgaagatttgtcactttggagttactaaaatacgtatgtgttaaaaaaccaaagatcgtatgtgtatgtatgcataataaatgggcttaatgatgggcatagatatgataggtccagcctatatgttaaatgtgttttattttttggtttatctagtttcctaggtatttaccaaattgtattagtataagttttattaagaaataatcaaaaatgttgttgccatttgagacaatcttacctaatatacatcccaaaaaaaaaaaaactttgaaaccctctctctcgaagtcaataactcatgagacaaaacaacaactcaaataacatctttggttcagattccattcgaagaacactcaatagtgggctttgaaatctcaattgggctaaataaaaggtctaaattgaaaggcccataattcacaagaagacgagagttttgtccttttcttgtttttgtttcttaattactgagaaaatatggattctctatccctgtctcttccatcgggttctttctgattgtttctttgctattttcagctttcctgagctgtgttggagaattcaatatttttctcagataaataaaatggcaaatccgaaaagaaaacacttataaataataaagctgttttatttccagacaataatgggatgtatgtaacccatattatgttgaccagagttgtatgtactataccatgctcacaaaaacaagacgtatcgtattcgtactatcgtgtcaagaaaaatcatattttttttcataaccggaaaaatcccattattggttaagatctttttttttttccagtagtagctataaagtttaattaagaatttaagatcgatagatcatgcagtaaaatcatatgatatcaccatgaatcggtcgagatgcatgtagtagaatcatacaatgtaattttcttggttagaaaatattctgagtatattttatttgtaataaacggaaaaagaatcccgccacattagtttatctaacatgcgaaagtctcattccaaagtttacaaaaaaaaattgatgttttttttactttctcttcctcttttgttgttgccagtgactatgatccaatggtcacaaacggatcactataccaacgacaaacgtggtcttatttaagtattcgactcacggatatgatctttttgattaagtataactttcacggaaaaatccatttgcagaaagcttatccctataaagcgacttttaaaatattagctagctttccatgcatataaaaactttaatcttcgacaacaaaaaaaaaaactttaatctcttttttgctttcttattaagatttcatatatgtaaagacagtatatgacaatgtaagttttctgccttcacgcaaccacgttgcgagtaaccaacttaaaagacaaaatatttgaagggaaatgcccttaattaagtggactagatatgaactaatcgaaattaatccgatactcttcaagtttccctcgtatataaaatcaaatacatttgtacttttcttattttggtagggtcaaatacattgttactaatactatagtatttgttttctttcaagtaatgacgatgtgtaatactaatactatatttaaaactttttaataagtgaaaacaacttctttgattattcatttttcatcggcggacaaattattaaagcgaagttccttgtctcgtgcggctatttggcaaactcgttaaagcaatccttttagttttatgtatcgcagaagtaggaccatgcatgaagttaacttttattgccaatggcacgacccggttgcctattttacatgagaggattggctaaaagttacaacgatatttcaaaaaaattaactgacacaaacatttttctatctccctaatgtatagcagtactctgcattctgcaaaactcgttaatgtagatttcttactggagatattcgatccatatctgcaaattcaagttgtttccatttttaaattgtgacatagtctatgtataaacacattacaaaaatgatgtccttatctatgtgaatataaaaatgccatgcatatatatagtcagagagagtggtatttgatagggattagggaacaataccatacgatgagtcagaaacagatacatacatcattattttaatagtgcaaccagaatcttaatctcattattacaagttgtgataaaaagaaaaaaatattgaaactaaaaaaaaggtacttcctacaacatcagaacatgagattctagtggaaaattataggtcgctttacaaaaagcggacccttggttttttttttttttgttttacttccacaattttcgaagtataaatttacttacttttcaatcttggtttaaattttgtttcgtagttaatacaagtactgtttgtctttctttcatgaatcagtgtaaacggtaaatgattcaaaaatgcttgaaattcggtattgattaacgcaccttagaagttgacaaattaggcaaaaaaataaaggaatcaaagaataataatacaacgaataatgaataccaattgtcgattcatgttgatgggttgatcaggttccaatgcaaaaaggaaagaaagcagcgtagaaattacgcatcttaatttgtattgtgacttttctcaagtaagatatgaatgaaatcaagattgaatttgtctaaatcttttccgattctaatgtttacgattgttagtcttctaagttaaccactttgaaagaaaattagtgttgaagttaaattttttggtaatgtatgaatgtatgatcccgtttggtgaagtgatatgtttgaaacaaaatttagatatgaaagcaaagatttcttgtattacaaacggttacattacttgttgagaactagagtttttactttgtagctttcatgatgatgtgttatattgtagttgccgtgttacaattaacaaatccagactcgtgcatgaattgtagtaaatgaaaaaaaatgattatcaaaaacgtccaatagcttaattatttttaacgtaaaccaaacgttttaatgcatgcaactttaaatgcgaacaaagaaacgtataattttgagttaagaataatatattgcacacaaaatgatgagtttacagttgtacccctctttgactgctgtcgtcacacttcgacctttgtacgattctttgaagacttcaggagaaagctgtaaatgagagatcacgaatcaacacaaaccttattttcaaattgttaacttaacatatagtagtaatgaattaatcgacgaaatttttattctaaacatgcttggatttgaaaagcaactgttaatttttgttcaatcataggtgaagaaaatttattatatccttatttttagtagtctagtgtctagtcaggtgatgtgagcctacataatgggtcatcaagttgtcaaactcaataatagtttttctcacaattttatttatttatttctggcattataaatagttttattaactagactaccccaaatgtttacagtttataaggttaataagaaaatttactgggacatttttaagtctagtttattctactacatgtttttcaaaacaaatactcattttgttttaatttaattatcattttagcacttaaatttaatctcacaataattatcgtttttagttttttaatgcaaatgtttaataaaaatgtgagtattaatgtcttgaccaataatttttttagaaactatattgaacaagggtaaagtagaaaatttaattgtttttttttattttcactgcaaaaaatcttaaacgacaaataattttaaacaaaactattttaataactaaccactaaactaactatataactgttttacaaacgaaagcgtgaacttcacgtaaacaaaaattcaatttcacgccgccgacaaaaaaccttaaacgacaactaattttaaatagaaggagtatattttagtaataattatatgttaaactgttttaataaataaccactaaactaactatgtaactgttttacaaacgaaagcgtgaacttcacgtaaacaagaatctaatttcacgtcgccgacaagaaaaactgatttcacttatatatcttgatttattaatggacattcacatactctcaaataagattctagatcttataaattttaatctatttttgtctcaattaatttagttatttatcacatttcgcctcttataaaattatatgataattgtctaagcagctaactaattgtaattgtttttcaaacaaaaaatatattttaattacacataatttttttatcgaacaaaaatatattttaacgaaatataaatgtttcgaatcaaagataacaaatttatagcctcaactatacgtaaaacaaaattttattttacatatcatactttgattgatactaacacaaacttcacaaataaattcgtataattatgtaattttagattatttagagattataactagtatttagaaaaatcgcaaaatcatataagaaaagaaatggaatttgtttttggttcaaattatatttttttttcccgctattcatattatagttatgaaccaaaaatcaagctagaaataaaaaccactaggattttttttttttgctaagatgaaaatttagttatacacttatttttatttatttaaatattacattaaactaataaaaagtattaattattctaataactttttgtcagttttaaaattaggccaaaagtaaaaaactaatacagctaatataatatacttaaggaaggatatttcaactttttcttttcttcccagtttcagagtttatacaaataaggtaaaattcgcagaaacagaaaatcataaagtaattaaaataatacaaccgaggaagtaaaaagatttccaaaaggtaaaaggtgtactcgtaaagtaggtaaatagaggtacaggtcaaggggtagtttcggtatttacactctttcttcttcttttttttttttttttggtgtctcacattccaaagtccccattggacttagagaagagtttttttttcgttttctctgctttctcactttttcccgtttcctttgggaatacaaacggcggcttctcaaaagcctccgatttcgatttttttttcctctctttttttttgttctttctttagagtctcttcttcaacttcttctccggcatcttccgtcggagctaaggatcagaagtttttgtctgtgcactgtttcaattggatcattacatagtgaggattctctgttcgacgaaacgagtaagtaactacattgttgttcttcctcaattctcttctggtttttctttcgtttttttttttaaaacctttttcggtaattttctttttatctctttgaaacaatttgagttctttttttttttgattgatcactgtgtctgattccttatcacggttcttttgtttaaatttgatcgatcgttgtctttgaactccgattttgtttctatgaactttgtttactttggatgattgtgaaaagttaagtactttggtttatgcatgttcttatgagaaatcgatttctttcgtttagagatcatcttaaggcggcgaatgtttttgcactaagggtttgtgtgagtcctttagaagaacatttggaaaatttgtccttttttttttttggtcagtgaatttttttttttttaatccatgaatagtgtatgttcaaagattgaacctttttgtgtgtatgttctgcagttttttttctttcttctttttctgaacatgtattctcttatttttttgggttcatgctagattctattagtaaattcaatttcgaatctataacttgtttttgataggccagtcacagaggaagattgtggtaacacttttgtcccttaacaaaagtgtctgtttctctttggtcaattttttgatcagagagagtttgctttggtttttgtgttctggtcaatgaaatgctaaagattggtttttgtttcatattctgctgcacattagatttgatgatagagggtacagatagaaactgatcttttcgacgatttatccgtgagttttagctctgttttatgttacagaagtaagtgttaattttcaataatgtgtgttcaaagtttgaactattttgtgtgttcgtcaaatatttttgagctagaatcttcttccctgaacatgttctctcttttctttggatatatgctagattctaagtggccactcacagagatagtttgtgaagttgtctgtttctcagtggttagtattggtcagagcgagttttttggttttgtctgtctaaatgctaaatattggttttgtttcatattctgcacattggaattggtcactaaaacttgcttataaaaactgatgtttttacttacgtatctaaattttccttactgatggttttttttcttgtaggaaactcttcaacatggaagacgattgtgaggagcttcaggttcccgtgggaactctaacctcgataggttttagcatttcaaacaacaatgatcgagtaagtgttgtccttatttattcttcttgatttgtttatgagtagatggagcaaatatttaatgtaatggtactttattataggataaaatgtctgtgctagaggttgaagcaccgaatcaggtgactgattctcggctaggattaccgaatccggattctgtctgcagaacctgtggcagcaaagatcgaaaagtttgcgaaggtatcataaagaatctggttttggcaaatattgttccaatcttttagctcattttatgattagttccctgagtttgctacttttctctctgttttagggcatttcggggttataaacttcgcgtactcgataataaacccgtatttcctcaaggaggtagctgcgttgttaaacaaaatctgtccggggtgtaaatacattcgaaaaaagcagtttcaggttcactagtctttccaaatcctttgttggtttgtgtgttttggaactacatatactaatgtcatttttgcttgatatagattaccgaagaccagcctgagagatgtagatactgcactgtaagaatatatgattgcaactaattttctcagtttaaaactttgttccaacactaattttcggtttttgttgttgttatatatcagttgaataccggttatcctctaatgaagtttagggtaactactaaagaagtcttcaggcgatccggaatcgttgttgaagtaaacgaagagagtctgatgaaactcaagaaacggggagtgttaacattgcctcctgactattggagttttttgccgcaagactctaatatcgacgagagctgtttgaaaccaacaaggcgaataataacgcatgcacaggtatagaagagtgaaatgtaccatctccatgacttcttactatatatagttttctgaaaatttcacctttttgcaggtttatgctctgttattagggattgatcagaggctcatcaagaaggatatccctatgttcaactctcttggtctgacatcttttcctgttacaccaaatggttaccgtgtaaccgaaatagttcatcagttcaacggagctcggctaatatttgtaagctaaaaacgcttgtttatataatttgttatcatatactatggtatttctcttatcttttcgagtttctgtcacatttttgaaggatgaacggactcggatctacaagaaactagtcggctttgagggaaacacacttgaattgagttctcgtgtgatggaatgcatgcaatattccagagtaagttagtggttcctgatagatttaaactcttctttctgttctgtgaaggttagtagtatttcttgttttttgcacagctcttttcggaaactgtgtcttcgagtaaagattccgcaaatccgtaccagaagaagtctgatacaccaaaactttgcggtctaaggttcatgaaagacgtgctgctcggtaaaagaagtgatcatacattccggacagtagttgttggtgatccgtccttgaagctcaacgagattggcatacccgagagtatcgcaaaaaggcttcaagtatcagagcatctcaaccagtgcaataaagaaaggcttgtcacttcctttgtccccacactgttggacaataaagagatgcatgtgagaagaggagatagattggtggctattcaagtcaatgacctccaaaccggagacaaaatattccggagtttaatggatggagacactgtgctgatgaacagaccgccttcgattcatcagcattcgcttattgcaatgacagttagaatcctcccaacgacttctgttgtctccttgaacccgatctgctgtttgccgttccgtggtgattttgatggagattgtctccacggttacgttcctcagtccattcaagcaaaggtcgagcttgatgagcttgttgctttggataagcagcttatcaacagacagaatggtcggaacttgctttctttaggacaagatagcttgacggcggcttatctggtcaatgttgagaagaactgttatcttaatcgagctcagatgcagcagcttcaaatgtattgcccatttcagcttcctccgcctgcaattatcaaagcttctccttcgagcactgagcctcaatggacgggaatgcagctattcggaatgctgtttcctcccgggtttgactacacttatcctctgaataatgtagttgtgagtaacggcgagcttttgtctttctctgaaggatctgcttggctcagagatggagaagggaatttcatcgagagattgctcaaacacgacaaagggaaagttcttgatatcatctattccgctcaagaaatgctatctcagtggttgctgatgcgcggtttgagtgtgtccttggcggatttgtacctttcctctgatctgcagtctcgaaaaaacttgactgaagagatatcatacgggttgcgggaagctgagcaagtttgcaacaagcaacagctaatggttgaatcttggagagatttccttgcagttaatggggaggataaggaagaggattcagtatcggatttggcccgattctgctatgagagacaaaaatccgctacattaagcgaacttgcagtcagtgcttttaaggatgcttacagagatgttcaggcactagcatataggtatggtgatcaatccaactcttttttgatcatgtcgaaagccggcagcaaagggaatatcgggaagctggttcagcacagcatgtgtatcggtctgcagaattcagcagtttctttgtcctttgggtttccgcgtgaactgacttgcgctgcttggaatgacccgaacagtccacttcgtggcgcaaagggaaaagacagtaccactactgagtcatatgttccttatggagtcattgagaactcgtttctaacgggtctgaatccattggaatcttttgttcattcagttacaagtcgtgacagttcattcagtggtaatgctgatctcccggggacactgagcagaagattaatgttcttcatgcgggacatatacgctgcttatgatggcactgtgagaaattctttcggaaaccagttagtccagtttacttatgagactgatggtcccgttgaagatatcacaggtgaggcacttggctcactttctgcttgtgcattatctgaggcagcttacagcgcgctggaccagccaatcagccttcttgaaacttcgccgcttctgaatcttaaggtcttcctcttcttattcttcgcttcttgatttattgaatcatttccacttaagtcgtttgcatttctctaactagattttatctctttctacagaatgtattggagtgtggatcaaagaaaggtcaacgagaacagacaatgtctttgtatttgtctgaatacctttcaaagaaaaagcacgggttcgaatacgggtcacttgagatcaagaaccacttggagaaacttagtttctcagagatcgtttcaacatctatgataatgttggtaacttttaactgtctatatgaatctttttggttaagggcttctcttaacaaatgtttattgtcttcttggttcatagattctctccaagttctaacacgaaagtaccgttaagcccgtgggtttgccattttcatatctctgaggtataaactcatacccatataaagccacaaacatatatatatatgtgtacagattctaatgaacctcttctttaatttcacagaaagtactgaagcggaaacaactgagcgcagaatccgttgtttcatctttaaacgagcagtacaagagcaggaacagagaactgaagcttgatatagttgacttagatatacaaaacacgtaagaacattcttgaatttgtagcagacatgttttgtttcgcttttatgtctattagaaactgatttgttatacatttatgtgttgtggattagaaaccactgctcttcagacgatcaggcaatgaaggatgataacgtttgcatcacggtgactgtagttgaagcctcaaagcactcggttttggaactggatgctattcgtctcgttttgatcccttttcttcttgactctcctgtcaaaggtaaaaccggatgaaaaataaagacgagcaagctgaacagatcgttgttttgttattatcgttcttatgagttctatcatctgtttttgcaggtgatcaagggatcaaaaaggtgaatattttgtggactgaccgaccaaaagcgccaaaaaggaatgggaatcatttggcgggtgagctgtacttgaaggttacaatgtatggagatcggggcaaaagaaactgttggaccgctcttttagaaacctgccttcccatcatggatatgattgactggggccgaagccatcctgataatatccgacaatgctgctcagtttatggaatagatgctggacgcagcattttcgtagcagtcagtatcggtttctttaacattttcttggtctctctcgcagcttctaaagtttgaagttttttttttgtgaccgcagaatttggagtccgcggtgtcagatactggtaaggagatactaagagagcatctgcttctcgtagctgatagtctctctgttacgggagagtttgtggcattaaacgccaaaggttggagtaaacaaagacaggtcgagtccacgcctgcaccttttactcaagcatgcttctcagtatgtaacaaaatcccatttcttttggttatacaaagcttatataggatttcatttgatacttagtgcttgcttaatctctgcagagcccaagtcaatgctttctcaaagctgctaaggaaggtgtcagagacgatcttcaagggtctatcgacgctttagcttggggaaaagttcctggtttcggaactggagatcagttcgaaatcatcatttcgccaaaggtaaattaactttacatcttttgatccgtttagaccacataacttcagtggtctaatttgtgtctttatgcatgccatcaggttcacgggtttactacaccggtagatgtgtatgaccttttgagtagtacaaagacgatgcgtagaacaaactctgcgcctaaatcagacaaagccacggtccagccttttggcttgctacattccgcattcctgaaagatatcaaggtactcgatgggaaagggattcctatgtcactgcttagaacgatctttacatggaaaaacatcgagttgctttcccagtcattgaaacgcattctccacaggtaagattctactgttcaaaaaaccgtaaagattctttcttccttttggctgatgcaaattacaatggcttaatctttgttagttacgagatcaatgaactgttgaatgagagggacgaaggacttgtgaagatggttctgcagttgcaccccaacagtgttgagaaaattggaccaggcgtcaaaggaatccgggtaaatcaaggctcatatgtttcagaatccttaaagacataaagatcctgaccatgtttcttttataggtcgctaaatcgaagcacggagattcttgttgcttcgaggttgtaagaatagacgggacattcgaagacttctcataccacaagtgtgtcttgggagcaacaaagataattgccccaaagaaaatgaacttctacaagtcaaagtatcttaaaaatggtacactcgagtccggtggtttctccgaaaacccgtgaacagccaagtaagagtaaaaaaaaagactggctcttctgcggtataatatcgaacaatgtatgaagttgtgtgtaattttgtttaaaaagtgattagatagatataggggaaaagccttttggctttgctctaagcttctttttgctcctttcactatgtaataccttttgccttccacctaaaggcttaaaggttaattacttagtggaagcagcaacgagaagctggcaaaggaggcttctgttctgtttctgtttctgtatgtaaaccatgcaaattccggtttgactatgaaatatccggttatgtttctgttctttaccttgtttatatccgtcttcatgcaattgcaaatgatccttattacatcttcggttttccttatgagaagtgaaacttagttctcttggttatgctctgttttttcctggtttagatcggttctcaatagcatacagtttgttctttctcttaaccggtttagattagttttcttgcaatttgcttatgattcttataagtaaccaaagcctttaagtaatactaatctaaatatctccacatattatcttcaaatgtattgatcagagaaaatccccaacactatcatcacccctcaagaaaatacaggaaacattttcgaaggttaatgctcttatagctgcagtaagttcactcatattgtactaaaatcatttgttactttgttttaaagctttttttgccaaggtaacaaatttgtaggtaaaaactctctttaatacctaaacatctcatttattaatgatattatattcatagcaaaaaacactaatctcaatcaccatttcagcaattgacttaattataacttttttatgtttggttctaaacaactttaaacaatattatgatgatatacactaattctatatattgttttaaaaaaaattctagatatttcatgtagcttctacagagttgcatgtcatagtgtactactcaatactttcttacacaggtccacaaatgcacttgcttttgttatgatacttttatataaaatattaattaaacgagtttttttttttgtttgtttatctctgtctagaaagtgaagttacacatgtcgtgaatacatatcgccactagcttaagcattttcttttcttcgcgatcggagaaccttagcaaatcaaaagataagatttaaatgttctaaccactaagaagtaaccccgtagtgatggacattgtgaatgggtgattcttgaatgcaacagctattcggttacctaaacaactaaaatatagtattctttattttgtgtacttctattaaatcaggagaatatctgactgacaccatacataatcatataactgcagataaaatatcggtttttttttgttaaagtgtcgttaagttacttttggttctatagtttgatcaagtgagtatttaaacactactaagtaagttactattggtactagataaaattttggaaatatgtatgtgctgccaattaaattatctgtctcagtggagtgttgcaaatctacaaagtactattgggtattaattagtacacaatagtactttgtagatttacacgtattcatttatttttaacaccagtaattttttttggttacatacttagatgcaacacactaattgaaaaagaaacatgcaaaatacacatgtaatagcaccatgacgaaagtagcatatatgcatcaatagctataatacatgtataaattgataaggaaacaaaagaaatgattggcctagcaaatttaacgagtatcaactttggtcatattttgaaaaacgagtatcacgtgaaatcacggttgtgaatattttaggtaacttatactaaaagcattgtattgtaggtggccaaatatgtgtatataattttctctttattcttggtaactttttttgtccaaccctatttttcattataattttgtccacattctcatcatactaaattactaacgcacatacgcaataagaaaaaaatgtctgccagattattaaatattccactttccaactaaaattgtgtcgctatcttttgtaattatgtaaaaataaaataaaaaaaaacaacgatacaaattgtatacctacacatatgacatgtccattacaataccaataaactgaaggcaaattgaatacgattccatgactttcatttattatacatataaaattagggaagttgtaaataatttaggatttttctcaaaaacaaataatatttcgggttatgtgcttaattagatcatgtgtaattagaacacgtataatatcactatcggaataacgttataaattagtagctatcaacttattatacacataaaattaaggaggttgtaaataatttaggatgtttcataagaataaaataatatttcggatcatgtgcgtaattagatcatgtgtaattctataacaacacgtataatatccctatcataataacgctacatgagtagttttctttattaatatgcagccgtcttaaataatttattcctctttgaccccaaaacttacacattaaccaaaaaacaccccatagaagttttatagaatcacgcaaaaacccccttttacaaaaacgtgccaatttgaggacttaaagcatccacgatttgattgatatttcctcaatgattgggtccgagagtaaatgcgattgataaatgatcacattactcgcgataagagtctgcgatctactataagcaaactagtcgtcttttgattctcctcttcttcacctttttaccaatttcctcgcttacaagattcaaagggtttgtgattgagagaagctttaaaaaacccatctttggtgtttgattctctgtttatttaattcataaaggaaggctcttttttttttgtttatttcaggctcattacgttgatggtcatctaaatctcaagaagacaaagttgcgatttttgcaactgggtttctctcttcaggtactgagtttttgttgttgattgtgagaataaaaaggaaagtagacaaaagaagagaatctaggtttttgattgaactccattttagaaaaagttgaaaactttttggcgtttttcatttgtttttcaagttgtggaattttctgaattggcaaaaaaacaattttgtgactactaaagcaacttgtcttggctgcttctttttatcaatcatatatcattgactccactaagatctagtatttatataatattttgtgtaggccttattaccttcatgctaagctcgtgtcttctgatctatttgtaattattttaatctattttttttcagagatttaatctgtataagaagatctcaagatcagcttttgtgtattgaagaagaactaggaagaacgaggatagatacaggtattatttttatatatcaagatctctgcttttggcttatttgtttatcatctttttcacttgaaatgcacgagttttaaagtataaataagctttgtgttcttgttcttgaggctttgtgttgtgtgaagtagaaataagctgaatttggatttgatttgatttggtattaaattgtcctcactggttttgcgtgattatatcatctatgcacatggcttgtagcgctgacttgcttataagtatttttataaaacgtgttgcgttcttgttttggcttctataattgtagttttagaattgtgcttgagcactaatcagattcacagcaattcaaaaatccatttagaggtataattccttttagatgctctttgatcttttcgtgcttgagtcagtttgtacttttgtccttgactctttctaaaacaggttttgtgttaatcccttgaatctgctttatcgcttatgtctcttgaaatctatctatgttgctctctttgtgactgtctgatcattagttgcaaaatgtgaaattgtctgtgtaatgatcaggtcgagttttatgaaatgttgttagcttccattgagtaaggcttattgtggattggtggattgaaatcttcatgtaactataagtattgaggagctttgaatgtggatttaaaactgttctggagtgtcattgactttggatactattattatgtatttgtattaaattcatattatgtatgccacagacccattctctatttccttcaacaagttgacagagagcaaaatctttatatacgtgatatcaaagtgttctaatttccacattcttctcacttctcaggctttaatctaaactttgctctctgctttctgcgattaaaagatggtggcttttgggaaatacttgcagcggaaacaaatcgaagaatggagtgggtatgcatttgcttacgacatctcggttctagccatatcttttgatcatctgatttttttttcctaatgaagttttgataattcccttgtagctattatatcaattacaaattgatgaagaagaaagtgaagcaatatgctgaacaaatccaaggcggatctcaacatcctcgccatgttctcaaagatttctcgaggatgctcgatactcaggtatgttatagataattgtcgagatgatcttgtttgagtattatcctcactgaattgttattttctgtgcatctccgaggttatatatggctacatacgagtaatctcagtccagtgtttgtcattgtttctcttaattagataagacatttaagaaataaaccattctgatgatcagatggaactcctctaaaatgttgttcgagatattgaaagtgaatcattgtttgcagattgagacaactgtccttttcatgttggaacaacaagggttgctttcagggcgattagccaaattgagggaatctcatgatgctatacttgagcagcctgacatatcaagaattttcgagctacgtgaagcatacagagatgttggacgagaccttcttcagctcctgaaattcgttgagttgaacgccattggtctgcgcaagatacttaagaaattcgacaaaaggtttggatatagattcgctgattattacgtgaagacccgcgctaatcacccttactctcagcttcaacaagtttttaagcatgtggtaaatgaatttttcttaccaccctttcactggtttcatctgtaggctcttcttgttaggaatcttaaatgttctgtgtatggaatttgtagggtgttggagctgttgttggagcaatttcccgcaatcttcatgagcttcaagaaaatgaaggaagcttttattcaatttatgaccaacccgttcttccggctcaggtactacatttcaaatatatcaaatcagaatcctctatacaggctttgtaaatcctaatcttttcctcaaaactccacaggatccagtggttgaggcaataaataacgcggtggacaagttaaccttctcgacgaatttcctcaacttcttggcacaacatgctcttatcatgcaagatgatttggtgactccttcagaggatacaatcgatgagcggtcttaccattttaattcgttactcctgaatctaggaaacacatttttgtacatggtcaacacttatatcatcgtccctacagcggatgactattcgatgagccttggagctgcagcaacggtttgtggtgttgtcatcggatctatggctgtggctcaagtattttcatcggtttatttcagcgcatggtccaacaaatcttacttcaaacctcttgtgtttagcagcatcgcactctttatcggaaatttgatgtatgcgttggcatatgatgccaattccatagcgcttcttttactcggccgtgtctgttgtgggtgagttaaaagttcaatcattttcctatatatcgtgtcaaagaggaaaccttttcctcaactgatttcaaccctttaaatttgcaggttgggatcagcaagagctgttaaccggagatatatcagcgattgtgtgcctttgagaatccgaatgcaggcatcggcgggttttgtgagtgcaagtgctcttggaatggcttgtggccctgcgcttgccggtttactccaaatcaaattcaagttttacaagtttacatttaaccaatctactttgccgggatgggttatggctgtggcttggctgttctatttggtatggctatgcatttcattcagagagccgttgcgtgacacagaggatggagaaaaaaacaatcgaaatgaaacaacatcaggtcattattaatagtaaaagctgtttttcttttctgtctgtaacaattattaacgagtattgaatggattcttggttgatgcagcgacagatagagtagaaagtagcagagtcgaggaaggtcttcgattgccgttgctgatcacttcaggaatcaagccagaagatgaagaggaatgcgatgaaagtgaagaatccccagaagattctcacaaacctgcaaattctttcatagaagcataccgactccttactccatctgttaaggtatcattcatcacttttcttaaacatctgttaagacattgatgaattc

SEQ ID NO: 1012 - DNA, 100867 bp, Arabidopsis thaliana
gaattccgttaaaattattgaccacgtgtatggtcataaacaaattatgaattcatgattcgatcaatattacgacctactacatatgatatgatgttgtaattaaccacattctcttgctttttatctcattaaaatttatttattttaattcattattttataccaccactattttccacgttctatggatgatcatagtggagccacgcatgaacatggcaaaaatagaaatatgcacatggcaatatatatacactatctacgtatgtgtcaatcagggcaatccaactttgttgtggtataaactctaagctcgaacagatccgaagatattctttcgttctctgacctgattaatgatcacgaagctaaaattgattatcttttatttttgtttataaattattagttatccttaatctgaaatcattttaacaaaaattttactgaatttaatcataaaaataggcttatgtataagctaacacatattttccaatgtccattattatttaatggtggaattcgatgtttaacgatatgattcaagttataaaaaaaccgaattaagtatctatttgtttctataataaaattctgaaatccaacatctctaaactatatactgcattatataataaacagatcatatttatttgaatagagtagctaagattaggcatactagttcaaatgtttgatggacatccgatccagttagtccgggccttcaatatttgggctcaaatgggccgaaactatattgggtcgtatatgaaaagttgaaatatctccaaactgaattttggatgggaaaaagcgggaagtcgagagagtaccttatttctaattttctataacgagggtagggcccaccaagaccatatagcgtaaagcaaaatcaaaatcaaacaattaggaaaaaaacataattttctcttttttcgaaattcgaaccgtaattagccttttgtttttcttggaatctaaaagaaataaaagagaggaaaaaaaggaggaacagtgagcaaaatcgtgcgactgggaaaaatttcgaatttttttctcttccggcgagggattcaaacttccgcctccaatttctcgccgtgaatctgagttttttttttccgtagcatttcaataggagcagtcttcattctccgtcgtctacactatagagaggtttatctacaagcttcttcttctccttatggcgttttaggttcgtatcgttttttttttttttggccttcgtctctgtgttacaaaagcgttgttggcttcttagggtttttgactggatctgcgtgattttggtggaatatagagctgattttatgggttgatttggtcgacattgtggatatttgctaagcgagatgttgaaatgtttgaacaaacttcatcattgtttacaatttaaagcaaattttggctgtttatctctttaattggggaactagtcttatctgaaattgaaagcatttgataggtattttaccatatgaggatttggtgtagaatgatgaagtaaggtctttcatgatttaaccatggattaggaattaggaagtatatgtgaaaccaattaacattgatgctaactttgttgttggctaattggttcatttgctttagggtcttctcgctactataattctgggagtcgcgtaatctctgagttgaaatgagcagtcatctgtcacaggacgccaatatgaatggtgtctatgttcgatcagatgtgtctagcatgctgagttttgacggatcagaaagtcgcgaaagtatggatgacagtaagaaaggtaacgttatctactcccttgtttgctgtttatcttttcgaacgctaatatcctctcatttcatctaaagatcgaaacagttatctttcagaaattgagttatgacaggattattcgaatgattagcgaatatggaaaagtataattgattatcttgaatgagtcgatttctcttgctttacatggtttgttatattgcaacagagccgttgcagaaatgaaccttaaaaatcgcctctcatattaggtgtaggggaaatggttagatgttttttcttctcattctttgtctatttcttcttaatttttcccgcaggtcatcagagtttggttgagtggttaaatgagacacttccttatctgaagttaccatgggaagcttcagaggacgaactgagagcatgcttgagggatggaactgtcttgtgtagccttttaaatcagcttagtcctgggtcaatgagaatggtacttacgaattttcatgaccatttcacttacttatctgctgctagactaaccccttttttttttgtcaaaccctcctttttttgactaatcctctttggttattctatagggaggcagctttgagcctgccagtgtaaaaattgagcggtttctgactgctatggatgaaatggccctgcctaggttcgaagtttcagatatagaacaggtctgttatgttttcatggatattattcttcatttctgtggaaaaagttgatttcttaaatatggaaagacatgctggtttacatagaattatccatgtcatatagatgaagtggttgtcgtattgccacttttcctttaatgagtcgaaccaattctgtgtaggcatatgtttagattaaaattagcctcgttttaaacacttctgggtgcaacacttttctgatcatggtttttgtctgacttgctattttgatgataagcttgcatgatttctgctcccatatcttttcttctctctgtcctcttttgtgtttctctattgagttatgaatcctaataaaaagtaaaaaccagggggatatggtgccagttttacagtccctgaaggcgcttaaagccagtttttccgatggtagttatgataagaactcactagctgcgaggaggagatggagcttgccagaggaccactcagattcaagaggagatgaccgcaactttactgatggattccagtcgaaggaaggatctgagattgatatgtctgatgctaaaatttcggatttacttaaatccaacagtttacgagtaaagttttctaacatagttttagtaaattgtttccaacctcttagctattgactctgtttctgattcaaatggcatttctttggcagaatgctcctactaggtcactgtttgacatgctggataagcttctagatgagagcatgacgaagatgaatggacatgtgtctcatgtaagccaaagactgacctactcataacacccttctcttgattcatgttttctgggtttgcctagattttaattccttacttcctggaatatctcttcttattctccatcatgtttctcattgttttctcgtgtgttgttcaggctatggcatctctcttgagcgcacttgtgcaagtgattgaacaaagaatctcaaatcaagctgataacctaaagaatgtaagattacctaaggcctttctttcttgatttttctagtaatgtatatcatccttctgactaagtcataacatatgcttatgaaattggtgcagcaaaatatactctttagggtacgtgaagaaaaatacaggtcaagaataaaggtcttagaatccttggcagctgggacaacaaaggaaaacgaggtactattgtcactggttccagtgtttctcttcactttatttctgttttgcttactgaatactgattggtattgttattttctttgttgtagatcgttacgaactgtatggagcatataaaggtacttgatataatatacatctccttcatccatattttgcttttagttttgttcttgcatctggaaatgttgggttacagttggcccaaaaattttgtgcatattacctgtggaacataacctctaaaccaatcctagatttcgattatggttcagtctgagagattttatcagaaaattattgtgtgcgcgcctcaaacttaataacgcaacttcatacatcatttttcatttggcttgtttattagatttatttaacatagatatttgtggttgtgctctgtagcttgagaaaaccagaatagaagagaaagaacgatcagaagaaaaagatgttgtgagactgagaaaggaaaaagagcgcagtgatgctgagattcgccagctgaagcaggaactcaaattggtgaaagagacacatgaaaaccaatgcttggaattagaagcaaaagcacaaaaaactagagatgagttggagaagaagttaaaagatgcggagttacatgttgtagattcaagtaggaaggtgaaagaacttgagaagttgtgccaatctaaatctcaaagatgggagaaaaaagagtgcatctaccagaacttcatagacaaccattctggagccttgcaggttggctttaaagatagtattgtaaacattggttacctatggtagttatttaaatgatatagaatctgtgaattatgcaggagttgagtgctacttcgttgtctataaaacatgaagtcgtaaggacacagaggaaatactttgaggatttaaattactacggtaagattcactgctgtcacttactgtctatgattgcttggccttaatgttattcatttcagagtacatggcttcttatttataatttttctcctaggtttgaagctcaaaggagtggctgatgcagcaaaaaattaccatgttgtccttgaagaaaatcgaagactgtacaatgaagtgcaagaattgaaaggtaaaactcttttagtcaatgtcatttactaatttctatgtattgaaccattcaagaaatgacttcagttctttctcttcctatctaggaaatatcagagtctattgccggattagaccatttcttccagggcaaaacagtagacaaacaactatagaatacattggtgagactggtgaattggtggttgcgaatccctttaagcaagggaaagatacgcatcggttatttaagttcaacaaagttttcgatcaagcagcaacacaaggtttaaacctctttccctcttatgtattgttagcgttttcctctataatatatgatattcatatcctgaatctgttatcttatgtagaggaggttttcttagatactcgaccattaattcgatccattcttgatggctataatgtttgtatatttgcctatggtcagactggttctggaaaaacttatacaatggtaaattacaagcttgattttgttaacgatatgctttaaccaatgattataagtttttctaacagtttctattttgcaaacacagagtgggccaagcatcacttcaaaagaagactggggtgtcaattatagagctttgaatgacttgtttctcttaactcagagtagacaaaacactgtcatgtatgaagttggtgttcaaatggtggagatatataatgagcaagttcgtgatatactttctgatggtggttccagtcgaagatatccttttctaatctaatatagtgactaaacattttttggagtaggtacactcgtgcatttatatttgcgaccccacagagaaattggtgtggtttagtgctattaggttttactaatgttctgtggttgcgttcaatacaaaatttccttaacttgcatacattagggatttggaacaccgccttaccaaatgggctagcagtccctgatgcaagcatgcattgtgtgagatcaacagaagatgttcttgaactgatgaatattggactaatgaacagaaccgtgggtgctacagctctcaatgaaaggagcagtagatcacactggtttgtatacttcttcctgaacttgtactaccttccttaatatgttattgtctaattttaagaagaccatgttggctatcatttgcagtgttctttctgtccatgtacgaggtgtcgacgtggaaaccgattcaattttgcggggcagtttgcatttagttgaccttgctggaagtgagagggttgatcgctctgaggcaaccggagagaggctcaaggaagctcagcatatcaacaaatcattgtcagcacttggggatgtcatatttgctttagcgcacaagaaccctcatgttccttacagaaacagcaaattgactcaagtccttcaaagttctttgggtaagtatcactctctgaagaaaatagatttgtttatatgtattgcataaaattgatgtttgctttatgttgttgattcccttagctattctctcttttttcttaggtggacaggctaaaactcttatgtttgtccaagtcaatcctgatggcgattcttatgctgagacagtaagcactttgaaattcgccgaaagggtttctggtgtggagttaggtgctgccaaaagtagtaaagagggtcgagatgtaagacaactcatggaacaggtttgtattctctttctctctctatctctctcaagatttaattttggctattgaaagttaaagagcacaaaggtattcgtatattgatattgcttgatataacaggtatcgaacttgaaggatgtaattgctaagaaagatgaagagctacaaaattttcagaaggtaaaaggtaataatgcaacatccctgaaacgtggattaagcaatttaaggttggtggggcctacatcacctagaagacattctattggagcgtcaccaaacgctcgacgaggaaaggcctctggtttatttggaagaggaacctcagatgttgacaactgctctgaatatagcagcaagcattcggattctggttcacaacaatcatcagacgaacgtaaacatcaaaaagattatcaccaaccatctaaatttgctggtgcggcgaaaggaatcgattttgatgatgaagatgttgaactcgtaggtcttgcagatgcagattctgaggacagattgagtgatatctctgatagttgtctttcaatgggaacagaaactgatggatccataagcagtgcagtagagttgactctattccctgaaactgctaagcctcttgaactaatagaacgacctgaagcacgcatgacttctgagaaactcgagaaatcagtgaaaatggggaaaaccgagccaaaagacaggttagtattctcgactatcacacattaagagaataatctgaaggcatttacagattcttatgtttgttttgttttcggattttaaaagcagaactaatattccatcgaagattccaaagcagaccttgaaaccaccaggccaaaccagaccgtctcgtctgtcaattgccactagctcctcctctaaggctttaacaggtaatggctctatacatcaactctttgacttgtgtcctaaaaaccaaatctgtctgcctctaattacactcatagcaggctctaatcacagcttacttagatttctatgaaagatctcatataaagtagatgcttgtttctactcagtagaaatctcccgtagatctttagtgccaatttgctcataagccatctcttgatttgccacaggtgctaaaaggccaacaattagcacttcatcttcagcgaaaccactcaatagaaggcggtgaagacacaagattcatctcgagggctggaagaagaagatttgtgatggatttgatctgatgttgtttggtagctaattgtgtaactaagcatatgatgtccttttgttcttctttcttaacataattcaaacaaacaccttaactaagttttcatatgtcttactattaacttaaccctgtccacttaacctgtgaggttctctatgattctaaatttctaatcacctaatgttacgcacgaaaatcgttggattattgtaaatacaattttgcctaatgaaggtaataatttcaacaaggaagaatagggaaacttgagcaaaccagaattatggattaactggaaccaatcaagaccaattgattcttttattttctttttgctgattcttatggcactatcatggttgcccaattttgacatcaatagcttaaaactgtaaagagcaaaatcaatgagatgtgttatagcatttcatataggtacacatgaatctctcaaatgcatttactttgactaactgttcttattttatgtatacattaattaatacattacacacaaactggaattgtaatgtttacataattttgattcatattccatgagtaaacttacaaaaaatatataacaagacaaggatcccaaatccatgaataaagctgcacgcttctcataacaagacaatggatcctaatccatgagtaaaacttcaaacttacgaaaacaagaccatttccttaatcatacgtgaatcttcaaacttttatgttgtgtgtttctatttttctatcagagacggtagaaatttgaaaccttcagtgattcaaatttcaaagttgttttcacttatagagacatcagaacaagttaaaattgaccatcacataacatatctcatttcaacagtgaaataaataagcacgacaaataaaaaaaaattaacaagtggaaacatcagaatcgaaatcgatcaagcaagaagcaaaatggcattgaatcttccattatttcattcatcctccaaatgatgatcctgcaaagcaaacacactaagctaatcagagagggttaatctagactctgtatcttaaatttgacttggacaattcgatagcaaacttctccgaaacccaaaatgaaagagcataaactgaaaagaaaaaaaatgagacgaggacatacctcactcttctgcagatcctccaatattgcaaatgcttttcgtaattctttcttactgcataagccggccagcatacagtggaaagtgatgtaatctggagccacaccacaagaaatcatctcattgagaaggtcttgagcggcatcgagatcacccacttgacaaaacccatgaatcaaagtagtgtaagtaactgtattagcaactattcctcttcgatgcatctcacagaaaatctccattccattgtcaacccttttagccttacaatagccattgattagggtgctaaaagtgactacatccggagagcagcccttgctagccatcgaatctaacatgcgctttgcatcatctacacgatcctgcttgcaaaatccatcgatcattgagttatatgtgattgtggtaggaaatatactccaacgaagcatctccttgtatatttcttcagcctcggagacctttctttctttgacaaatgcattgatcaatgcactgaaagtaacaatatcaggattgatttgcttttcaatcatatgacgcaacaattggtcggcatcactccatctaccagagtgacaaaaagagtctatcatacaattgtaagtgagaacattgggaaaaatacctttctcatgcatttcagtgaaaaggttttgagcattgatgtggttcccgtccttgcaaaggcgatcaacgatggcagtagagattacaacatcggctttgatgtggctttgccccatcttcctaagcagattcaaagccgagacaaccaatcttacacaatccatttacaattgttccgtaagtaaccgcgttaggttgatgaccttcttctaccatccgatcaacaagagctagcgcttcaagaactcgaccctcacgacaaagactgttcatcagtgtgttgaaggtgacaacattgggtctacatccagtttcaaccatataatcaaagaaagctacggcctcagaaatcctacctgattttttgtttgaacattgggtctacatccagtttcaacattgggtctacatccagtttcgcctgattttttgtttttcttctcgatatctctcttttctttttttcacacttctcgatctctctaaccataaaggagtgtacattcaaacagtgtgagctctgagaccgagtgagcgtagtaaaacataatcagaaaactaccggttccattaattggtcggtacattgaccggttaagattaatctagccggaccgggactttaactctggttttgccatctaaataacgtttttttcttttcctataacatctacttaaattttgacattagttaagttggagctattgaagtcaatatcgttcttctttctaaattttagtgatttttttttaagataaattttagtgaaactaaataacctatttttctcctacggaacaaattattgggctctgtaacgagtttcgcttcatactaaaccgtacaagaatctgccaaatatatattcaattcttaatcaaatcttctaaatatagtattgttaaatataaaatatttagtgtataagtgggataataatttgaaccaacctattatattttctatgaataaaatttataaacggatggacatctataagatccgatagtattttgttccacccaacagtattttgttccatccgcttaatgcattaaacgtaaaatatgaaaataaactaaacaaatatgtcgtgagcaattacaagtctcttgtaaaccaacgtttggttcccaagactcaaatcaaacagtgacacacaatggtttcttctcttagtatgatgtgagatctaaccatatcatcgaacaaatcagtggcatcatcttaaattttgagataatgaaacccacttgtcaatttcaaactctctccttctaatgttccttggccctttgatgaaagtatacatgtcttgacggaaagaagatgaatcaatctcgtgctgatcaatcaggtagaagcagtagcagattccgatttcaaaaccctagccaacatttttgttgttgtttcgcctgtttttgtttttttgttctcttatcgatcttactctaactctaagcgagtgatgaccgatgatgaaggaatcccagaaaaccggtaattttaaatttgaatcataaaaccggttcgatctcaacgattccgaaaccggtttgattggtccagtggacttgtcacaacgtcgtaaacaaatactattttccttatccgaaccggttcgtaccaatttcctgatgaaatcaaatcaattacacaataatcaaattttggaagataaggaaaaaagaaaaggagcgtgcaaaaaaaagtcacagtcgcgagataaaatccgaagctagcgaaaagcttcgatttccagcgatcctagtgttggattctacgattttagggtttaaatcttgagatgtgttcgttatcaatgcaattctcgctcttgcaatcaccaccatctcgtccttgtccgtcttttttagccaaccatgaacctaaactctctactacttcctcctctgtgaccttccccttgaagacgaacacttggaagtgtagcggaactgggaatttgttggttttgagagttaaagcttatggttcttcttctgattcctctgcagattcctccacgcctcccaatggcactcgggtaaatttgcatttgagcttgaaattccattggttcagcattcgaaattgatattagccctaatcacaatcgatcactggttttaagcagcagcccaaaagcagaagggatattctactggagtatgttcagaatgtgaagccagagttcatggagatgttcgttaaacgtgcccctaaacatgtaactttactctgcttcattttctcaaaagaaccatttagagttagagcttatgattgattctatcttgtttcttaggtggttgaagcaatgagacaaactgtgacgaatatgattggaacgctgccaccgcagtttttcgccgttactgtcacctctgtgagtgctttatgtaagcgatacgttttcaacaagttgtgtactgtgtttgttacttggatttatttgttgaattgagcattatatattgctttaggttgctgagaaccttgcacagctgatgatgagcgtgttgatgactggatatatgtttagaaacgctcaatatcgtcttgaattgcaacaaagtttggagcaggttgctcttcctgaaccacgtgatcaaaaggtgatcattttcagttttataacttctgttttttgcttggcctgtaaacgtgtacatgccgatgacttctgcttcttctttgcttcccgctgataagccttgtgttaagatactgtaggagcattgtaattaccccatgtagctgcgttgatagctcagcaactataggttagtcagttagctagagcgcagtatagttttggcagaacgagttgggatattctggattggtctcgtatattggtttgggtcgtggttgagagttagacttctcctgattatcaatcatcttttgtgttatagttctttggttaattgaatatataaggggtttaccggtttgaaacctattagactttctttctctctctctttgtagatatgcgtgtgtttgatatatcaggctatatgtgacactggttttctatttctgattaagccaggggggtgatgaagactatgcaccaggaactcaaaagaatgtttctggggaagtgatcaggtggaataacgtatctggccctgagaaaattgatgcaaaaaagtatatcgagcttctggaagcagagatcgaagaactcaaccgtcaagtggggagaaaatcagcgaatcagcagaatgaaatcttggagtatctaaaatctctcgaacctcaaaatctcaaggcatgatgattcatatgttgttattaatttctcttgatcaaatttgtattccaatgtttattatcaattggaatgctttgaatctgtaggagcttacaagcactgcaggcgaagatgttgccgtagccatgaatacatttgtcaagaggcttctagctgtgtcagaccctaaccaaatgaaggttctctaataataacttctttagctgaaacttgctctgagttgtgtgttgtttatacagtgtgattgtgaattgactgatatcaatgttttggtggttacacagacgaatgtgacagagacaagcgcagcggaccttgcaaaattgttgtattggttaatggtagttggatatagcattcgcaatatcgaggttcggtttgatatggaacgcgtgcttggtactcaaccgaagcttgcagagctgcctcctggtgaaattatttgagcactgtaatgaataaaagcgggggcttttttttacccgaagaactcagatttcatttgtcaagtaatttttattgtaaaattgatggaactcactttgaagagaagacggtattggctgtttgcaattagatcacagattttgattcagactcataaatggcaactatgatcattaggcttgcataatgaaatgtatggtctgatcaacaaaggaaaagaacaattgagaatcagaggaagaagctctgcttcacttacgagattcccaaattgcagacaaagcttcaattatgatcgttaggcttgcataatgcataatgaaatgtacggtctgatcaacaaaggaaaagataaactgaaaattagaggaagaagctctccgtctcttatgagcttctctactcaattcatgggttctgtgaagatctagctatttctatggatcaaattgtgaactatcatgtattctgattttaccgtatatttattcgattttgtgaaatgtcaactttgtatatccatgtcttgatgtattcatcctcatgcggaggattatacaggcttaaattttatatcaagattgagaaaatttgaacacatgagacttatgaatcgacagcaaaaaaattaggggaaaaaagaagatggatggtatatggtacaaaaaatccaatttcttctcatctgtcaatccatacaattgtgtgttttgacaaaactattcaaactaaaaatttcaaaaccaacaaagaaaactgaaaacacactaacaaaaaaaaacaaaattttagatcctatgagacaagaacataacacatcatacttcacacaaccaatataaagtcatctttacattcctacacccagaagtattgacacataagctgtcatgaccgcaataaaaaatctcccaaatgatttgtttcctgcaagacaagtaaaaaagtcaaactgtttagtaatttactctatatagtctcttcttcataacccgaattgtataacaaaacggttatatacgtatattaatgatatataatatgcatgcttaattaccttttataacgttaatagaagatgacccgctaaaccctgacgcggtttgcggccgcttaaaaagcgggggagacggcaataatggtgaaaaaagtggtgaagaaggtggtggaggtgatggatatggtggaggcggtgaagacaaagcggtagcttcgtacctcaagaggcatttaggagtaaagatctgagcccaacgagactggttgcaacattccaacatttcttggaccgcaagtttcaaacacgttgtgcagtttcttggatcaagatcaggactacactgagccattgaatctatatcaaacgaaccctcgaactgtttcacacgttcttgatcctccacgaaatacggtgttgatgatagcgatggggaagaagtcgcattgatgataagctcatccattttatcggacagtgtttgtgggaagcgatccaagttaggagcataactcaaagagtatctaatgatgtaaggtctttcgtctacgagggagaaaaaggatgaatccgagtaacgtaccatacactcttcatagaatatgaaagcttctttttggtaagtgcagtttcttgagatttctagggttgcggtttgaacacagtctgaacaagatgtttctgagatgtctcctctacagaggaacatgccacggactgtgtcggggctaatacccgccgtggcattggaataggatccgagagaggaacggaggcggagagaggagagtacggtttcgcggtttgtctcgtatgtgctggtttgtgtaaagttgtcggagaattggttgcagaaggtgctcatgtggatatggtcagattcggatatggttaggttagtagagaagagaagagataaaagagaaagaaagcaaaagagagaagagagactttggatcattgttgccattatttgttcttcttgtttatgaattatgagtgaaagatgatatttatagtagacagatttgtaaaaagatgcattatatatactctttaaataggaaaaatattttattactattaggtgattgttgaggccatgttgttttataaaatattaactttgtgattctgcaatattgaaaaccagatgaaatacttgtttaggaataatacagaattattgaagctggacacgtttgttatattattgtctgaagcagaacataagacttgtacggatcaagacccttttttaatggggttaagaagactctgattagtcttacaatttggaaggcatgttttgttgaatctagagaaaattattaggatattagttacagttggagatacatagaaatcaagatatgtttagatccttggttcagtcaattgttaaagtctcaacgtgaaatgaagtacgaaactagattttcaaaattttaaaataaatttatgaggaattcggataaagtttttccagtttgcctaattaacacttttaagatttgtttttaacaaataatttcgtgaaattttcttattatatacacttctaagttctacccgtaataggcttccatagttaacctatcttacattttcacgagacattgccatacattaacccaaagtattgaaatgtacgtaacatataaatacacaaatgtctgtatttttgtttccctaggttttgaatctacatacacgagaacacaacacatcgcacatcacccaaattctgagaacagaaatataaattagtagccacaatccttaaaccatcactacatttgatcataaaaccattaatagtaacaccaaacctgtcatgattgcaattaccgttctcccaaaaatttcatttcctgtaaaaccaaaaaaaatagccaaaacatatgttttagttgtttattcttgataactgtattgtagacagatagggttacggtgaaccagaaatgtaaattaaatgatatatactgttaatgactcactttttgtaacaccaagactcgttacgttcggttgcaaagcggagatttcatacgtgatgagacatttagtatagaagatccgagcaaactgagcatggctgcaacaccccgagagtctttggaccgcgagtctcaagcagacggtgcagtttcttggatcaagatcaggactacactggaccattgcatgtaaatcataggaaccttccaattgagtcacatgttgttgatcatccacaaaatatggaactggtaacgacgaagacaaggatgctctaaggataagtgcgtctaatttttcaagaagtgtttgactgaaaaattgcggagaatccaaagaatttcccgtggagaatctagcggtactaggtacatcctctacgagcgtgaaaaaagaaacgttcgagtaccgaactatacactcgttagagattaccaaagctgatttacgataaaagcaggatttatagatttctaacgttgtggcattgacacagtctgaacaagatgttctgtttaggtctcctctgcaaaggaacatgccatagattgtatttgggctaagcccggccgtggcgttggaatagcttccgatggaagaacggttgcgaagtgtagagaggaccgtgtcacgatttgaaagataagagctagttcgagtgacgttgtcgaattgggtgcaatcaataagcatttgagaagcttgggacatggctcggagagagaatgagaagaagcaaaacaaagcgacggcaaagtgtgtattgattcccgtcatttttttgtgttctttcttgattattatgacttatagaaagaacaaaacagagcatatagatttataaaagagaaaaacattgtctctctttaaaaataaaatagttcaaaatgtccaaatataatgttgatgactaattcaaaggttgaatccattattcttgtatataagacgttgattatctttacataacatgaagcctaaggtaaaagataaagttgataatttagttttgtgaaaactaatgtacacaagacttattcgtacaattgtttattaaatagttgtgggtaaggaagaaattctccaaagtgtgtaattattcttatcatttttgtgtgttccttcttcattattatagcttatgagaaagaacaaaacagatcacatcgatttatataaagaactaaataacaaacagagcacatagatgtatattttttaatccattcaaaccagtgatgtccacatataacgaggtagaccaattcaaaagtaaaaaattatatatataatatataaatgtttttttgaatttcattattttgtagaaattataacattgatcatcttagtaggttctttatttcttgaatgcaaaacatgaagttgacacattggtttctgaagcaatatctgcaatcttggaagatagatagaaagctagatgggttgatcataccctagtcatattctttagataagatgaagcagccaggcaaaagataaagttgacagattggttttgtgaaagattctgaagcaaaaaccaagacttgttcctaccaattatattttggtttctcatttatgaaagataagtcacccggtgagaacatattaattattattattttctttctttggacacaattaatttaattaaatatataaactattatattaggaataatacaaaattatttaagctgggcagtgtacatgtttttggtattattgtctgaagcaaaacataagacttgtttaggaagacccttttttatgggtttaagaagactctgattagttttacaattaggaaggcatgttttgatgcagagaagattatgaggatattagttagtagttacagttggagataacatagaaaacaagatatgtttagatccttgaatcgatctctgtcttccaaactctgtcccctattcttgattcttgatttgacttacaatttcacgatagaccatcatatatatatattagtattatgatcacatctattttcttaagactgataacaacgttttcaaaatggcatcaatgatttaacagcgttcttagcttgaaatttagtaatttagattacctcaattgcgctaccaccaaattaaggcatgattcgttgtgatcatcgtataccacccaaagacttatgagcacgttcaatgcaatttttctctctcccctatgattccataattaactatgcttaaatatacgaaggaatgagtactgcgagataatcccactaatataggagaacacatgatgctatatctccattcaatctttgaccaagtcaacgtcggtttactctggttatgatcttaccatcacccaaatggagagaacacaaatataaatcagtagttacaatctttattacatcactagacttgatcataaacccattagtaaacctatcatgattgcaataaacgttctcccaaatatatcatctcctgtaaaaccgaaaaaaaggagcaattcaaagccatatatatcacataagttccatagggtggggaaaggaaaaaacggacattatatactgtgactaaccttttgttgtaacgccaagactcgttaggtttggttgcaaagcagagatgtcatacctcagaagacatttaggaaagtggatccgagcccaacgagattggctgcaacattcggagaatttttcgaccacaagtcccaagcacacggtgcagctgcttggatcaagatcaggactacactgagccattgcctctaaatcatacgaaccttccacttgagtcacatgttctttatcttccacaaaatatggaaccggtgacgaaaaagatgagggggctttgaggataagctcgtctaattttccaggaagtgtttgattgtaaaattgcggataactcaaagaatcattctgagagtaactaaaggtggcaggtgaatcttctacgagtgaaaagaaagaattatccgagtaccgaaccatacactcgtcagagaacatgaaagatgtgtcatgagattcacaggatttatccatttctaacgttgcggaatggacacagtttgaacaagatgttttgcttatgtttcctatgcacaggaacatgccatagactgtgtttgggcttagaccggccgtggcattgaagtaatagcttccgagggaggaatgattacgaagagtggagaggacggtgttgcggtttgattgataagtgtcgggaaattggttgcaatcagttagattttgagaaggttgggacatggctccaagagagaataggaagaagcaaaacagggaaacatcaatgattcttgtcatttttgttatgactaatgagaaaggacaaaacgtaacatagatttatataattaaataatacctttgtttattttatttcattcagatccgtaatgtccacacataaacgtggtagacgagttcagaggaagaatctatatataactattgttgtttttagttgaatatatttcatatttcttgtatatatataaaacgttgaatatctttgcaggttcgatgaagcaaaaagtcaaaagataaagttgtccattggttttgtgaaagatctaaacccaagcacaagacttgttcatacattttagtttttttgagaactgaagatattctgaggtttagaaccacatgaatctttttttttttttttggactatagacaaaagaaaatccaacgggtaagaaaagattaatttataatttaaaaaaaaaatatattagtagggaagtcattaatgagagatataggtgtttggttttaaccttttttccgtcagcaaggtgttttaggtattttgagttttagatttgacatttttatgtaaagttgcaattttatggaaaagataacaaataaaaacctttaaagtaaaaatatggacatgcatcaaactccatttcttcttaactttctaatcaatccatataaacatcagaatcaaacctaattttttttgggggaaaatattaacattttttatgatcataaatcataaaaatataatacacatcacacagattaaacgttattttttatttcacaaatcatttatttaaattaatccataaatcatcacatttggtcccaaatccacaagtgcaaacaccttaatgtcacgtcgacccgttttcattaagctggcattgtaaaagcaatccacgcaaatattttcctgccacaaacgaaaaaacacaaattagagtaaaccctccttatcaatagtatgtgaactattaggaataaatatttgattaaaagttctaaacaatacatacaacaatcatatatctcttttcaagaaaaccacggattaagtgctcagcgggggcggtggttgcgaaagaggaggcggcaattgaggcggcagagacagaggaggcgaagatgtcggagatataggaggcagagacgatggagacggcgctggtgatggcaaaacaaaggttctatatctcaaaatacatttaggagtaaaaatcagagccgaacttggtacaccgcaacaagttgaaactgttgcatacgcaaatctgaggcaaatggtacagtttgatggatcaagatcaggactacactgaatcattgacactaaatcatatgaaccctctaactgagtcacacgttcttgatcctccacaaaatacggtatcaaagttgacggagagacgttaggaatcagttggtctaatttattggatagggtttggttaaaccggtttgagtttggagcagaacgaagagagtaacgaacgatgactggtttactttcaaattcagagaagaaggaaacatttgagtatcgaaccatacactcgtcgtagtatatgaaagctcttttgttaagagtacagtttgtagcgatctcgattgctgcggtttgaacacagtctgagcaagatgttgtgttgatgtctcctctacagaggaacatgccatagactgtgtcggggctgagaccgattgtggcgtttaaatagtgtacgagcgaggaagtcaagctgagagtggtgagtaggatgttgcggtttgtttcgtaggagctggtttgtgtgaagctgtcgacgctgcagaaagtgtgcatgtgttgaggttgggacatggtttggtgagataacaaggaaaagaagaagtaaaacagaggagcagtgagtatgattcttgccattttgttctgtattgttcgacgaaacagaggagatagagaatttatagtggaatgaaaagagcttttctttgttgattttttcaaaatagtgtctaaataaggatatggtaataccaattcagaggaagaatatgtaaaactagtgtatttttttctcatatatgataattatgttattagtaagacaaaatcataaagtcgacgcagatcagagtttaatgtttatcttaagcaaaacagaaacttagtcctacaatttgtgtcaaaaacctttagggtgtatgaaaggattttctctttatatcactatatcattgatatggctctaaagggcctttatatagctttacaagctgacctaattccgaaaagactcatgcgttatatgccttaataacaaatataagtaaaaaaatataagcaagatacggtaatgtatatatagatatcctctttcaagttggagagtgaagatcacaaacgtcaaaattgaaaagaaattgttcaaaatgtttgcgtccaagaccctaatgacgggttcggtcgtacatgggcattggcaattgttcggtttataacttcatcacgaatgaaatgagtcaatttcaatatatttgacaccctaaagaattttggaagacggagaaaaaattgcttcagagacatggtaacgaataggagaataatgaaacaatgataggcttgaagtgctaggattgttacttaagcaacaagaagtaacataagtaacttggacaggagcttgcgttgactgcaatttagatgatgtaggagcagcaagtgcaccataattaaccaatatactatactcagattctgaatatatatatgatgaggacaatggaaatttagaaaaaaaaatcaattatgtcttgcatgcatctccttaattaatctttctttcttgtacgttttttacaaactaaagaataaattaaattggtttgtataaaaaacaatttaaggataaagtgatccggatttttaccatccgactaattagtaaaagaggatctatatatttacataatgattaatattttttaggtcatcatacaatcataattttttttttgttaaaacatcataatatttttaatagttttttccgcggacaatgcggaatgagttcttattagacaagaaaataacatatcacacgtcacacacaatcgcagaatacaaagtttaaaaaatcttcattatcattggattgaatcacagacccacaagtgctaacaccgaagttgtcattgctgtgatgaaaattctcctcaatatttcgtttcctacaataagaaaatccaaacacataaacattttagttcctcagtcgattatcttcatgatagttggatttttagatcatgggcgagtttatagttctcatagacaaataaagtttgattactacacaaacagctgcggtgtcttggcgggaagaaattaaaacattatcttttgacgtaacttgtaaaaaaaaaaagattagagtcgagggcatatattatgctcacctttcataacgttaatagacgatgagccgcttggtgattgagaagttggcaaaccggttgtgtcatacttcaaaaaacatttagaaagatagaactgagcaaaacgagcattggtacaacagcctgagagacctttgaccacaagtctcaaacagacgccgcaatttgctggatcaagatcaggactacactgaaccaccgtgtctaatgtatacgagccctctaattcatttacacgtgatatatccttcacgtaataaggcgtagaagcagacaaagaagactttgatgctatgaggataattagttgctctaccttattggataacgtttgttggaaagaactaaaaagagaagtaggaaaagtggcgagagagtatttagcgacgtaaggcccgtctagttctacgagcgtgaagaaggaaacattggagtatcgaaccatacactcctcgtagaatattagagcagtttttctggaagtgcagttattatttttagtgatttctagggttgcggttttgacacagtccgaacatgatgttttggtgaggtctcctcggcagagaaacatgccatagactgtgtcggggctaagaccgattgtggcattggaataggttccaagggaggaacggtcacggagagaagaaagtagggtttcacggtttgctttgtatgagctggtttgtgtgaagttgtcggataatctgtcgtcgcagaaagtggccatgtgttgaggttgggacatggtttggtgagaaaagagagagaataagaagaagaagcaaaacaaaggagcagtgaatctgatgaaagttgccattttttggtactttcgtgtttatgaaggtagattaaaactgagcagaaacctagccatttatatagggaaagatcttctcctattttttaattcattcaaacatgtaacgtcctaatatatataccaattcagagggagaagatatatatataatatgtgttgttgtttcagaattgaacaatcagatgatttcatcaataacaagttgaatctataaatctgaacaacaaacatcatcttttaatgttacttgttcttgaaactatgaaaaaatcataaagttgacttgatattattagctttgtaagcgtatgaaacaaaacatggacttgttatatccaattttaattcgaaaacaaagatttgatgcaaagaagaaaatttctagggtcaaagtcgtgcctgttcacaaacagcacgaactatcatttggaagaattgtggtatttacaaaaaagtattaccataatcatattccaaaacttaaataaaataattataaattcatttagttgaagatccttaaacctaatataatttcaaattaaaacacttcagaaatataatttcaaaacaattcagaaaatcttttttttttttcattttagaacgtaaagtcgaaaggatatggatatatataggtaagcctaatccatataaactgcctcaagttccacgacgtggatcatacaattcccgtttaacttaatttgatcaatagttttcccattttcacattttacgcatactgatattttatctaacgacttttgataaataatatgttgagcgtttattattggatttgttttatgtagtaacgaatgaggaaactttggctatctctagagaactaaaaggtatattaattgttgtagattttttttttttttttgtaaagttcagttggagagtggaagaaaattcaacgagtaatttagctaagttgtgaatgttaaaacgttatgataatttaatttattcaagctagtttatgaacaaattcagaaaatgattataataaaaaaaataaccgccgaaatttggattgcttcagatgaccctagtcagatttttgtacaatattttatcctagtcctagtcaatcctttctattttaatacagtttttttgccagttttagtaatttaataattttgtgaagtggtttgaatagtattacatgaaatagtattattttggactctttccatctttttttttgtttatttcttttattagtaagcaaatgggaataaatttttataaactgaaaattcttccaaaaagagtaattcaaagtgggaataataaaataattttaaaatttcaaataagaaatcgacaaccatgtaaacgataattataagatagcttgtattccattttttcaaaaaaaaaaaaaactagaattgttgacaataacaacctttaaatactttaaatgggatcacttagacacattataataagtaatactctaccaatatagaggagaaattcaaagtaacaataaaaccaaattaacaaccttttttcttgttagttacatacatgaatgataacacatcaacaatattaactcaaaccaatagattacatgtacgatcaacatatattccacttgtaaactgatattctcctaagaaccatttaatgcttttgcgttttttattcttagtttgacttacaatttcagaatagatgtaaactacaatcatatcaaatacaatcatacaaaaaaattcaaagaataataacaatttctttcaagtctaacaattacaaagacggaaccaatagatttgatgtaccatgtttcgaaaatgctactatagaggttgaaattgtgatttcttggtatatttgatcgatataccactgctattttaaatgaatgttgaaattaggtgtgatatgcgttgttagttactagataacagtggacgaaaaaaaaactttaaaggaaaaaatggatatgtatcgactccaatcttcttttattgatcaattatccatcaattatccatgcatgatacatacatcagaatcaacacatataattaactttgtttttttaggaaccatattaacatttttagtgatcttggatcctgtgagaacgtacacatcacacaaattgaaggaatacaaattattacgaatcatcaatatttatgatccatgaaatatgatcaaagatccacaagtgcaaacaccaaagctgtcattgtaacaacaattctcccaaatattacatttcctgtcataaaaataataataataaatatttagagccggccctcaataatatagtttaattagctatcataataaaatattacacactatgctgattaaatatgataaaagaactatagaaatatgctgacctttaagaacgttaaaggaaaacgatccgctaggatttggaacgttctgtggcggcgtgaaaaccagcggcggcgatggcgtctgtggtaaagaagaaggtggcgatgatttaggcggtggagatcgaggaggcggagccgatggagatggcggtggagataacaaaacagaggtttgaaacctcaaaagacatttaggagtaaagatcttggcgtaacttggcaaaccgcaacaagttgaaattctaaagaacgcaactcgaagacaaacggtgcagttgaatatatcaagatcaggactacactgaaccattgtgtctaaatcataagaaccctctgattgtgtcacacgttcttgatcctccacgaaatatggaaccaaagaggacgaagatacgttgaatatcaattcgctgaatttttcagtaagtgtttgattgaaccgagtcgggtttggagcagagcgaagagagtaaatagtgatgcttggtacgatttccaattcagaggagaaggaaacatttgagtatcgaaccatacactcgtcgtagtatatgacggctcttttgttaagagtacaatttgaggcgatctcggttgttgcggtttggacacagtctacgcaagatgctgtggtgatgtctcctctacagaggaacattccatggactgtgtcagggctaagaccttctgtggcgtttgaatagtgtccgagagaggaagactcgcggagagaggcgagtagggtgtcgcggttggtttcgtatgaactggtttgtgtaaagttgttggtaggattgcagacagtaaatatgtggtcaggttgagacatggtttggtgagataacaaagagaagaaaaagaagtaaaacagagggatagtgagggtaattatgattcttgccattttgttctttgttttttttttgacaaaacagaggagataggaatttatagtagaaagaaaactttttttctttttgttgatttattcaaaatgatgtcggaataacgatggtattaccaattcgaagaaagaatatgtaagacttatattgttttcatccatgatagctatatctttaccaagacaaaatcataaagttgacacaatttggtttttgtgtttcttaatcaaaacagagacttagtcctaaaacttggaagaaagagtttgatgcagagaaagtaaagaaattactgcagagtcatggcggcgaacgggagaagaatgtaaccttgaacaggataggcttgaagtgctggacttgtgccttgaacagcaagatttgtaccaaacatcataggagcaaaaccagtgctaggaaagaacaacccgggaggagttgtagcagctgatggaggacttgtggcaccattaaaggtgaagtgacgggaagcagatgagctactggttgctccacatgcagtgcatccatgtgctgggggagaaacagttggtggtgaaaaagcagcgtttggccttgagcctatggtagaagcaggagcagcaggaaacggcccacctgcacaagagattagtcaatgttacagagagatataaaagagaaaaatgttatatatgtataaaagatttaacttattagttagttaattacctttgtctccttgcttgtaatcttcccaccttagttcttcatggcttttgtgtagataaggtttggaagcagatatggaaatataaatgttgcctttgctagtggggaaactccaaccagatgagttatccccttcatgtgttggcgcataaccaggattcatactaccttgttcagtggggcgactccattcatgagatgcaaaaggataggatccagtattggtattgctgctaaatgcaggggacagtgaaaaaggcgtgctcggcaacacagaagcatctccattgaaaccgaaatgttgaggacctgcaccgattgaaccaccaccaaaatttggtgggtttgatctaaataggttggaggaagatccaggcaggtaaccaacaccaaatccgggaaaagaactgttcaatggagatccaggcaggtaaccaacaccagtagtcgatgggttttgtccgagaaggttggaagaggattgtccgaaaaagttggaagaagagggtgctggcagggaaccaaaagcagagttgaacagcgaagaaccactcgacggagatggtgggacgcaaccaaatggggggaatgtggaagtgctagatgcactagcttggacaggagcttgcattggcccaaaaggtgaaaacaaactcgctggagttgcaccaaaaatttcagtactagtggaggaggaagctactggcgagataccaacatcaggtctggcaaaagcaacattgttcccaaacggtgaaccaaaagcaggcttgccacaattatgcgctggcccaaagctaggagatggggaatttcttgatgcactagcttggaagggaaaaccagttatctcgaatctaggtgttgaaccgaacatacttagaccgaaagcttgtgttggttgaccaaaagcttgggttggaccacaagctggggttggtgccgaactaactgatgtaacagcaggagcgaatccgagtagtgaagaactgtgaaatggagatgaagttgaggatgaggaagtggcagatgcactagatgatgtagcaaatctatcgatccataatctaggtgatgaggcaggagattgcgctggaccagaactaacggatgtgatggcagcaggagcggatccgaaactgaatggtgaagaactgtgaagtggagatgaagttgaggatgtggaagtggcagacgcaccggaaccagaagtagctaggagaatgcgaggctcaccaaatgtaggagatggcgctggtcccgaactaacgggtgtgatggcagcatgagcggatccgaagctgaatggtgaagaaaaaatttgaactggagatgatgttgaggtagaaactgtagcaccagaatcatgtccaagagcttgaactggagatgatgttgaagttgaaacaacagcagcagaatcaagttcaagaggtggaactggtccatcattaaccggcactgaagtgatggatgagccaatcacattgctctgttcggattctggagtattaagtaggtctggattggtaaactggtaacagttactgcactctggctcagaaaaatcaatcttcattcttcttttgatctttcaaactgttaaccacacaaaaataagaaaggacgcaaatttgttttggattagaggataactttcagaaactaattcgtattgcagaaactaagtaacaaaaaccctaaatccagatccgttaagatagtaatttccactcaaatttgggggttatacatcagaaagtaacgatttttattcagtaatcagtacaaatgagtaattgcaggatcattgaatcgatagttccaaccgataacagagcactgttctcgaatccacagaggaaacagtatgtagaaagcgtggaaaagaagcaacaaaagaaccctaattacaaagagaaaacatgatctaacccaaatcaagcaaaacaaagacatagaagatcaagagatactgatcggcaattcacaattgttgcaagtattaaaatcgcccaaaatcgtcagagtttaataaaaattgaacctttatcaaagtaggaagcagggcaccgaccaagtgattgaaggagaagcttacggagacaacaacaatggtgcggtttccgagtctgatgatgaaatcaaagttagggttagtgtgaagaagaagaaaaaagagttaactttgtggtttcaatttataggaaacgatttcttcaatttgcctgcgtcgctctaacgcttcctctaagattgttttttccttgctgattttttcttgtggcgttgttttaacgctagccggacgttttaggcaatctaatggaaatctcaatcaatttaaaatttaaaccagacaattatatatattttttttaacttgttaagatttttcactttaaataaatttcactaaaatgagaaaatagaaaagaaaatttgattcccaaaaaaaaaaaacaataagagcgaaaaggtatgtttatacttagaccatctccatcaataatttcttaattgagaaactgttcaatataaaaataaaatataattaaaaagtatgagagagagtagaattagtttctcaagtgagaaactttgagaaacccataagaacacttgtatatcaggtcaaatattattttattgttaaaatttaattatataactaatatttattaaaatactaatattttttttttttgagaaaccaagaaggtatctcagtgatggagatgcccttatatcataccaaacttcaacaaaaacaagtattggagtcgactgtgtgataggttcgtcctcatccaaagacatagcttgaaggactttttgatataattatgtgtttggtgtgtataggtgtggtgatgagtgcaaggatgcaagaaagcaaaaagggtatattattgaagccaaagacatgcaataccaatgcagattgtgctaagttttgcaaaggtccaatccagaactgcctatatcatacttgtgcctgcgtgccgggaaatcctcattgttgctagaaacatccccacacattagtttctaaaattcttttgcttctgattcaatatatatatatatatattttttttgtagtggcttaattatttccgcgcaaaaataaaataaaattatgttttccttgtgtgttttttttgttaattatgttttccttgttcgtctcttgattttctaattgcattcacaagacgcaaaatctctacacaactagaccgaacaacttaagctaatcagcagtattaaatatgacaattaatggaaccaagagataaaaccattaaatatgactcaaaaaaccgacttctttatgctaaagttatttattaacactcgctgagatatatttgtatgatatgtataatggctatatatatgcacataagaggaagctagagagtactatgtgatgtgtattaacgcttgaaactggagaggataaagacattagacattagtcagaattccacatactccccatcatacatagcatacaaaacagaggagagctttttggttgatttatccaaaacaatgatgtttttatatagtacattcaaaggaagaacatgtaacacgaactgttttcatccatgacagctatatttttacaaagacaatcataaatttgacacaatttttttttttttttttcttaaatcaagacaaagacttagtcctacaatttggaagacagagtttgatgcagaaagtaaagaaattactgcagaagtgcagattcatggcggtgaatgggagaagaatgaaaccttggacaagatagccttgaactgctggagagtaaagaaattactgcagactcatggcggcgaatgggagaagaatgaaaccttgaacaggataggtttgaagtgctggagttgtgccttgagcagcaagagttgttccaaacatcataggaccagaactagtggtaggaaagaacaacccgggaggagttgtggcaccattaaaggtgaagtgatcagaagcagaggagctacttgttgctccacaggctgtgcatccaaatgctggggaagaaacagcacctgtttcatggggtctctgaacactcgagcttacggcaggatatgtcgtcgagaaagatgaaaaagcgctcggaaactgggaatcgaaaccagggaaaggcgcattaggttgaccgaaaccggtagatgaaaatgttgtagcaccaccagcagcagcagggaagaaaccaaaagcaggaccagtaaagtttcctagcgttgtactaaaatttgtcctctgatgatgatcaggtacgcttggagaagcaaataatgatgtcgataccgttgatggtgaaaacacagcgtttggctttgagcctatgggagaggcatgagcagcaggaaacgacccacctgaacatgagattagtcaaaattacagagacatataaaagagaaaatatacataccaaagatttaaatgatgagatagttacctttagcttctttcttgtaatattcccaccttaattcatcatggcttttatctacataaggcttgaaagaagatatgttttgtccctcatgcgagctcggcaagagagtagtagctccattgaaaccaagaggttgaggagatgatgttttaacaccagcaaaggctgaaccaccaatagagtcgtaacttagtggatgttgcgctggcccaaaaagtgaagaaccactcgttgcagatgtaccaaaaactgatgcagtagtcgtcgatgggtttggtccaaaaaggttagaagaggaagatgcaggcgaggaaccaaaaaaaggtttagcaaaagaacattcacaccttgtaggtgctggggtgcttgaacaacaagcaaaagtagtcttggggaaatcttgggacggcccaaacagtgaagaaacactcactggtgttgtaccaaaaactactgtactagtagaggaggaggaggaggatgctggatagacagcaacatcgggtctggcccaggcccattcaacaccgcgccctgcagtagaataagcactaatactccaaggcacattttgcgctggcccagacagtgaagaactcggtggaggtggtgggacgtaaccaaatgggaggaagctaatgggtgtgggtgtggaagtactagacacaccaacagatgtggtggcagcaggagcggatccaaagctgaatgatgaagaactttgaactggagatgatgttgaggttgaaccaatagcagcagaagcatgtccaagagcttgaaatggtccggaactaaccggaactgaagtgatggatgagccaatcacattgttcggttcagattcttgagtattaagtatgcctgaatcgcgacaatggtaacagttcctgtactctggctcagaaaaatcaaccctcattcttcttttgtctttcaaactgttaacaaagaagaaaaaagaaaaacagagaatcgatacaaagctgttgaatcgatacttacaaacgaaaacagagaatcaaagtagaagataaggaaacagtatgagaaagcgtgcaaaagaagcaactcaagagccctaattgcagaaggaaaatatgatctaacccaaatcaagcaaaacaaagacagagatcagtattagaaatgtttcaagaatcacaaatcgaacctttgaaccagtaggaagcggagcaacgacggagatagtgaaagaggagcttactgaggcaaaagaaatggtgatcttctgatgaaggaaaagagcactttgaggtttcattttataaacaaacgagagatttgactttgactttgcctgcgtctctttaacgcttcctcggaagattgtttttttcattctgtttttttcttcctattcttgtggcgttgttttcaagccggaaggctctctaatcactttctctatgattaaattattttattttaaattcatgaaatctctgtcaagtttaactaaatggataatttcatgaattaggcacaagttgataagaaaaaaagtgctaggaagaaaaatggataatacaatgattttttgaaattttggccatgttttgaaaatttaaaatattttatatagaaaaactgatttttttcataaaccatattgtttagtcaaattaaattggcttagttaccaaaatagctaaagtaaatttctttttaatcaaattatctccctaaaatatttgcatatcaatggaataacacatcacacaaaatcttacaagtcattgtttcttttcaaacaaacagagactatatagaaaaatatatttgtttagtcaaattcaaaacgcttaggtactaaaatagctaacgttaatttccttctaatcaaactatctccctaaaatatttgtatatattcaatgggataaaaaatcacacaaaatttcacaagtctttgtctcttctcaaacacacggtttagacttttagtagaaagaaacatgaaaagctccttcacattcaccatcttcttcttagctcttctctttacctctggttagtcatctcttcctcatatatttgtagattcatttctaattaatgttgtgaaaataatgagtttggtgtacatgtatatgtatataggtgtggtgatgagtgcaaggatacaagaaagcacaaacgatatattgaagcctataacatgcaataccaatgcagattgtgccaagttttgcaaaggtccaatccacaactgtgtctatcatacttgtcaatgcgtacccggaaatcctcattgttgctagaaacaccccaacacattttctgattcaacatcttttatgttggaatttccaacacaaaaataaataaaactatgtttcctttggtcatctacttttttttttttttttttttgtctacttaattttgtaactgcatttacaagaagcacagtcattacaaactaaaccgagtaactcaaactcagttgcgttgaatatgacaatgaaaccaagaacaagaaagatagataatattgaaagaaacgggttctttgagtcatgaggaagaagaacaaacatttatgatgctaaagttctaaacactaatatataatatcccggtagctagattctggctgatatttatttgtatggtatgtatagtgactatatatgcacataagagggactagagattgattactttgtgatgtgtttttaaacccttgagattggagagaatgtgacattaggcatgaaagaaggaaggacttctcttgtattcatcggagtttccatttcaataagctctctgagtgaactgcatctagacaaagatatgtttctttctcctcttgagacttcagttctttgcagctcggctacacagattgagaatgcttgtaatgctgagagcttcgcgtgaaattttacctcataatgtccttctctgatacatgtcattgtcattgctggtgtgatctctttcccactctgcaacatagaatttttatatttcaagattaagggagacaagttaaaacacattttggtatcacaatgaacaaattcttacctctatgaaaagttccaaaccatgatgattgttgatgagttctggagattcaaggacaaaaaggtgacatcccatgtcccatccgctacagtcacaacctccacctgatctccatctttgcagtatcggcgtaggacacgagttttcggtatcaggcaaaccgtggtttcctgttggaactatgactttcatctcacgactcgagagtttgctgtttgaagaagagtcttgaataacaattgctgcaatctcaagtcctggatgtaaatctgagacaggccaaggaccagatgcagtgttctctgaatgttttgatagactacgagtcaatcctcgattgaaactgttctgccttggcagcttttcttgtagtagatcagatacagagttctctgtttctgaaaatatcaatcctcgtctgaaactgttttgtcttgacaggttttcatgcttgaagccacttctccttgcgcgtgcaatgtcgaaaagaacgaattcagagacagttgatgccacaagatcttcttcatatggttcttgctctaagcagatttgagttgaaacttgcatctgtcctattagtgaagattctttacctgaaacattcttattgcttctacctccaatgtagctaaacgaatagacaaaccgagattccttatcatccattcttgtactggccatatatacatcatccgggaggtctagcgagaatatgaaaacaggcatcccaagttcatattccatccttagatgagcatgtagatgaacaggtgaagacttgtttcttgagaacatttcttggcctgattctggtaacagaggatttctgtttgaaaatggattggacattttcttgatacggttaaaccagctcgttgagcttgaagtattagtagaagaagactcattgcttccctttgaagaaggcataaatgggaattgcattctagcagagagtgacttttgcaacctcggttccatgtttctctctgtaactaaaggcttagctaatcgttgttgttgttgttgttgtctcccattcgtgttcaaccgtacaccgaaaaaaccaccagaagaatattgttccactgaaaacttttcagcatctgatattttccttcttcttctctccttggatccctgattgaagaaaccatgtctctccttcgccttgtttcccggttttggaggtttcttgcacgaggagttaagcgcccgataaaacaaaaactcgtcctcttccccagcctttttagaatcgaagaaatctcgtagagtaggaagaacattttcagaactctgtgccatcttttgactgcttttgtatagattaactaatctctattaccatcagagaatgacaaaacttctgcaaaagatttgttcagggcaagaacctgtatcagtactgtaacataccaaataagctaacaaacagataatgcaaatgaatatagaaaagatcacttaccaatcacagcaaaatctaacttcaacttcttgaggaaactatcactgattatgaacttttacacaaagagaagttaaaatagcaaactctagatagagaagtcaaaaattttagcctacgctcttacagatctaaagccacacaacaaaagtgacataggaatcaagtagttgtgaatgtaatgaaagcaacagacaaaagttacataaaaaatcattttgaaagacaaaagctataattcacttgcattctaagccaatcatagaaagggtgtggaaaaagtaacaatcaaataccaattgatggtttcagagtagtgttcctcaaggatgataaaaagaaaacctttaatcatatgcatcatacaaattgatgaccgttacattaaaataggaaaagtaagtagctctctttgaacatgaacaacaattagccatgttagaacagattagaaaaaaagataaaactagcagagaaatgcaattttgcaataaaaatgttaaatacataaagctaaaactcgttctttaacgaataatataacattcatcaagctaacaaattccaaatctacaacagatgatcatgtggctccgacaaaaagcccttgggggaaataacaaatcacaatgctttcaaaggaaaatagaaatgttttttttttctctgttttctgttttcttaatgggcttttacgaaaagcttggataataaagtctttaaggcccaatttggtaaacactacatgtatagatatttataagtatgaaaatgagcatccaagggctcatagctcagtggtagagcattcgactgcagatcgagaggtcaccggttcgaacccggttgggccctttttccatttttattttgcttttttatttatttatttcggaaactccagttaagatttatttcctagaccttactgttgtcataaatcattatgattaatgttgaatctttttagaattgaaacaaaactaaatagaagactaattagattcctatgactaattaaaggtagggttgttaatttagactaattataagctatgagtattgtgtttgagtggctaagaatgaaataccgagatctgaagtatgaatccaacacaaataagaaacaagaacaaatcctgatatgcaaatctcaaatgatcattgacaattcaaagacaaagtactctcttctttacattacatactataaaacattgattacaaatcatggaatccatcaaagcaaatccacaatcacaccatttccagtttttctaaaaatcaaatctccatcaaattatgaaacttttttcttcttctgtatagcagggaaatgttcatgccagtaaccaagaacataaaaagagtctaattcgcggtagtagaccaaatgaatgcttccaataagaaataaaagagaaggaaagggtatacacgagcggaacccgaaactgaccagtgatgatgatgatgatgaacacgataggagaactctgtagtagcttctacttcagaggatgagatttgaacttatcctacaaagcccctatgggggcgtttcggtttaatgtaagaagataaatggtctttagctttcctctctcattttcctcttcgtgttttctggtatcatcatcatagcctgtttcttttgctttcaagcattgatccgtctttaagagcagcgtgtgcttcgttctcttgtcctagagctgatagagctacagcttgaagatacgatgcgatatgccaagccggagatatcacttgggcttgcattgcatcattcagcgcctcttggggcatctcattcattaggtaacacagacttcttcttgcataaacagtcggggaaaccattgtcccaccctcaatgaactgttccaaacacattcttagattagaatttaccctttctctggaaacttaaaccccaaagacaaataaacaatggcagtagaaaagatctaacctgagaatagcagtcgatggcatttgcaaattctttatgtcggaaagcaacatcacccttcttcttgaagttcagcgagtcctgcatctgattggtccacatctggaacgaaagctgaaatttttgcacagaaaaaagcaggcggaaaaagtaatcagattacaataagaaacaaggtagcccaatcccaaatacacaatgagacaattgtgattaagaaagaaacctctgttgctgcaccctcgtcatctttatagctaagcttttcaagaatctcatgtatggcagttagatctgttcttaggcatgcttctccaagtggtgaaaggggtgtcgttgaggcgctgcttggtatgcccatcagttgatgagaaggagtcttacatgaattaaccagtttctagttagtgtcggaaataatattttcgaaagcaaaaaaagataagcaaccaaaagatacaagagctggcgaaagataaatggtagtaggaaagcacctcaagatccttctgtagagggatcattgcagtaactaaagacttcgggttaggccgctcccggggctcatactgcaagcatctagaagctaaccgtattagttcagtcccgtcgtcgcttgaaaattgaccctccaagcatgagtcgatcaacatttgaatgttcctgtcccgtatgaggtccagagcctaacaaataatacacataacaagtaaagttttagccagaaagagatttgatatatactcagcaatgatccggtgaagattgatagatatagtatcttaatcataagcttacatgacttggaggaatgtgttttccactaagaagatcaagcaacagagttccataactgtacatcacactttctggtgtcacacgacctgtagaaacaaacacacaaactaatatgtcagaagaaaactagctacaatccaaataataaaaactaatatgcaagagttcaagtatatacctgttctgagatactctggaggagtgaacgccaggttggtgctataactctttccgtctctactatttttcatcagaccgaagcatgaaagtcttggatttgagtcctaaaaacacaaaacatatgatgatgtttctatattcacacattaacattgacaaacgttaaaaataatcaaacatataagcttaacttatcttgcccaaaataaaataaaaataagcttaacttacatcatcaaagagaactctataagcatttaagtcatggtagagtgcacgtcctttgccagtacaatattctaaagcttgagcaatatgtaaagctactcttagtcgcatcgcccacttcatcggttgtgactcccctaaaaaaacaaaacaacagttactacagaatcataaccatagagaagaagagtgtattagataaagtaagttacaacaataagttcaagaacttacaatggaaaagatgcttagccaaagtttcattaggcataaactcagcaacaagaagtctctcttcaccttcataacaacatccaagaagatttgccattctataattccttaattgaccaacagctttcttcctcctataaaaaaacaaagaccagagattcaaaatccaagaatccaaattaacataaaaaggtaaagactttattaagcaaattaccagaaactgacgagaatcaggccaagctttcctattaaaccttttaacagcaatacgtctttgattatccaatttccctttatacacaacatttggagctttttcaccatgctctgatactatattctctgtagcaaatcctgatgttgcgttcctcaacgtctcaattgagaattcacgaaactgaggcaaatcattcccttcacctctcctatcttcatctaaaggcaaaaaacacaaaatccacaattcaatcacagagataacaaaacaaaccctagaaagaaaaagaataaaaactcgatcgttacctaaccctgtgacaccatgattagatccttcaggatcagaaacacaacaaaatgcacataactttgaaacctcacaacccatttcagtattgttgtttctagtcaaaccataaaccctaaaccgtgtcttatttttagctgatttataaaaatcaagacttttatagtttaaacagatcaaatccgtgaagaatttcttcagaattccagatataaaaaacccagttttgttatattcttcttccacttcacgaaggagaagaacaacaacaacaccaaaaagagtcaaaatctgagaaaacgatctgtgaaaaaaaccagaatttgaaggaagaaagaatgaaggaaaaggtgagatgacaaaagaagccgctcgtgtgagagctcaaagggaaagctcaaagaacagagagattgttttctgcaactttctttatccttttgtttgggggagacaaaagcagagaactttgccagaaagttgtaaaaattaaaaattgaaactttttttgttttataaaaaaagagagaaacagcaaagcagcaggcctcaccaagtcaactcaccagtgggtcaaataaataactaagaaacaactcatttttgctatcaccaatgaccatcccatttgccattttcaataaccatttttcttctattcacagtgttttttttttagaacatttggttgtttattattagtcaacatattcaagaaaatttggttcaatgagtttaaaagttttgtcaacttgaaataagaattatttggatcaatgataaaatttagacgcgtcgcataggagtagtttacacactattaccatattacaattccatcaaatcgatctatagctggcctgtcaataaatagtatatagatatttcatataactagttattactatatatacacatccatgtcctttgtcgcatatagctatttaggtaacaattgttcttttctaatcgctatgaagtatgaaaaatatgataatgtgaatgaaaataggataatgtgaacgtggagaaggaaaattagtttcaatcaaaatttgccaccgacataacgctcttacatttttatttttgtttttttccaacagtagaaacgccttttcaccgaccaccccctcgtacctgtgaatgatatcgagaaaatttcccttattatcttatctcgagaacccaatttattttgtttcttatgacttggttcaagattacattccggtttagctcaaaaatcgattacaatattggtttagaagaacggattaattagagacaaagcgttatatgtgtcaacaaagattgtatagtaaatgatgcaaagttgactcttgcctattaacttgaaaattacatgtgcggaactagtaaacgatagttgaaatttactttctacagtcttgtcgattgagagagctaagacaaacattgaatgagatgtccctaggaaagacatttatagtcaactcattttatttggaacgatacagtcttaaagaagattagtattgatccatcatccataacaaatcatttcgacaacttccgaagatatagagatgtttactttccaatgataagttaaaatttcttattgtcgcaaaaaaacgacatctaatgagctagagagatcacaaccaagaaatcctactatattatttgggaagtacattttaaatgtaaccttaatttttgtaagtaattacataggtatgccattagaaataatattttaaaaagtaaattaatttatctctttaaggattaaaaagtcaaatactaatttaattaattaaattaattaaaaaacgaaatacattattaatttccaaaaataatagccaatcaaaatcaacttataagatttgatatctaaattttaattaatttaatttaaactataaaatataaatgtattagagaatgatacaatttgcaaaacttttatatataaaaaataattctaaaattttaaaaattactactttaaaaaaaaatcatgggccgggtaaaaaaattacagaacgtgttttattttggaattgggttatatggtggatgtatttgaatcaatatttataaaattttaaaatattattaatatgctgttttaataggggtcaaaacttcagttgtttaacaattgtctcatgaattcgtggtatagcgttacttaataacaattataaactgtaaaatataaatattttataaaaataaaatttgcaagttttaatatatattacttttaaaaacaaatcgtcccgcggtataccgcgggttaaaatctagtatcactatattctatagacctaacctcaaatccaaatttctatggaatgaatattaggaaaattatggaaatagtctcaatgttagatcatattataaaatatttaaaagttctctgaattaaggaagtctaaatgtaaatcctaaattccaaatttaatccctttaccataaaaattaaagcagtttagtctatctagatttaaaatatatatattttattttaaaaaatcctaattacaaattgtccctataatattagcttattagtgagtccattgggcaggtttattatgggccttagccttaccaatcaaaaagccttagaaatcaaagcccaaaacggttaaatagaaaactacacgtagtacctcttcgatcataacaaacgtcatgcagtgtatattcataaaaacggcacaaagtcctttctcattagacacgaacggaaaatctctacttgtctccgtcccgtaatttccgttactaaccaaacccaattttggaaattcagtaacagagcctttataaaagaattaaaatctttattgttttttccaaatcttcacaaacaaaattcgtcaaaacaaaacattcttgacacttcctcttctccgtttaactagtttcacgagctctgttctgtttcttctctttcagaatttcaaggtaaatttactaaaaaccctagaattgcaatttcactcactgttcttgaattataatttctaggttttttttatcttggcatgtataaaaattgaatctttattctcgtaggatgttatgattgtgcggttttagttgatgtgtttggtaatgggaaaaggtagagttaaagcagtggagaaaagggttttagatcagaaacttagaggatcgatcaatgttcctttaggaccagtttattatccgacagaagatgaattcaaagatccattagagtatatacacaagatcaagccagaggcagaggtttatggtatttgcaagattgttccacctaataattggaaacctccttttggtttggatttggaatctgttaagtttcctacaaagacacaagagattcatcggttgcagtttcgtccttcttcgtgtaattcaaagacgtttaagttggagtacaataggtttttggaggagcatttaggtaagaagctgaagaagagagttgtttttgaaggagaagaattggatttgtgtaagctgttcaacgcagtgaagcggtttggaggttatgaaaaggttgtcaaagggaaaaaatggggtgaagtgtatcagtttatgagctctggtgaaaagatttcaaagtgtgcgaaacatgtcttgtgtcagttatacaaagagcatttgcatgatttcgagaattatcataatcggatgaatgtagatgcgtcaaagagttgcaaaaggaagattaatggcattcgacgatgttctgaatctcggagctcgaagagaagaaaaagaaatgctgatgtgaaaaatcccaaggtggaaaatgaagaaggggttgatcaagcgtgtgagcaatgtaaaagtgacaaacacggtgaagtgatgcttttgtgtgatagttgtaataaaggttggcatatatattgtctatcgccaccgttgaagcatatcccacttgggaactggtattgccttgagtgtttaaacactgatgaagagacttttggctttgtgcctggtaaatgcttattacttgaagattttaagcgaattgctgatcgagccaaaagaaagtggtttggttcaggaacagtgtctaggacgcagatagagaaaaagttttgggagatagtagaagggtcaggtggtgaggttgaagttatgtatggtaatgacttggatacttctgtttacgggagtggttttcctcgaataggcgaccaaagaccagaatcagttgaggcagatatatgggatgagtattgtggtagcccctggaatctcaataacatgcctaagttgaaaggatctatgcttcaggccattcgacataacattaatggtgttacagtgccttggctatatcttggaatgctcttctcttctttttgttggcattttgaggaccattgtttttactctgtcaattatctacactggtatgtcacctgaactgtaattttcatcatgtttgttactgctgtaattacccttcctctgttcctaatttagtcatggtaagggagaagatgtttccaagactcactggaactctttaatttataatgaaatgtatcattcatagaatcttttaattgcaccttttattttgaaagattctgttaccaacttctttctgatttacacctcaggggagaggcaaaatgttggtatggtattccaggcagtgctgctagtgcttttgaaaaggttagtttttttgtgctttaagcctctaaagggtttatctttggttttaaaattggcatactagaatacttattttcagaaagaaaagttaagttgcttgatttttctgtaggtcatgcgaaaaaccctacccgatctctttgatgctcagccagatttgctctttcaactagttaccatgttgagtccgactgttttacaagaaaataaagtcccggtctacacagtattacaggtttgatatacaaggatatagttcattgatgagattatttcattgtcagcatttctattccaagtttggaagctatttgtgattaatagttagtaactttcctcctaaaatcacagagattttttagttttccaacataatcattctactttttctcactgctaggagccaggaaacttcgtgatcacatttccaaaatcctttcatgctggattcaattttggtatgccaactctaattcaagttatagcactatagcagtcatgaatcatgtgagtgttcaatcaattgcgttagggagtttggttaccaatgtctttgtgcatattttgtcttccaggtctaaattgtgcagaggccgtcaactttgctactgctgattggctaccttatggtggttctggggcggagctgtatcggctgtaccggaaaccttcagtcatatctcatgaagagcttctctgcgtggtagctaaggtatatagacaatctgagaaaagcgttaaaaacttgatatgcaagacttgcaagatgagttgtatctatgcccattttcacaaaagaagatttagtcctagaattactaaatattgctacccttgatcaattggttagtgactactggagatatcaacattgaaggaggcatcttttattacttgatgggattattaaccactattaatttatcattggttactaatgcaattatgtatgctagcttcaagcaaccaatgtggatatttgataaatccctagcttgagtgattgttttgattgtcttctcttatagggaaactgctgcaataacgaagggtcaatacatttgaagaaagaattgctcagaatatacagcaaggaaaaaacctggagagagcagctctggaaaagtggtattttgagatcttctcctatgtttgtgcctgaatgcgctgattctgtgggcatcgaagaggtttttctttctgcaatcagatattgttggtttcattgttaaaagttttccctactctatcattctagcttgcataagataatactctgatgtttggactctttatttgtaggatccaacatgcatcatatgccagcagtttcttcatctttctgctatcgtctgcaattgcaggccatctgtttttgcatgcttagaggtaaatatctatatctagctttttagaattcgatccacttcaggcaggctagcctttttttataaaagagaaactgttgagggctctagaggtgcattacagtagacatattttttctgaagattcttgtttcttgatgttgttatttacctaagtgtttataatctttaatttagcactggaagcatctttgtgaatgtgaacctacgaagttgcgacttgaatatcgttatacccttgccgagttagatatgatggtacaagaagttgaaaagtttggtgggtgcaaaacacaagaaaccaaaatctcacaacggccgagttcaggcaccaaacgatctattgctttaaataaaaaggtaaattaatacacatagttagcaaataacactgctgagtcttgttttctgttctcgttactggattttatattagccgcagcatagccattcgtcatgcttaacttttctattcaagaattgtaagtgtaattctattaaccagaattcaagaattagataaaatctagtattaaataagttagcagtcttccatatcatatgtttgcttaggccttgaatcttatgataatgtataaactgttgctgcttttctcatactagcaggagggaatgcaagtgagtcaggcacggccagcagacaaatggcttcttagagcatcaaaggttcttgacgctgcgttttctagtgttgaatatgccacccttttgaaggaatcagaacagtttctttgggctggatcagaaatggaccgtgtgagttttgagtatccgttggaatgcttttgtatatgtctttgggtagattctggaaaaaatattttctgtatatgtcactcaggtacgagatgttacaaaaagtttgaacaaagcaaagatatgggctgaagctgttagtgactgtctttcaaaagtcgaaggtgaagtcaacgatgattcaatgaaagttcacttggaatttattgatgagttgctgagagttaatcctgttccttgctttaattctggttatctgaaactaaaggttagccatatacctgcaacgtcccagttttccctttagattgttactgctgtttgttatcacattgtttacatgtttccacttctgtgtaggactatgctgaagaagctagaaaattgtccgagaaaatcgattcagctctctcgagtagcccaactgtatgccactacaaactccattacttccccacatagtctttaggaacatgccttttagttacatgacagtaaaattatttatgttatgcattctaattagtgttacttggttttgtatctagatcacccagctggagctattgcattctgaagtctccagatcgccaatctccctaaaaaaacacgagatcttgtcaaagaaaatctcttccgcaaaggtaaaccatggtagaccgacatatgcatagttggttttccgactcaagatatcttagtagtcatgttttgtgttttaacgaacaagcaaatctgttgtgttagttaagaggaatacgtgaatattgcatattggtttaaattacgattccatatcgaataatttgagatatgattaatgtccgttaacaacctggtgaacccggatatctgtattggcagcgctggtggtatgtttatgttattcgatgtacatttcctcgatgaatataaaaaagtctccgttaggggtcaatatccaacttggttattgatacctatgtttgtgacaaacttatagtttgttttggatccttgttaatctaaagggtatctatgcagtattttctcaatgctcgccttgtcttgaatttgataatctctctttctcacggatccgcagatgttagctaaaagggcgaaacgctatctcacagacgctaaacctccaggaattgaaatggatgcacttttcaagctaaattcagaggtgaatatcttgtctttattctgaaaatgataattctgttacatgttcatgtgttctaatcgttcttttcccttgatagatgttagagcttcatgttcaacttccagaaacagaagggattctggatttggtaaagaaatcagaatcagcccgtgataaaagtaacaaagttttgactggttctttatctctcgaggttggctgtacttttgttctgtatctttcagtgtgattaacaacaagctcttttgtcgaacctttctgaattatttcttttcttctgcacagaatgtggaagagttgcttcatgaattcgatagtttcagcattaacgttcctgagttgaatatcctgaggcagtatcatgttgacactttgtcttggatttcacgctttaatgatgtaatggttgatgttcgtgaaggcaaggaccaacgaaagctaattagtgacctcagttcccttctacgggatggagcatccttaggcattcaaggtctttctctggttcccacctatttttctgttgtaatgcgtagtgatatgctgataggttaaccctaaccatggtatctgatgatatagttgaaggactccctcttgttgaagttgaattgaagaaggcatcttgccgggaaaaagctcgaacggtatatgttttctctctcttgaatttcctaagttatatctctcattcaacagttatcatatgatagtctgaataggaattgcaataattccttgcattgtttgcatctgagattgaatgtaaaatgcatggaaatattgttatattaattgatgaaatagcattaggttttatgttttgagtgctctttctgtggttcatatctttgatgcagtttttattgtgtgttgaattttatgtaggtttatactgcaagaaaatctctggatttcattgagcaactgctctcggaagctgttatgtatgttgtcccctatatcgattatagaatatatgtaatatgcattctactttgattttttattaacatgccaaacattctatttccagactacacatcgaagaggaggagatatttgttgagatctcgggaattttgtcaacagcacggtgttgggaggaaagagcaagcactatccttgaaaatgaaactcagatgtacgagcttaaagatctcgtaaggtatataattgttcaggcttgtaaatttttttacttcagcccatgcttagtttttcttaagtcttttatttatcaaaagatgtttgttcctaggatgtcagtcaacattgatgcggttttacctactctgcaaggcatagagaacacaatctcgtcggctgaaacttggcttcagaaatctgagccttttctatcagccacttcctctatggcatcatctccatgttctatgcttgaacttcctgtattaaaggtttgtctgcctcctgtgcctactttggtttctgtttatgtttttgtaactgatttgatttttggagaatttaatgctttaattttttgcaggatctagttactcaggctaaattgctcaatgttcagcttcaagagccacgaattcttgaaacattgttgcttaactgcgagaggtggcagtgtgataatcatcagctcttgcaagaaactgaagatttgttggacaatgcgaaaatagatgatggcacgcatagcaatatccttccgaagataatggatttgataaccagagtggactccgctaggagatctggtctggcccttggtctcaatttcgatgaacttcccaaacttcgaactgcaagtctaaaactaggatggtgttgtaagaccatcacgttaagctctagctcacctacctctgaggtacaaatagatttctgaattttaattggttcgtgacactcagtgtggttatgtaccccgtttaattgttttaagtgcgtctttaaatggcagttgctagaagatgttggaaagccctcgttacagcatattcagcagcacttaaaagaggtatgttcggataatatattaacttcctacacagactaagatgtctttggatctttaagcattatccttctctttggattttcaaggaaaccacagtgatctggtttgtgagtttcgtcattcttattgacagggacaaacacttgaaatattacctgaagagtattacttaggcaagagactcatggagttaaaagacactggactggagtgggcaaaacgagctagaaaggtacataaccaacacacgttttctcagttgatcgcgtaaagtctctatggaatgtttaatgaaaacgagagctattggttttatctgcaggtggtaacagactcaggtgctcttgccttggaagatgttttcgagcttatttctgagggtgaaaacttacctgttcatgcagagcaggaacttcaggttaatatgaaatgaatgttagcaaagcttaacacataaccttactgttatctaaaactgtttgtatcatggtaaattgatgcagtctttacgagctcggagtatgttacactgcatttgtctaaagccatacaactcaagatccatggtttcttgtagtcaatgtggcgaatggtatcacacctattgtttaaagcttcattggcggcctaaggcttatgtctgctccgcttgctgtccactggcagaaaccactccacagatcgatcccgccaggtttgttcctttgcaataaaagcttactctaaaccacattgctacacacttgtattcacatcgatcttagatttttaaaagcatactttcttgaaacctctatacttttgcttcactcattagtttaggtcacaatcaaaagctactgattgtgtggtttctgttaggcttagtggcttgaaccgagaatgtttacagattcgttaagatactctacacttcctcccatttttctgaacccatttgtttgattgatatctattaacagagcaacagagccagagagaccgtctctgaaccaaagacggacaagaatggtcgcgactgatgcagcagttaatgacttaaagtggaaaacccgaaaacacatcaaacggacaactaaacggagtcctcaggttcatattcttccctggtttttcacttaaaaaccaacataataatctcttgagggtatgatatatagagcaatttcatttattcaattttagatgagttttctcaaacctttttgtaatgtttcccattggaaaatggacaagttcacattaaaaaggttttggacttaataatttgccagatttttggatcttttttttttttgaactggatcagtggatctataactagaatttgatgattatgtaatataagaaattctaatcacaactatgtatagaggagatattagcttagatcttagatttaaagcttgtttcattctttgatgttttattcaagtttaacacatttaccattgaaatttgtattcttattcaattatagatttatagtatgtatttgttgatatctctcactttttaaactcaacaaactctaccaaaatcaaactaccagcagctattagaattttgaactattgttggaccaccaatgtgtgaagagaatcatatctcttaatccccacaaattcatgagaaggaaaataaaaaagcaacagttgagatcactttccttacaagaatcagaaagagacccacttttgatgacatcatgtttcagagacccacaatcatatctctctatatatgtatgtatcataatgtgtgtatatgtgttgtgaagtaataagtaagggactttcatagaaacagagccttattgtaccttttgagacaccatcctcaagctgaaagcttccttcaacactcttcttccatttttgaaaatctatctagtacatttattgtgaatttcacactgtccatatcttgtttatttattaaagttattaatgttacatgtagatgaaatggactgatttgtgtatgtttatagctatttatgtaagaagaacaagtaaaatattgtataagttcagtaatggtcggcctcaaatttttcctatcatgaaatttctaagtaaaaaaagacaagtcacattactttaggtaaaaagttggcaaaacaaaaagtgaaagaaggaaagtcaaaactctttattttattgtcaaaagtcaaatgtgtgcaaatgtaatattgttgacattaaacaaaacaaattaatgtaaagattattcataatggagtagcaaaacaaatctaattaaacccaaaatatataatatatgatatatctctagaaaacttttatttatatctagcaccaaattttgactatttggattttttggtcgggtactttagccaccggatattaaatgcatcatacaaactttcaaattaggtggaaacaaaatatatgtacgtatatatatatatatatatattaataaatcactttcaaaacttttaaaagaaaataaaaaaaaagaattttagataaaaagtaaaagagaaaaaggggaatataaaaatggaaaacaaataaagttaggagagagggctcactgtccgaagcaaagaaagaaatagcaaagtgagttagacatgtgagagagaagagattcaagtgtgtccccattctctttcctatcctttagtcaacaacacatctctctcatatttggatatttctaatcaagatcaaactttttacaacaagatttgattttttttgttcttttaaaatcttaatttgaattaagatgatatgaagtcatttcatactagtcttgcctcttgtcaaagtgtaactgaatgaaatttcaagattatatatttataagaaaacctaaaatttttagatatattttgaaataatcttataattatctatactaattaaaaataaattataaatatattatagagcagttgaccaaaaaaaattacagataactattgaagatatatagacatgattagttgaggtgtagaaagtttgtaaagccactaaaatagctccaaaattgaaataatcatgttgtagttttttcttttttctagcaagaataatatatttttgattattttaaaaggtttgtacatttttctctttttattttcactttatttttttagtttctttagaaacattattatacttttcatatatatatattgaatttatcttcaaattttgcatacatattttacccactaaacatgattccatataaaaacggaaaaagtgtgtcacagaagaaataatatattacatgatataataatctaaaatgtcaactgttttctttagaatatgttagaaaagattttttttttaaatctttattggtagcaatgtttatgagaataaagcacataattgtctctcaatgactaataaatttcggtttcagtcaaagatctaacgagatattagatttgtaataatcatcaaagaaagtctatcctttttattaaaaacaaatattcttaaacaaactaatactttaaataaactattcttaaacaaactaatacattaaatattcttaaacaaactaatacattaaatattcttaaacaaatattcttaaacaaactatgcttaaatctttcataataatctttctctcaattgaatttatctttcacaaaattaaataacaaatcaattaaagagatatataaatacgaaaaacaatggtcgtcactctcgttcagcttctttagttttcttctaactttcagagaaagacctctctcaattcaaaagttcacaatattaaaagtataaatcagaatcattaaactgttagtctctctctctctctctctctctctctctctctctctctctctctctctctctctctctctctctctctctttttctcttcttctccctgaattgtctcatctgtcttcttcctttgtctctcctctgatatacattgtgttctccttctcagaaaccctagatttctctcaatcaaatctagcttttctcttagggggagatttgatttttttctctgcaagactgtaacagtaggagaagctactttcctctgttttcttaatttcaaatctgcaatcgtactttttcgagttctataagtgaactcagattttagctttttttttttagggttcataagaacaaattggattttgagctcacagtataaataacccgactttgattactgggtaattttaaaaccgccattgttgttctctttactacttttgggaattagggtttatgatttctgggtattagattagataaatttgtttcctttttttgttaatcaatttaaaaatctcttatttctgttaaagacttgtaattttggagtttttaatgcatggacggaagagaagcaatggcatttccaggctcgcattctcagtactatcttcaaagaggagcctttactaatctcgcaccttcccaagtcgcgagtgggcttcacgcgccgccgccacatacgggattgaggccaatgtctaaccctaacattcatcaccctcaggctaacaatccaggacctcctttctcggattttggacacaccattcacatgggagtggtctcctctgcttctgatgctgatgtgcaaccgccaccgccaccgccaccaccagaggaaccgatggttaagaggaaacgtggacggccaagaaagtatggagaaccgatggttagtaataagtctagggactcttctccaatgtctgatcctaatgaacctaaacgggccagaggtcgacctcctggaactggaaggaagcaacgcttggctaatcttggtgagatctcgagttttctattctgtgtactttgtcaagttaagtttttgctttagctctgttagctagtcttgaaggacatgagcttgaatcttatggatgctagaagctttgaatgattctatagttaagttaggttttgttactttgtcgttactgatactcaatattgattgttggctattagtttgacggatctatgtgtggtacaatgctaggtgagaggagtaattggttattagtagatgtggacgaaatcgacttcttgatttaagttattgatttaggtttttaagctgtgaaagagtaatcttactaatccattcatgtttaagtaattggtcatcataatgtgattaatcaaactttaagtaatagcaaactcttgactctgataatttctttaggtgagtggatgaatacttcagctggacttgcttttgcacctcatgtgatcagcattggagcaggagaagtaaactgaccaaaactcctttatatattaatgatcatttatgcagcttttcattgtatcaatttccttttatttttctttgcaggacattgctgcgaaagttttgtcattttcacaacaaagacctcgggctctttgtataatgtcaggcactggaaccatttcttcagtcactctgtgcaaacccggttcaaccgatcgtcacttaacatacgaggtttcaaagtcgttcattcagttaatcgaaaaagaaaaacctgaaaagatttcttatttaatcctctttctgtgtttcttagggaccttttgagattataagttttggtggatcttatttggtgaatgaagaaggtggatccagaagtcgaacaggcggattgagtgtctctctttctcgtcccgatggtagtattattgccggtggagttgacatgcttatcgcagccaaccttgttcaggtatattaaattcttcttcttaatggttgtaaagtgaagctaaaacgaggcgaaactaactacgaatgttagcctttgatatgtttgtgctgtcactttctttcctcttcaagatatcatgtggtagtgtttgaaaaacttgtttgttattcaggtggtggcatgtagttttgtatacggagcaagggcaaagactcataataacaataacaagaccatcagacaagaaaaggaaccaaatgaagaggacaacaatagtgaaatggagaccacaccgggtagtgcagctgaaccagcagcatctgcgggtcagcagacgccacagaacttctcttctcagggaataagggggtggcccggttcaggctcaggctctggcagatcacttgacatttgcagaaacccactcactgattttgatttgactcgtggatgatatacactattagtctttgaagcagcagcatacaaaatgtgattgctgtacatatgttattgtagatttctctctgggaatgttgaaatcagacatttaaggattgatactagatctctcagctccttctaacattgttaatgtaacagaaccctcccactttcatgctattttaggagatttttttaactcttttatgatctcattgtggtcatcaagaacttggtttctttactagttcactatttttctttcaggttctttaacatatttagtaaacttgattcctcttatttggtagacaatgtgtaattcaacacacacaagatttaggatccttaatttataggaagatgacaagctcataatttatacatgaaaagcattaaatattaatgaatatatatcctcaaattgacttaaatttctttttcagtcagaaatctaatgagacattagattttgttataaaccattgaagaaagtctatatcctttttaataaaaaaaattcttaaacaacccaatttattttttttgtaaaccaattgaatatttttttttgacaaaattaattaaagaaatagtatataaatagaaacaatggtcttcacttcctttctcttctttttttttctttccttttttttttctgagatttgctttctctaccagagagactgtaacagtagtagtagctacttttgcttgttgtcttcatttcaaatctgcaattttactttctttttgagttctaagtgaactcaacatttagcttctttttcttttctaggtttcataaaaacagtttggatcttaagctcacagctgaaaataacccgactttgattactgggtatataaaagccgccattgttgttcttttcactctttgggttattagggtttacgatttctgggtggtagataaatttgttcttcaaaaaagtttccttttttaaaaaatctcttagattcttaaagaattgtaatttagggttttaaatgcatggatgggagagaagctatggcatttccaggctcgcattctcagttctatcttcagagaggagtttttaccaatcttacaccttcccaggtcgcgagtggtcttcacgcgccgccgccacctccgggaatgaggccaatgtcaaaccctaacattcaccaccctcaggctagcaatccaggacctcctttctccatggctgagcacaggcattctgatttcggacacagcattcacatggggatggcttctcctgctgcggtgcagcctactctgcagctgccgcctccaccgtcggagcaaccgatggttaagaagaaacgtggaaggccaagaaagtatgttcctgatggacaagtttcattggggctttctccaatgccttgtgttagtaaaaagtctaaggactcttcttcaatgtctgatcctaatgcacctaaaagagccagaggtcgacctcccggaactggaaggaagcaacgcttggctaatcttggtgagatctcaagttttttctgtgtacttgattaagttaagttgttgttttagctctgttggctaacccttgaaggatcttatgattagatgaaagtttgaatggtagaagctatgtatgattctatggttattttaggtttttgttgctttagccttactgttactgttactcaacattgattgttaggtattaaattgactgatccatgtgtgggtacaatgccagttgagatgagtaattggtcattagaatgtggtagtcaactcgatatttgacttcttgatttatggacacaatttgtaagctttggcacaactttcttctatgtacattgtgaagaacacgagctggggtcttatgattaggtagattttggttgctagaagcttaatgattttatggtcaaattagtattgatttggctctgttgttactgctactcaacatcggttgttaggtattaactatgagagtaatttgactgatccatttgtgttgagataagtaaatggtcatttaactctgttaattaccttaggtgagtggatgaatacatcagctggacttgcttttgcacctcatgtgatcagtgttggatcaggagaagtaatctctaaaaactcctatcaatcttaatgagttatgcagcttttcattgtttcaatttccttttatttttcttgcaggatattgtttcgaaagttttgtctttttcacaaaaaagacctcgggctctttgtataatgtcaggcactggaacggtttcttcagtcactctgcgtgaacccgcttcaacaacgccttccttaacatttgaggtttcaaaatcgttcattcagttaatccaaaaaagaaccaaaccgtggagaactaaagattctttatcccttctttgtgttctttagggacgttttgagattctaagtttaggtggatcttatctggtgaatgaagaaggtggatccaaaagtcgaacaggcggtttgagtgtctctctttctggtcctgaaggtcatgttatcggcggtggaattggaatgcttatcgcagccagcctcgttcaggtatttcaaaattggtttggctccattaagttttgttttggttgtaattgtttggtataacatttgtgctacctggaatacaaaagttcaaaatacggttctggtacggtttgagaaattttgtttggatttgtttatatgtaatgtgactcttaaactaaatttttttgttggttgttattttgaaggtggtggcttgtagtttcgtgtacggagcaagtgcaaagtctaataataacaataacaagaccatcaaacaagaaataaaacctaagcaagagccgaccaatagcgaaatggagaccacacctggtagtgcaccagaagctgcagcatcgacgggtcagcatacgccacagaacttcccagctcagggaatgagcggatggcccgtttcaggctcaggctcaggcagatcacttgactctagcagaaacccactcactgatattgacttgactcgcgggtgattcaaaacaaaaacattattagtctttcttcctatttactccgactactaccctttagtcttggaagcagcagcagcagcatacattatgtgagtgctgtacatatctttgttgttgtagatttctctctgggaatgttaaaaccagacatttcaggattgagaccagaactctcagttccttattgtaacattctcaatgtaacagaaccaccccactttcaggctactcaacgagattgtaactcttttatatcactcattaaagcttcctttggtttcttcaatatctgtgttcaattcggttttggttttgagtgtttggttttagaaatgaagtaatctatccaagttgatcagcctgagataataatgctggtttatctaaataaccgatttggctctcaaacagaactaatcaatccaagtcaatgtcatggctctttattgaatgagagaggttcataatcaaatacaatacgattcagcaacaaagcttcatcattcaggagatattcagaagattctttatgtcatgctgcagaaaaattgagacaagaaagttagcagagatagtgtctgagagagagtgaatgagagatagttgctttacctcaagtgtaagaggggaagtagttggataataacgttgtacagcttgaccgtttttgtcaacaagaaacttagcaaagttccattgaatgtcatcgccgaagattccccatttgcctttcttcaggaacttatacagaggagaagcattctctccgtttacttcaatctaatacaaaattggacatatacgaatgttttaagaacttcaggacaatcatagagaattgtagtgaactcatcgagtgaactatagtaccttgttgaaaatggggaattcagatttgaagcgagtacaaacaaagtcagtaatttggtcattagttcccggttcctcgtcaccaaactggttacaaggaaatgctagaatctccagacctgcaacagaacaacatcaatgaggaagctaataacgtggacttagaaatttgttgaaatcactactttacctttatctttatacctgttgtaaagctcattcaattcagtgtagtttgagtttgtcatcccactgagaccatcatagagtatataataaacaagacaagacgagaaagttacaaacgaaagaagcttaatagaatgtctaataaactaaccatttggaagcaacattgacaattaaaagaactttgtctttgtattgactgagtgctaagttgttcccttttgcatcctgttacaggaagaacaagataaagactcagaggccaacacaagaaatcaatcaaagatcatagaaaacaatctgtgagagaccaatcaacagaagaaagaaacatgatccatcatgatctgattgattctactgagaaaagcaatcctaaactaaacatcgggatacaacagaagacaaatcgttccttcagacaatataaaaatttgacattccttttcatccggaaaagcctacaagacaccttaaagtaaaaactcttcacattcttagaacccttatatcaaaggtgcttccttttaacaaaagatctcacattcaagttatcagagacagagagagttattgaatcgatgactcaagttagagaaatgtattcacctcgatgcttaactcgtaaacagattctggttccttcgtcgccatttctcactgggaaatgcagaagaagcagtcaacgaggaaggaaagaaagaagctgaagcaagagaaagggacttggtcacacgcgcgagtaatgcgcgtgacgttcgatatagagtcgtttctctgttttaactggtcttaatgggcttctattgggccacttttgatatattttcagaatcctttagtttttggcaaaacctccaaaaactataaaatgatgatagctttaagtactcatcaaaataatcatttatcaacatattcactcacataagcgtttataaaattttagcaaatttctttatagtaaaattaattaaagaataaaaatcatatcatgaaaacaatttgctatattttattactgatttttttcaacgtacgtcaaactagaaacctatacaatcataaggccttttctctagatatgctattttataatttatcctaagtcacatggcaccaccactgcaccaccttatacaaataaggcatttctaaacattttggcaatcatcttttgagatttttaaaaatattcaaataaacgaactacatttgaaaatttgacaattaaaatcaaacgaaaaacgaaagttatacagtttttgcaatcttcttgaataaactatccatagtaatatcgaaagcatctcgaaatctctcaaacttagcattagaatctccatagaccaaaccaggcaaaagctcatgaacaatgtaactcctcatgtcctctctttcccttagagtctttgacattaacttctcaatcacattcactctcttcaacttcacatcttctttgtttatatacaccgaatatctccggtgatcctccggtaaatgccacgtgtactggtaatacgcgctgtacggatcaaatatcaccggaatacaacctaatatgagggaatcgaaaatcgatttccttgttggactgtctccaggcggttgaaggcagaactccgaatctcggaaaagctcgataaccgattccgatttatcgcagcctccatcggtacaattcaaaaaccggcattggtttggagacgatctgcattggtcaatcaatattgaccggatgctctcagggttaccgggtcttgctgcaccagcgaagctaattaggctccgacgaggtttcccaagtattttgttttgccatatggcgatatcggtgtcagttttcgggtggaagtatgtgggatgaggtatcgcgatgtcgttgacttcccatggattacgttcgatgagaagctttgtagggtttttcatttcttgcatctcaagtaagcttgagccccaagaatacttatcaaccctcctaaaatcccaagagatctttccgagaacaaaaacatgatcttttccggagtttttcctccatgatttcttcgatccgagccatttaacaatctcaatcggcaaaacatctttcacatcgcttgaaacgttcttgaaatgccatctcaaaacatccataccgccatagaaaggcacatagaagagcttcgcttgagtctcgttatgaaccctacatggatgcttcaaaattctagagtgaaatatcggctcaagtgaatactgatgcgttctgaaccagcctttacccatactctccatcagttcaccaaacgcatcgttcttgaagtagttgcaaaaatcagcccatggaaccatatcggagcattccctcaacaaatctttgttgaatttagatggtaaatcgtaaacgtatacaccttttccttcgcaagatcccggctttttgcggttgtttcccatcgataaccaagttctctgtatttgaatatactcttccgtagattttagaccggtctcctcgtcttcggtcttcgctttgaaatatcggtatcgttcttcgccagtttctggatcccaatcaatgatgaaatcttgatcaatctcgtttttgggtaaagaatcttgatcaagaacggaatcaagattcttttcatggatgggtttagcatcttgattaagaatggaaactctttctccggaggtttctcctgtgaaagtttcgttcttattgatggtgaggttttctccgaccgtagatttgtctgaatcttttcctccctcgaaggtttcattttctgcgaaacccttgtctccgtctttaccaagaacaaaaacattcttctcttctttacttgttaccacatcttcactagccggcgcagtgaaattgttgactggtgcacgtaaagcgggctgagaaccggcagtgaggcaataaaggtcagtgagcttccgcgaagagatgcatatatgaacgacgttaccagagataacggtcgtggaagtggaccaaagataaatcaagaaaagaaagagaatcgtgagaggtacacgataaagaaatgatctggcggaaaagatcgaaaaaaggttattacagcaagtacgaggatctttaagtgttttttcgggatttccggtttcggtctttttggacgttcttggtcgtctcaactttgagacggagacaggcattttcttgtttggttgttttttggattctcttttgtgtacaagcttttgtagatgttttgatagggacatctggacatgcactcacgtcgtcacataattgtagtaaaatgatcaatgagtgtgcacgtcttgttgtaacaaacttaaatcatttgatttggaaacctgataatagaaatagatgcatatgttaatattatatagcaatgtttgttagtttagtattcattgaatcttatagtgaaattaataatccaagttttggtagttaaaacgaattaaattaacgtgcctccaagttaaaattttggaaaacaacttctcttatatatggttgtggaatattcactttgactttggatgcgagtgaatatatccataataacacaagatctatctagctggccttttttggtcaacttaaatttataattcaaagtaggggttatgcaaccaatccggaaaaaaaaggaatctataaaacacaaagttgacatatagtatacgagaagaaaacgaagcagaaatgtttacttttctccttgcaacaacattgtcccattgatgcactcaccgttagttttgggacgatgaagaagattgttattgcattcaatcattctccatgatctatcaactcctcccaatgtgaatacttgatgttcaaaagatggaccatcccagtaatcattcactttttccgacatgcacaatacttaatttatactcaccattgactggatcatacccgaaaaagttttggataatcttttttcttgatttcactttgggtaaaggtatgtacttacttgtgctagggttgcatataaattgttctcgtccacatccaagacttatcaaaccattaacgtaataaggaacattattgatcctgcggcaatacggactcgggattgagcatgtcgcactaagagataaataatacggtagattcttggttgatgtcgaggaatacgtgaagaagttacaaatctggcgtccgttttggttatctaaatatttgaatgcaaagagtatatgtggctgaagcgaagacctaaagggaaacgatctaatgaaatatcgactgcggataattgttgccaataacttggatacaacgagaaacttagctacggacttcacaggcaatctcttcttgtctccgacgttacttgacttactcgagactccttctctatctttgtccttttgctgccatgtctagttctcattatcacgtttcaaagtataatcctaatcttcttatctttatttgtgtcctctctgctcttgtcttataataaggcaaatattttccttttccaaataggaaaaagggaagcaacgaaaatatggaggcaaagtaaatcaattattagttcatggacttaaattctagataaggagtggaaacttactgtacggtttgtttattggttcatcaaattcaataaccggtactcggtttagttcaattttttaaactcgctccacctgaatctcccgaatctccagatgatcaagcttcttaggtcgcttgtagttcttaagcaagagagagcaacacacaacactaacagaagaagcagccattgcagcacctgcaatccatggaggcaacctgaaacgtgtccctgggaaaagcactcccgcagcgatcggtatccccatgaggttatacccgagagcccatacgtagttgagacggattcttgagaacgttttccttgaaagatcaatggctgtgatcacatcttctaagttgcttttcatcagaactatatccgctgcttctatagcaatgtctgttcctgcacctatcgccatacctacatccgctgccacgagagccggtgagtcattgattccgtcacctaccattgccacaacatgtcccgcagcctgcaatatatattcattgcttttatcaattccatatatgtgaactttttaacatttagtgtggagcttttactcaagtacctgtaattccttgactttctctgctttttgctcaggtttagcttctgcgataacagagtcgataccgacttctctagcaattgagtttgctgttccccagttgtcaccagttaccatgatgcttttgatattcatggattttagaatggagatggcttctcgagcactcggttttagaggatccgaaacagacaaaactccaatcagttcactgtttatggagacaagaattccggtctgggccatatcttcagagtcagctagcaactcttcagcatcatctggaataataactttatgatcattcatcagattcttgttccccaccataatctctctacctttaacggtggctttcactccctttccagtgatggacacaaaatcacaggcttctggccaggcagggttctcttcgtcgtctctgaatttcttcgcgtactcgacaatggcctttgctaacggatgctcactgtttacctgataaacaaaatagcatcaacatagtaatattacttttgatgtaggccaggagtttccaaaagtttacctcagttgcagcaacaagttcatagaactctcgaagtaccatgtttttcaggagctttgttttcacaacaacgggcttccccatcgtgagagttcctgtcttgtcaaagacaatgcaatttacctacaccgtcattgaaactgtcaggtttcaccatttcagaaaagaaatgatccagagaacctgagtaaagtatatacagtatagtaagtttacaaagccatagaccaagttactgcacactaaactaaccttgtgtgctctttctagggcttggccaccctttatcagcacaccttgggatgcaccaaccccagtaccaaccataacagcagttggagtagccagcccaagagcacatggacaagctatgaccatgacagagatcccgaactgaagagctagctcaaagctatccatcgaagaaggtatccaggattcagggtaccaatgcagtttcccagctaagaaccaggcaagccaagttgagaacgagaggaaaattaccttcaacattataatccagtgagtttaaaaaatagttgtgcctctaaaagactaaataatttgtttatcaactggtcagattactcacaagaggaacaaagaacttggaaatccgatcagccaacttctgtactggagctttggccagttgtgcggactcaacaagtcgaacaatctgagcaagagcactctctgaaccaacccttgtaaccttaacatgcagaacaccattctcgttcaaagtgcctcctataactgtatcaccctttctctttgccactggcctagcctctccagtgatcatactttcattcacatgactttgtccccatatgacataaccatctgaagctactttagcaccaggaacaattttgatcacgtcattcttctgtatcaatcgaccatcaatctcctcttcaccagtcacattcccttccttgtccaaactcaacaatatcgcagtgtcgggtgccaagttcataagctttgcgatcgcttgagatgtttttcctttagccataacctccaaatattttcctagtatgataaaggaaatgagcatggcactagtctcaaagaaatctactcccttgaaatcaggagatgttgcagctctcaacactgtgtataatgaatagaaataagctgcatttgtccccagagcaatcagaacatccatattagccgatcctcggcgtaaagccttgtaagagccagtataaaatctccaaccaatgacaaactggacaggagtagccaaaacacaccttatgatttctccaacggtgagcatattgatgaccttaaacatgagcaaatctttaattccagggatatacataaagaccatggctgtcaaaaacaccggtactgtaaaaaccaaactccagagaaacgacttataatactgcttaatctccccttgcttttgagattctctgcctacccctccctctgagaatattgttgccttgatgtgaccactatgaccaaagacagtagactcaatcacctgaatgaaattcctcggccccgtcacatcaggtttgtacaatacagatatcttatcagttccatggctgatctcaacactttgaacaccaggaagtgcttcaagcgacctttcaataaccttcatggattcatcagtaagctcaccatcaatcttcaaatcaatcttgctcacatcctcgcctgtacttataagcacagcttcaaaaccagcattttctatctcctccaatagtctatcatagctcgagagtctaggatcataatgaatctcagcttcttcaattgctaaagccacatgtgctctttgtacaccattaaccgattgcaaaactctttcgattgttgaagaacacgaagtacaagtcataccattaattcttattctacaaacttgtctcgacctctcattcgcttcattttcgatcaacgatgcttcaaatccagcatcctcaatagtctcacgaattgtctccacctataaatccacaattacacagaaaaagaaaacctaaatcccaaatcaagtcttctcagaaacaattcaaccgagattcgagagaatatcatagcttacatcgacagagttagggtaaaacagaatctgagcacgattattcagagcatcgatgacagcatcgtgaattccagggagacgcttgatagccttttcaacagatccagcgcaagcagagcaagtcattcctaacacttgaaaaaccgccctggaaatcggatcatcgatctcaaaagccgccgtctccgacgatgatcctccgccgccgtcgcgagacctggtaaggtgcttccgcaccagagggtaacgctcgctgaatctctctttccttatgcatgtaagcgacaaaagcttcgtcgccatgtaatcgatcgtcttgtgcgcgaatcttgttcttctcgtatcgaatttgagtttttaaaaagcttttaggtttatgggaaatgatgagactttttgaaattgttttgctttttaaattggaacgaagacgagggaaagcggtttacgacatctaaaatgacaaaaatgtgtgggccgatttgtaaatgtttaaactatagggccctaccaaacaatactttacttttaaatttcaaccgccatatataaaaagagagaatttcaacctcaacagattaaattccaattttcttttaaattatataattcaaatttaatcgtccaaagtaacaacacctttgactttaaggttcgctaaaaaaatggattgattagtgatgacaaaaaaaaaaggattgattagtgatattattacgacatgatgaagtaatctttttttttttttgataattaagaacaggcctgattaagaatgattaagtaatctttacttgtttttttctgtttcaataaaataatatgacaatatactaacgaaacttggctaatccatatctgttttaactaaaggtaaaatggaatctattttacgtgtctgtctaatcttttatggcactcaacctcgtaagaagaagtcataccaaaattgaagattgaaaacagtcaaagcattgataaatgggcctattgacttgtgtggcccatttagactgatacgaggctaaatgtgggccttttattaagttgatccatgcattatgatttatgaacttcaactacgtttcttcttcttcttggtccgcaaacacttgtctgagactgatattgatctcaaattgattgccttgaagctttttccaatgagactaatcatgtcaaacaatagatacaatgctctatataatataagattaaaggttagatccaaacacactacattaacattcttcaacctctcatagattttcaaataatagagaaaatctttcagaaactatgttcatctcttcatttacaaacactttgaaccacccaaaactcaaaactaatcaagaacacagacacactcgtcaagatcagagcaaaaaaaaacaatatcaaatgttgtaatcagtcgattgatttacagagttgagagtttggtttttagttagttagcattgcatcattcaacactcgttttctttcctttcatcattctcatcacgagtcaagcgccagctcggcccaagccaaagaagatgatctaagctccgctgaaatagacagactgattctgctctccaatgtctcgcatagctcttgcactgagggcttgttgtgattgttgttgttgttggttgggtcccggttcaagcattggctagccacttcgcataccgtctcaagatcttcttggttaaaatgtttcagctctggatccaccaatcccgacattgcctctggtgcttcaaggaactcctttgcctgcaaaatgcaatagatacgtttcaaattcaaaacttttgccacaaaaaccacatttgaggtgcgatataactaaacatgtgaacaaggtcaagacttccacatccagacgaaaactcgtctctccctgaacagacgactccattcctactaggctaacagtaacaaagtttttgatataaatggtgaaaaaagaggaggaggaagtaactcagtttcaagtgtttagagaaactgagttgtttttgtcttacccattcaattaagaatcctttgtctttgcaataaggaggtcttccactgacaatttccagcaaaagaatcccgaatgcatagatattacccgacacatcaagatatcggctctccattccgtttgggagtacacatatcgaaccctggctactaatatttctcaaattcttttctgatcttgcaagaattgtcttccagcattcgaaatcaaccagctgcatcagagaaagtcagaaaaaagaaagaatgtgaacataaagcttagcttagctaattgtattactcagataacaagcaggtctcactttactttaccttgggagtaaaatcttctgtgagataaattgcgtttgagctcagctcagagattgtaaacggaggatcaagttccatatgaaggtacttgagaccacgtgcgatgcctataacaatcttcatccgtcttgcccacgatactaacgccgcttccccgtctgcatcaaaatatttcacataaaaatgttatctagctaaaacaatacaggatgatgcaacaaagctctgaggtaagttagactatttacagtgaaggtgctcatatagtgttccgtttgatgcatactcaaaaacaagcattcttgtaaatggtgagatctctttgcaatatccaagtaatttcgctgtgttctcgtggtttaatctagccaaatctgcaacctgaaacagtgaggagatggatttaaaatctcagaaaaaaggaggatatgtttaaagattgttcaatccaagtggcttggtgatgatgataacatgagaggaagctacctctctctggaaatagagctcaagatatccagtccaatcttcttcctttacacaaagagagatcaccgcaatctcagacccacctttcagcgttcctttatagatctgactatctgctgataaaccaatgatgttgctaaagtcttcacacgccacttcgagctcttgtcttgttaatctcgaaacatccttcagcatttcagaatctgtagttaaaataaaaacatgccacgtttttttagttctttgctccatggattctacattggaaggtaaagaattaggaaagattctaacctacgtagactgtgaacttttccttttcacttgaagatttcttccaaggaatgatgagagttgatctattgttccagcggtgaactgcagagaaaagtgcaaccagaaggagcaaaccaaccattgaccctgtgactatctcaagagctagaagccatttaggttttgatgctctatggtgcttagccaccatttgagctgattggtgcttaggagcagcgctcgggcttccatgagttttgaccagttgtgcattagctgcaacagggataacattcagaaaaccaagactaattgaacatgtatgtcgataaagtgaaaattattctatcttacacaccgcattgggaagaagatctatgcttaagatccttgttttgcatgcagttcccttgaaagctcgtcctagtgaccacaaaagagcatttctaagactaaattgaagacttagagagttccaaaagacagcatagatgatagaataccttggaaggttttctaaacattttggaatatttcccacgaaaaagttgtatgaaaagtcagctacttttaaagatttgcacaaaccagcgatgtttgcacttgaatttgaagaatacctaaataaattgaataaacaaaacccgattaacattgccatcatagacagaagtcacatagtgtttcatttttggcttcttgagctattaaacttacactttcgactgatagcccgatgctccagcaacaagaagacttccttgaagcctattcctgtcaatatgaagttctctaaggtacttcaagttaccgagctctgcaggcaactttccagtcaaaccattggactgaaggttgctgtaaaatgtgaaaagaaaaactgtcgtctcaacaactcatctgttaataagatatgaaagcatcactttgactgcgaaaaagatgaatctttattacattatcatgatgccggacaaactcccgatctctgcagggatcggtcccataagatgattgtttcccaagtccaagattttgagattctttaagtttcctatctccttaggtattgtccctattagaatgttcccatgtaggattctacagaagcattttaatgatgttaatgagatgcatcaaactcaatgcatcaaactacatatttgtgaaagagatgaaaccgtacagttcctgcaggtacgttatttgacccaattccggcgcaagaaacccttttatcgatgaagcggatatatttctgcacgaaaagaagatccacaagctataagctcaagccaacttcatcctaaaccactcataaacaactgattctgcagatactatacaagaataagtaaacgcaagagaaagaagaaaagatgaaagattcttacatcttgataacatgatctttagatggagagcaataaatgccggtccaatcacaaggatctgaattggggtcattccaattagacataactagcaaagggtcctcatagatagcttccttgaatcttctaagtgcttgaactaacaaaaacagagcagaagatccataaatctattagatgatttatatgatcagaccttgaattaaaagctttaacttcacagattcttctgatcttatccattaaaaagataaaactttttcaggttgattaagattctacactaatcccaactctgttcaagttaagttagaaagttgttcacagagagattcatggagactgaagaatctaaaaaggtatgagctttatctagcattttcttagtaaacctaacacaagcgagaaaacaattgaaatctgagatctgggtttaagaaaagtaacacaaaacaaagagattaacaaatagttttaccttcattagaggcaaacccatcacaagaaacgaagaagagaccaagaacaagagctaacgaacaaaaatacttcgatctcatcgtctgttgaaagattccttcaaattcggctcattaaaaaagaagcggaacctagattctttcacggatgatcaacagtataagctcaagaagaatctggagaaagacgacaactttctttgacaagtactctctgcagaaatgagatgtataagctcaagaagagaccaagtttagtaaagtaaagagcgagagagagagaagctgaagaatggaacaaggaaatggtaaaagagaagtgaaactggacaagattatttgattgatttagcaataaacctatcaaagaaaactcactgagacgagaacaaaaaaaaagtagcagagatgatgaagtgtggcgagaaagagagagagagagagacttggattcaaagacaggtttttgtttttccttgttggaggggaaaaatgagctttaatttttttatagaataaaaatagctatgaaaatatacaatttaaataaaaaatatcacagaaaggaagaatgttctcatcctctttatctttttatttcttttactttgggcaactttatgtgactctgagttgtttttaaatattctgaattatggatgttttttttacatgaatgtttgtttagtttttagatcgattttctattcatttatataagtgagaaatatatttatctatattaataatatatatacatcaatcatgtggcaaagcttaacaccaaattaataataaggaaatatccaaatctttctatatcaggaatctaggggcatatgtacaactgtatttttgcatgagattttaattgtaatatacagtaaattaaaaaatgatttgttagtgttaaaaaaatgatctgttgaaaagataatcgttgtattgttattcaaatatatattatcgctattttacttttaaaataaaatgtaaattttatacaaaaaaaattgtgcatcaagtgtaatgttccaatatcatcgttattatgtaagagtaaaattattttagaacctgatttttattaactttattaattatagatactaatgtggtatttgtgtagtaagagcaaaaaaaaaaaatatgagagaggtgagaaaaagtaggagagaaggagagttaaatttttcggaggagaaactttgagaaactattcttatcaaatttgtacagatgtcatcatattattagttcaactattaaataataattaatatatttgttttgattaaaatattaatatatttttttttgaaaaactttccttatttttactgatggaaatagtgtgccgtagatttttcttcactaatttaatgtggatctagtttttgaaagaggtaaattttttagtagtgaatttttagatattcaaaaaattaataataggacagactattattcgaacgtaaaatggaagagaacatctcattagaataatggtagaaatgaataaatttcgttggaagattcctaattaagagtataatattgttgctaatcattgaaataatagtgcgtttaatttataaagagaatttatttttcgtggtacggtcacggtgtctagtgtctactagtccactacggtgatctagagccttgctaagctgttgttacaacataccgtactactgtagatcacagctatgatcattaaattgtattttaatcaacggtcaacatattaacatgcaatactaatatataaaataattatattttgttagtaaattcaatttcattgtaataaaatagtatcgtgaaggctataaacaaacttcaaataatacgtatttgtcaattataataataagctatttaaatatagtatgctacaagaattattatttttagtgtgagagacaaaatgtcccatgaaagttacgccaccaatcatgcgagcttatgcttggagcgcgtgacgaatactctccgtattttaggtttattgttaccacttggaagttagaatcattaactatcacaattcacaagttcgaaaaatcatgactatgatgttgtgggactaaatgaagaaaaaacaaaaaaaagctaaaatctccattaagctttctctagaaacaattgttgtttcatggaaataaatcaaacataatgtcagaatattagaaaaaaacattatgcaaattaacacaataaagtagggaaaatcaaatggtttaaaagatacaacgctcaacaactctatcaattaaataatttcttttaattgtcaacaaagttacacaacatatatttttaatgtttggtacaaaatctacataaacatttttagatgaatccaactaacccctcgtttatttctagtacattctacgtttcttattttttttaataagtctttatataaattatataattggcctcaagagatcgtaacttcattaattgaacaacaaacaagagaaggggacaaattacccatgcgtgtcccaatttgtttgtttctaagttattttcgtgttatatttatttcgttatataaacgtacacacatatttgtttctaagacttgtcgacatcccattagatgattagatctcttgtatcatttatgtttatgttttgactgcttatgcacttaaaattcgtatggtatatactttctactgtttttttaatttttataatcaagatataaaaacgtattactaagaatattttctaattaaatatatacatacacttctgttacagtttggacatgaaggttcccttgtcgtcacgcccaatgcttacaagcaaacattgagtagatgctaagggaaattgataagaaccatcatgaatacacaactttgtgatgacatcaaatttaaatacggggcacttgttcaatcatactttctaaccaaaggattagtaccctttttccaatggatttaataatttaatgttgcagaatttggaagtcagcagttatctcaaattaaggtttgagcttatatgtacagtattcgggtttagatctaaaccgggtatgcaaatattgtgggttttacacgcattcggaataatttgatataacttaataactgaacttttattaatctgcaaattttatagtgttcgtgaaatttaagaagttatttcagtgttagatcaaccattttcttttctttttgtgcaacacgctactattttcttaacatgttctttttagtatttctagtgtagtattaaccattgacatcaattgtaacagattttaatgtgttttaactctctctttttaaaatgtgtgttttaagtttttatcagtcttacactatctttttcgcatgagagaaatcttaaatctgagttaaactcaaaagtattcaccgccgccgccgtgcttgtgtgaagagaaaacgacatttaatgaaatgaacaaaccacatacagtaatttcatattgataaaatctcaaaatattgggtatatcaaaaaaatctcaaaatatttataaaggatgatgttttattgggttctgttttttgaaaaattgatcatctttttatttttttgtgagtctctttattagtatagactattcagcaagacaactaaaccattaaatccatttggagaatttatcattaaatcattttcggtaaaagagtagtaaatgttttgtactaatatgtaaataataaataactagataattaatgatgatatgtacatatgatcgtgtcatgtgtgtatataagataggctgagaggcgatacacgtttgttccaccaagacgactagtaaccaagttggtaccaaatggctaatacgatattaacatcacagtttttttgacatgacaaattattgaaattttatatattatttcatatgatggtgagtttaagatactattctcataaacaatttgttccaattactcgataattaatcatgcttataagatttatattgaatgaactttgcatttgtttgtcaagtcagtgaaagataagtaaattattagaaaatagtacatatctcatttgtttataagaaagaattttaattcctcaaaattataatcaatctaacgttatccaatagataaaaaaaggtactataaaaatccccaactaaacttagatcatcaaatttagattatatcactttacagaaccttttgccagtaagagtcttcccatttctccacttgccggatgagattcaatttcttcctatggaacttctcaagaccattggaatcaaaaggaggaggaagtgaacatgggccagaagcatgaggcctactaactaaagagcctatcataaatttcttatcaaccccattaacatcttccccttcagaagggcacaccaaggcttctgtgcatagctcaacactattctttggaacttgaggcttgtacttaagaagcttggagtattcattcaacagatggaacatgtaatcataaacattttccattgatagatctctttgcatgaactcacttgcttctcttcctatctcttgagcctgaaaatcaaataaatctatgaaatcgtaggcaaagttatatatgtgattgaatttatcaaaaaattctatacaacatacttttgtttgcataatacagataaaccctttatttttcttcaaaacctaattatttttgacgaactagtttgatgtgatattgtattatacatatctataaatagatccagaaaaaaaaaatgatcatgttcatataagtaagataatgtagaaagagattataaaaaagatggagaagggtaccttttgagtgtgattattaagccaatcaacagcaaatttgatggatctacatttatctttatccctaatgggccaatagtgttggagaggttgaagagttcttgagaagaaatcatagtaataaggtttcaccatcaatgtgactgagtcacatgctaatatgtatttctcactcactgaccacgcatacccttctatatagatcttgtacctacatagtaactttattactccaatcattaaatgacacaaaaggaagaagaaattttagacaatggtactgacctgtaagtgcattgatttgctacattcgaattctcaaatcctctttgtccttctgatatccaatcctatttgcatgcaaatacaaatcaaaaatatatatatatatatatatatatatatatattgcataggaagacaagtataaataaatctgattatagaagcatacctgaatgaaaattctagcattccaatcatgtagtgaggataaattgcaagtgaggagatcttctcttgaaggagatgcaacaaaagggttccctttccaatatgcataggcgtctctttccataaatttcttcttcttctttccttcttccatttctttcaacactttgctccactcccttatgtttatctcctgccttcacccaccaaaattattccatttcatttcaatttcattcaaaaaataagaacttaatttgatagaaaacatgtttaaatgaatagttatgaaactaccaatatggttttggttttacacttcatgttttgctggaaagattgaatgacacaagaaattaaagttactttagtgaaacactttagttaaagcataataagtgataaacaacttacaaccacatatttaaattgtagtggcattgcgtggagggataatattgtttttggacttaccttttcgtccctttaaattactataattttagccactaactagctatactactatactcttaagaagatataatacaacaaaatgaatctattaagaatcacgaaagaatctatttgtgtataaatgaaaaaatggacccggtaacttttctccggcatgtgatcaagtggggacaagtgtaccttaacaaccatacacgttagcttcagagttcagacaaaagaagaaaaaaggagaaagtgagaagagattatattctagtacttaccatccccagaatgaccaatcaggaaagacgatatccaccgtccacctatcaccgcaatatctaaacaacggaggtggcgcattctcaaccgtacgattcaatatattataaccgtccgatctaatgactggtcgatcatcacagtcaaacatgagatccacgtcaggtaacttccctggatactttctcagcagctgaagaatcccccatagtgtgaacgcatctctagtttgtatagacttcttgtagttttcgacgaacaccttgccgtttaaaataactaacctgaaatgtgctgtagttttgcctctttccaccatttcttttgttatccctgtttctctccatggttttagatcctcgtgaatccacttgaagtaatcaggacaagaccggttagattcggtttggttttgattataacccgattgcagtgttcttgagcaagaaccagaccggttttgattcaagaaacttgagcaatctaccgagcttccggtttcctccggtgatttcttctctgatacacgtaccgggaccggttttattgttgttattgtcggtcgatgagatggttttttctatagtaacaaaaaaatgttgtcataatttatttttcaatcatgaacatatatattaggcataatcatggaagtaaagaagaagaattaccttgttaagtagaggtgttcttgagcaagaaccggaccggttttgattcaagaaacttgtgcaatttaccaatactccggtttcatgcggtggctctagctccggttctggttttgttgctactaatgtcggtcgatcaaatgcttttgtcgtctttgataaacaaacaataattcaaagtatgaataatagttatcatgatagtgtgaactatgtatatatagtgaaaagaatgatttaccttgttaagccatagagaggaagtgacggcaataccggcggcgattaggaagagaagaagcgttaaagttgccacgtggagttttccgataaccggacggtaagttttaaagttggtgatatgagaagtgagagctctaggtttagagaatagagacgtcatcgttatgattttttctttcttggattattaagggaatttttttgtctttgacatttttgttgatatctcgaaaacaagttggggggggtttctctttctatttttttttttttgaacttaaaaaggttgaggaaaaaagtagaaaagaaaatgcctcgtgggtttgagagaatgatgaggacacgagtcacacgacattgatgatagtggacttgttttgctactagtatatactttggaattcggaaatttaaactagtcaactttatcactcgatcgtttcaattacgttatttacatagattatacgtatagaataatttttttctgttcaacatatgataatcatatagtactactatttaaagcgtggccatatgtggataaaagttaaaagggatttcgatggaagtgtttttttgtctttcaagtatctcactatggttttttaatccactatgcttcatcaaataaaattgttcaaattttaaacttatatcaaaatagatgagcaaatcgagcaaatcaagcaaataggaggaagccttcattacctttctgctggcccgttgtcatcttcggtagtgagatcatatacttgctctataacattctcatgagggctcaagaaaggtattcaactattgaatttcttatactaattaccgactactaaaagaagaatatgaagcaatctttataagttgttcttgtggtcttgccttgcgcattcacgaagaaggaaagagtgacttgtttttaattcgtgtgataaaatttgaatttatattacgaaaatggtaacttgatggttagtaactacacaatttaaacacattgtgttggagaacagcttttttcccaaaacactcaaattcatgttttacgagtgtaagttaagcagattttttcttgtctagccatttcacaaaaaaacgagttgagatagctgatctttgtttggtgcatagaagaagaacaccggcgctgaggcttttcgtagggaataaaaaagagaggctgttaacaccattcatttcaaataaagtacattatagggggttttgacaaagaaatttatatacttttttcattttgttatgtatatataaaaatttcaaaactcaccaatttaatctcaatattaaaaattactaaccaacactcctatagtcctatgcatgtaatttgtcgaatcactatagattttaatatataatttttgatatttgtgcaagtttagtcaccataaccaaaaatcgttgggttactggaaatacaaggtccattaagtagagatgagatcccataaaatataacgaaatctcttgtataaggcccattatcactttcaagagagcagattgttgagtttattggaaatttgaggcttgatcctaagatgcttgcaaatatcatttaacacactctctgttgttgtatgatatgaaccaagtcatgggatgtgaagtttcaaaactcaaacttcaatcccccgaaggcctatggaacggaaaccatatttgcattatggattcatttggatcatccaatcacctttgaattaatctccgacaaatagttaaaagacgtaatctcaaaactctaaagtcaatattattttttcatttatcacttgtttcattatttagctgactgtactcttctttatattattgttttaacttgttcgatgcgatgcgatgcaactcatcatttatttcataaataaaaaaatagccaaatgaacagttgatattcattatgaaccacaaaaaatggtacgatgtagcaattgtataattttctaatcgaaacaaagttgatagaactatttacatcattatttatgaatgatgaggtcggaagagacaaaacatgcataaactttgtgtctcggttttcttataaggtttttaatgtttcaatttgcaatgatgtcaaacattagggtcccaaactgaataagtgtaaatatgtgtgacctttttctaatattttactctctaattaattatatggtcgtgcatgatcttatttattttatacttaagtaagataacaaacgtttgtacataatgataagatgaaaaaaatgttatagaattatgagtgcgctaaattttctttaaccgtatgtatgtataatggtggtcctaaaactttaaaacgggtttagtttgtggcctgaaatgaaacgtgtaacccactaattacaaaatctctataatctttaatttcaaaaaaaatcaaggataactcagtttattaaaatgtgtacgtacttgactgcgtgagtcattctaaagattaattatcgattagaaattatatttgtgggcatgaatcgattccattaataaacattaaaaaaatgtaatcttcgttttagataaaatgatgttgaagatcctgagtcggctcaaacattcttgtctctgaatgaagtttcaacagcatacgtacgtagtttggcactggtggcaatgacaattcgtctagtaacaacaagtttgatactcaagtacttgttactagactagtctagcagttgctattatgttgaataatcttgtgttctgaaattcacaatcgagaatattggtttaaaccttcatcaagcttcatatgcgagacactattttcatttttagaaaaatttcgtaacaaaacttttaaaaacgttatctatatattcctaggaaaattttctttatgacttaactaaaaaaatactcaaccaataagaacagatattaaaaatacaattggtgataaaatatcaaaatagatttgaactttgcataaaaagttctacaaaatcaaagaaaaacctcaaatatctaataattaaaaacgaactgagaatatttttaaaattatagtatatgaatggaaacacaaaataaaaatgatttcaggtttaattctttagaaaatatgatacgaataaaagcaaaagaagaaaaaactcttcttcaaaacgagagaaacaattttgtagaggaacttgcataaattaaggacctccggcagataagtccactatcaacatgtataatatgcgaaatgcggtgtttgtattttgtaattatatcttttatcttatttaatgtttatacttttttttttgtatgacagacatctcgataagaattgtattatatacaaacaataatattttataaacacagcaaaattgaaaaagagtgataataacgcccaaccgtggaaacgttgtgaggatagtaataattttataagaagataggagtttttatttgaaaataattaaaaagtgatttgttttactaaacaaaagtgaatttttatttctctatgacatttgtcggctctatgagaatgtacatctaattcctaattttacacagttaaagttagtgctatatttttcaaaagcaaaaaagttagtgccatttttttttcaatttcattttgtaaggtaataagtgaaaccttaataattactttaacatttgcacatatacatatgcatgtcaaatttaacgtaatagatagattttttttttttttgtaaaatatataatattcgctcctcttttttacttaacaaagtcatatgtataaatcatatatgatgtcaaagattaaattattattggtcaccgtacatgaatctggtattgggagaaaattagaaaaattcaaagtgatcctagttgtttattttaatgggagataagaaaaggaaggctgattatataaatacaagtcattgaggtgtataagacttcttcaacttcaactacaatttcagtttcataataattattgaagtatatagtttatataccatttctcttctctctgtctctttgtctctctctctttaccatggctagggtttttcctcaagcggccatctcttcaccgtacatgagtacggagagagagactttcacggtttggatgaaatctctggtttaccaaaccaatggtttaactgtttacaattccaacggagagattacttaccgtgtcgaaaactacgacaaatgtagcaatgaagtccatatcatggatctccatggcaacattttgttcaccatccgcaaaaaggtataatcaatccctcgttgattcggttcgattctttttttcttggttcatcccggttcgagctccaaacaaactagtagttcgaaaattttgttgaccatccagaaaagtaaagttttcaagttcataaacatgctctaataccctcctctaagaaactatggggctaaagtctcataacttattggattcttaaaaatttattgaataatgaatcatttgaaaatcaacaacgccaaaaaaaataaaaaaaaattggaatttacaatttaaactaaaaaaaaagttaaatgaagtttctctagctcaatttagaaatagtttttcaaaaatatagtaagcaagcaaccatacttaacttatattaaaaaaactcaaactatgattcaaatttgcgccgtggaattggacttttaaaatttaatgatgatcatgtgtaaacaagttggacaataatatgaataaattcatcatatgttttaaaattattgtgtttcttgtttaaaaaatatttgcagaaattatggcttttcgggagttggtatgtgtatagagaatgtggaagctttacaagcacggaagaagtgaaaccttgtgctagaatcaaaaggtcttcgataagagatggagattgggaagttcgagatgagaccaatgaagtcttttggattttaagatttgaccccaaatttgcttttcagatcatagacattcacggaaatatcattgcacaggtaaatatatcaatattttgaaccaaaaaaacgaaattgaaagagtatatatatatatagagttaaatacttaaccatatacatgtttaataggttaagccaaagcaatcatcaaatgggattacattgggagaagatgtgttaactttggaggtgaaaccacgtgttgatcactcactcgttgtcacacttgtcactgtatatggattaattaaaggagtagtctaatttttcttgtttgatttgtatagtaaaaacacacacacaaatagtgatttttccaaccttgtttgtgttgtggaatatgtaaatattcttttttttgcgagccttgaattttgcttgttttttaagctctgtccaaaaaaacattccacaatagaattatattgtttagggggaaaaagccgaaaaaatcgtcatttatttttaatttggctgtttaatacatgtagttttaaatttggattaaaaatacctcacttattttttgttgtcttttaaaaccatcgtcttttagattttggtaatttcgaacctggtacttaacagccgtcaatgaacataacggaattatttgaccctacgtatttcaattatataataataggtttacaaaaagttttgtttatattgtcttggtctagtggtaccgcagggtttgggtaatcccaatttctcggttcgagtctacatcccactccttttaatttttattttttatttttctgatttacttcatcttcttcacgagtttttttttatctccagtaattgattttatttttcaactctcatcatttatggttttggtgatggagagacatgtgattgatcggggaaagacgaagaaagagttagagattttggttaaatgatatagattgatggggaagtgaagcaattgagggattttgaggaggaagaagtagcagtaggagatgaaatcgccattgaaatatgagaaaatttagggtttttggtgaattgaaggaatctttgagaagaatgtgagatttgtgaaaaaagtgaggaaataaaggaaaaatcaattgcagggatggtgaagaagatgaagtgaaaaacaaaaaataaacgaaaaaaaaataactaaatgggaaagaggcggggttcgaacctgtgaactgatgattatcctacattattgttaccaccagaccaagacaacacgcacatacttttttgcaaattcattgtttataaatatgacaacacgtagggttaaaatttaacgctgttaaatgattccgttacgggcatcaacgcctgttaagtggtaggttcgaaactaccaaaatttaaaagacaatggttttaagagacaaaaaaaataagtaaggtatttttattccaaatttaaaactataggtattaaacggccaaattaaaaataaatggagattttttcggctttttcccctattgtttaggacttacatatagcaaatataaattatcattcgaagtctgaactcttcatgataggtccatgatccggaccattgagtttcatttgccaacaaattttgcctatggataaaatgttaaagaaagaagaagacaacttttaaagtttgaaaatcttctcgtgtccacctaataggagcataacaaagagcagtaccactgtactagtcatgtccacgaaactcacactcaacaacaacaagaacaaatttaacatgaaaacacaaactgggtccagaagtaaacaacaaggtcgattcacctcacatatgcaatcacaagggaggatggttgctccccaattcgtttctcgaggattgattgtttcaagacagcatttccagatagtttttttccaatctcccatcatgcaacatatcaatcaccatatttattgttgaagcatctccagcaaactcgcgactcctcattcctctgatgagttcagctgatgctgctttgtcaccatctctaagatgtgccctaataaacgtattttatgtaccgctatctggaagaggcccatcttctctcatttttctgaacaaggcatctgcttcttcctttaaacctttcctacaaaatcctgagatcatagtattgtaaattattacatcaggtttcactcctttaaggctgaggctacaaaatagatcccacccatcttccaccttccctgccttgcacatcccttcaatcataatattatatgtgtaaatagtaggttccattttactcctttgcagatactcgaatacaaccattgctttctctagcttcccatttttacaaagtccatctaacagagtgttgtatgtcataatattgggatgcacaccatcagaaaccatctgtttgaacaccatttgggcattatcacaatctctagcttgaaaaaatccatggataagagtggtgtaagtgactgtgttgccaaccaatcctctttgagacatctcgcggaagagttccacaccttcgtctattctcttagccttacaaaatccgttaataagagtattgtaagtcactacgtttgggaaacagtccttgctaatcatcaactcaaacatgtgcttggcctcgtctaaacgatcgtgcatacaaaacccattgatcagtgaactataagtgaaaatatcaggatctatagaccttttgatcatctcgtcgtacaatttctcagcctctacaagcttcccctccttcacaaatgcatcaatcaatgcgttgaaagtgactacatttggattgattttcctctcaatcatatcactgagtagtcgagaagcatcactccatctttcgtaattacaaaggcaacttatgagggagctgtaggtaataacatttggtctaactcctttgttttccatttcagtgaacaagttgagtgcatcatcctcatgtctatatttgcagagactatctatgactgtgctgtagatcacaacattggcctctattttcgcagcttccatcttgttgagcagattaaaagccaaatcaatatcacctctcttacataatccatttactaccactccataagtaaccagatttggttgacagcctctttgaaccattcgatcaactaacgccacagcttcagaagctttgttgtggagaaaaagcccatgaatcaaagttgtaaatgtgattgtgtcaggtctataccccatttccaccatttgatcaaccaaagctacagcatctgaaatcctcttaccgtgacagtatccattgagaagagaagaaagcgtgacaatgctgggctcatagccgagtttcatcatcttgccaagaagagctaaagcaagagagatttgagagcgtcggcagaaacagttgatcaaaatattgtaagtatatagattatgtgaaattcctaacctctgcatcttctcacctagagagatgacaagatcaaactttttcatcttagcaatggcactcaacagtttattgaactcaaaaatggaaggtaaaggacgtgacttgaccatgccaccgaacaaaccaattgcatcatctaacttcatactatgtaacccatttctcaatatctctctgtaatcaccactgccactagaaaaagctcgtccccagtaacacatcccgcaaagatcaatggaagaaggagcaattcgaggattacctttcccctgaagattccgatgaacaaatctactcgtcgtcgatgaaactacactcgaaattgagatcctcatcttctcgttttggcttcagctgattctcaatctcactcttactctcactcctctctgcaaatcgcaaaccctacacggagagagagatatgcaaaccggtgggattctggtttagaactgattaccaaaccggtttactaacgattgaattttgaagcgggccataaaactgttttgggacttccacttaccctctagataaaacgcagcgtttagataatttctcaggaatttgtttttgtttttttaacattgtgtcgtggtgtgtgtggatcatgagtttttgggccacatatttataaaaaggccgtagtatattcaccatcgttaacgaatctcgttaaaaaaaccaatggcgccttccttatcaccaatcagatcacaccacgtggcagttatcggcgccggagccgccggattagtagcggcgcgagagcttcgacgggaaggtcactcggtggtcgtcttcgagagacaaaaacaagtcggaggaacctggatatacaccgatcatatcgaacccgatccattaagcgttgacccgacccgatccgttgttcattcgagcgtttatggctctctccgaactaatctcccccgtgagtgtatgggatacagggacttcccgttcgtggttcgttccggtgtatcggaatctagagatccgaggaggtttccgagtcatggtgaagttttggcgtatttacaagatttcgctaaggagtttgcgatcgaggagatgattcggtttgatacggcggttgtgaaggttgctccggcggcggaagaaggaagcgggaaatggagaattgaatctacggagaaagagaagaaaaaatgggcacaccgggcagtgtagttccggaatcgacaatgtatgtattcccggtgacatattgagaagaatcgtgaatgagatagcgaacaagagatgtaagccccggatccacagtctgttgcatctttaatggtacaaccttttccgtaaccttcttgagccactctttctggaaaagaccttgtgtgatctctgacctgaaaatccccggtgcgatcgagttcactctgatcttataaacagctaactcaatagccatcatcctcgtcatggtgtcaacaccacctttggaacaagcatacgctagtccaccgcgcaacaaaccgcgatgaagcccagagatcgacgagacgttaatcaccgagcccccgcgctcagcgtcacgcatcaaaaggcagacgtatttggatattaaccaagatccggttaagttggttctaaagactttgtcccattcttcttctgacaaatccaaactcgacttgacattgcctctgattccggcattattgatcaaaacatcgatctttccaaaggtttcccaagcttctttaaccgcttttcgaatagtgtctgcttctgatgaaacgtctagctcaagtgctacggcttggactccgatagcaccaaagctgttgatttcagaacagagagagttgagacgatcaacacgacgagctgctgctacaatcttacaaccagctttgcatagatcaagacagatctctctccctataccagaggaagcacctgtcacaagaaccactttatctttaagttcacaccatggctccaattgcttcaatacctgcttctgtccacaaaaaaaacaaacaatcatcaagaaagtggaagggcaaaatgagagaaaagaaatctcacagtttgatgattgctcatattgattgatgtttcactgtctcggtggagaagaaatacaatgacacaagttatataataaaagcatttctctctatcaaccaaaacgtggcaatctacgtctgtaataacagattcgtgtaagtttctaacacaccaaattgattattaaaaacattgtaatcataaattgtaacaagtgtgtgtgattgtgattcatagattctaatcaaagaacacacaaatggcacctgcattatcaccaaccagatcacaccacgtggcggttatcggtgctggacccgccggactagtagcggcacgagagcttcgacgagaaggtcactcagtggtcgttttcgagaaacaaaaacaagtgggaggaacctggatttacaccgatgaagtcgaatcggatccgttaagtgttgacccgacccgatccgttgttcattcaagcgtctatagatctctacgaatcaacggtacacgagagtgtaccggatacagagatttcccgttcgtggttcgttccggtgtgtctagagatcggaggaggtttccgagtcatggcgaagttttggcgtatttgaaagatttcgctaaggagtttgggattgaggagatggttaggtttgagacggaggttgtgaaggtttctccggcggcggaggaaggaatcgggaagtggaggattgaatcgacggagaaagagaagaaagttcgtcgtgatgagatttatgatgctgttgttgtttgtaatggacattatgttgaacctcgtctcgctcaaattcctggtaatatatagtagtacattttttatattattaaaatatttatatttatgttaaaaaaagtatttttaattaattctcaaaaatgttgtgagatattgatattttttgttgtgtttttagtagatatttctttttgattcaaattgaaaattcgtatacattaaaagaaatttgaattgtcaaattatcttatttaccaaaaggttgttgaatattaaacaataaaaaaaaaacattttcgttgcatattattaataatttcaaatgataaaatttaatattttggttaaaaagattgagttaaaaaaattttgaaaaaaaagagaggaatttggtattggaatttcatgaaagtcaagactaataaatgagaagtgtgactgtgttttaatcttggaaacttttaggtataagttcttggccagggaaagaaatgcatagccataattaccgtattcccgaaccattcagagataaggtacttattttcattgatcataatgtttaattccttgcataattggattgtgctggcaacgattaggttgctgtgcttattgggaactcttcaagtgctgaggatataagtagggacattgctagagttgcaaaagaggttcatgtggcttgtaggtcaaatccagctgatacgtttatcaaacaaaccggttataataatctatggacgcattcaatggtgggttaactttagctcctaagtaatactcgacgtaaagaaacaattttatgttttcttaaatgtcatgcagattgagagtgttcatgaggatggctctgttgtttatcagaacgggaagacgatttcggttgatattattatgcattgcactgggtatacattctttctttagtttagtttctgtttagtttctcatatatcatgcatggtgtggttatttgacaaagcgctttacttttcgtaggtataagtatcattttccgtttcttgataccaatggaattgtcactgtagatgataaccgtgttgggccattgtacaaagacgtcttccctccagcatttgcaccttggctttccttcatcggtataccatggcaggttacatacctataaattgctctttttcacgtttcccctcaacattttaagtcataacaaatcggatttcaggtgttaccgttccctatgtttgagctgcaaagcaagtggatcgcgggtgttttatcgggtcggatcccgcttccttccaaggaagatatgatgatagaaatcaaaaccttttactccacacttgaagtccaagggattccaaagcgatatactcatcgtatgggcaatactcaggtttaaaatcccaagtttccgcacataaaaataaaataaaataaaccaaagctaaacagaaacacatcaatgacattttttgttgtttgcagtttgagtatgataattggttggcttcacaatgcggatgctcagaaacagaggaatggaggaaagagatgtgtttggcgaatggtgttaggaaggaagcccatcctgagacgtatagagacgaatgggatgatcatcacttagtttctgaagcttatcaagatttctctttgtactcataaacaaaacattttatacatgaaagtaaatttaccgaatttgtaaatgccaatactgccattcaatgtaaaagacatattgtaaaacattaggcgcaccaggcaatgtagctctggcgtctacaatgtatgtatcccacggtctattacatcttcagaaactacgatggtctgcttctcgctgtcggtggtgttatatcatcgtcgctggcactggcaaatactatgactctcatagcgaagattacaaaacaaaatttaagaaaaaatttcaatgttcgagatcaagacgacaatagactcgtattttaggtctcagaagaactgctctgatgaatgataccatttgaaacttgactcgattataaagaatgttgaatgttctgtgtttttgatagatggttttacaacgtatacacaaaggtaaacgtatacaagacttgccgaacaagtataacgtacaacacaatccaatgcagcctactaatgataatccattgatttgactgtttgagagataagagatactgtactgtagttcttttcttaataaggctttcaccaccaaagtaactaaaagttttgatgattttgcaatttcagtatccgacgttttcgaagctaaaagatttttctcttttactttcgaaacaattgaaaacaaagctatcagtggttttactttgctttttttccaatgaaattctattccgacttttgatctttaagttttttacaaatgtaagaggaaaattaatttaacgtcaggtcattcggccactaagccaatggagacttagtaaatagtgtggcccagcagaggtcaatagccgccacgatttaccaaattgagaaggtcgttatgcttctcaaccatgcaaagtatctcatattttggactcactcgaacgagagaatttgatcttatttcgagtggactaaaacgtaagtcttatcttcaattattatttgcatcgtctctagtacgtttgctcagattactaaatttcaaatttcagatctctcaatttctgtaaaatgggtatttctttctcgataccctttgatccgtgtgtaaataaagtctctcaatggctagacatgaaagtaagttatactcacaatctcgagaagaatctcgcagctttggagaaaaccatgaaagagctcaaggctaagcgggatgatttggaaagaaggctcaaaagagaggaggctagaggtctacaaaggctttccgaattccaggtatggcttgatagtgttgcgactgtcgaagacataatcattactcttcttagagatagaaatgttgaaattcaaaggctgtgtctttgccggttttgctctaagagtttaacgaggagctatcgttatgggaaaagtgttttcttgaggttgagggaggttgagaaactcaaaggtgaagtttttggagtgataaccgagcaagcttcaacatctgcgtttgaggaacgacctcttcaaccgacaatcgttggtcaagacacaatgctcgataaggcagggaaacatctcatggaagatggagttggtattatgggtatgtacggtatgggcggtgtagggaagacaacacttctcactcagctctacaatatgttcaataaggataagtgtggatttgatattggcatttgggttgtcgtgtctcaagagtttcatgtggagaaggttcaagatgaaatcgctcaaaagcttggtcttggtggagatgagtggacacagaaagataaaagtcaaaaggggatttgtttatacaatatcttgagggaaaagagttttgtgttgtttttagatgacatatgggaaaaggtggatttagctgagatcggagttccggatccaagaaccaaaaaaggacgtaaattggcatttacgactcggtcccaagaggtatgtgcacgcatgggggtcgaacatccaatggaagtccaatgcttggaagagaatgtggcatttgatttgttccaaaagaaggttggacaaacaacacttggaagcgatccggggatcccccaacttgcaagaatagttgcgaaaaaatgttgtggcctaccattggcgctcaacgtcataggcgagaccatgtcatgcaaaaggacgatacaagaatggcgtcacgctatacatgttttgaattcatacgctgcagagtttataggcatggaggataaggttcttccgcttttgaagtatagctacgataaccttaagggggagcaagtcaaatcgagtttgttgtattgtgctttatatccagaagatgcgaaaattctgaaagaagatttgatagagcattggatatgcgaggaaattatagatggaagtgaaggtatagaaaaggctgaggacaagggttatgagattataggttgtcttgttcgcgcatcattgttgatggagtgggatgatggggatggacgacgtgctgtgtgtatgcatgacgttgttcgtgaaatggccttatggatcgcttctgaactgggaatacaaaaggaggccttcattgtgcgtgcaggtgttggcgtacgtgaaattccaaagattaagaattggaatgttgtgagaaggatgtcattgatggagaacaagattcatcatctcgttggtagttatgaatgtatggaactcacaactttgctcctgggaaagcgagaatatggaagtattcggagtcaattaaaaacgatctcgagtgaattcttcaattgcatgccaaagctagctgttttggatctatcgcataataaaagtctctttgaattgccggaagaaatatcaaatctagtttccttgaaatatctcaacttgttatatactgagataagtcatttgcctaagggtatacaagagttgaagaaaataattcacttgaatttggagtatacaaggaagcttgagagcattactgggatatcaagtctgcataacttgaaagttctgaaattatttcgttctagattaccatgggatctcaacacagtgaaggagctggaaactttggaacatttagaaattttaaccacaactatcgatccaagagcgaagcagtttttgagctcccataggttgctgagtcattcacgattgctagagatctatggatcttctgtatcctcactaaatagacatctagaatcactttcagtatctacggacaagcttcgcgaatttcaaattaagagctgcagtatctctgagattaagatgggagggatatgcaacttcttgagcctcgtcgatgtgaatatattcaattgtgaaggcttgagggaattgacgtttctgatctttgctccaaagattagatctctttctgtttggcatgcaaaagacctagaagatataataaacgaagagaaagcttgtgaaggtgaagaatcggggattcttccttttccagagctgaattttcttactttacatgatctaccgaagctgaagaagatctattggagacctctaccctttctatgtctagaagaaatcaatataagggaatgtccaaatctgagaaagcttccactcgattccacaagtggcaagcaaggtgaaaatggatgcatcatacgtaacaaagattcacgttggtttgaaggtgtgaaatgggcagacgaagctacgaaaaaacgcttcttaccttcatgccaattgatttctcttaaatgattttcaaggattgtgtcagctgttacttttgagtatatttccaaaaaaaaatatatccagagacccaggctgcttactaagggagcaagttggaagttgataatgtcatttgggttctaaatggaaactttctatctctttgttgctttctgctgaattctctacctgcttatctctctgttgtgtgttttgcattctgtgtaatcagtatcacactttgtattattgctttatgtgagttctttttatagtccttgccttccacatgaaacatactttgatgactagttagtgatgaatgtatgcaaattgattgggatgtggatcaacgattctgagtcttgtgatttctaattatgatcttgcaaaaactagttgatactaataattcgatagctattggcatgagaaagaaaagacagttgtaggagtactcaatccctgaaaaggcatgtttggatctgaaagtattgagactgtgaggttctgatgtttcattggacctcaacacagtggaggagttgctagttttggaaagattaaaaattttaaccataagaattggtttatgattcaggtttggttcaatttttaatttctcatcttaagcttatgagctgtacacgagatttagagattagtagtcttcaactagaatcatctgagataaagattgatatgacgtgcattcaaagcaacacaagttctctgttgcgcaatccaataatttcttgagtctttctgatgtgtatgtataagattgtaaatgcctagggagtttacatggctgatctttgctccaagtcttagatatattgatgttgaatgttctgactagctctagaagatataataagtaaagagaaggctagtttaagtgaagaatcagggacttttcttacgcttacaaattcctgttaatgaagtgtttatagtttcattactcagttttgtttgtttaattcttttcagattggataaaatgtttgttacaaacagtatatgcttcggcactttttattttaaacagatttgtgtgtttgaatgtggtctgtctctactctgttactactatataccaatatatatggaattaaccttcgaatcttggttaacaagtaaatgtacccgtcgtcgctaatggaagacaaagacttccctcgaaactaattccccagcttaattaggtcttctatacaatccacaacaaattgagaaatgtgatggcatagtgtaactcatagtgtgatgattgctcatattgtttcactacaacgtgtgtgttccgtggcgaaggagaagactatctaacacagttttgattaaaaaaaaaccaaaacgacaattcaaggcatgccaatgtaactctgtcattaaaagttttgatgattttacaattttagtatccggtgatttcgaagctaaaagattttctctctcttttttttttttggaaacaattgaaagcaaaactatcagttgtgttagctttttcccaaggaagttatatttcgacaattgagtttacaaatgtaagagaggaaagttattttaacgtcaggtcattcggccactagcgaatggatcctttgtaaatagtgtggcctagcaaaggtcaacagccgccatgcttcaccaaatcgggtgtgaatgtgagatttattaaagaagaaattattattattgatatatcaaacgatcaaagtttctgagaaggtcgtcagtggaccaaaacgagatttcggactcactcgaacgagatcttgatcttatttcgagtggaccaaaacgtaagtcttagcttcaattattctttgcatcgtctctagtacgtttgctcaaattagtaaatttcaaatttcagatctctcaattactgtagaatgggtatctctttctcgataccctttgatccgtgtgtaaataaagtctctcaatggctagacatgaaagtaagttatactcacaacctcgagaagaatcttgtggctctcgagacaaccatggaagagctcaaggccaagcgggatgatttattaagaaagctcaaaagagaggaggatagaggtctacaaacgcttggcgaaatcaaggtatggcttaatagagttgagactatcgaaagcagagtcaatgatcttcttaatgctagaaatgctgaacttcaaaggctgtgcctttgtgggttttgctctaagagtttaacgacgagctatcgttatgggaaaagtgttttcttgaaattgagggaggttgagaaactcgaaaggagagtttttgaagtgatttctgatcaagcttcaacatctgaggtggaggaacaacaacttcaaccgacaattgttggtcaagaaacaatgcttgataacgcatggaatcatctaatggaagatggagttggtattatgggattgtatggtatgggaggtgttgggaagacgactcttctcacccagattaacaataagttcagtaagtatatgtgtggctttgacagcgtgatttgggttgtggtgtctaaagaggtgaatgtagagaatattctagatgaaatcgctcagaaagttcatattagtggagagaagtgggacacaaaatataaataccaaaagggcgtttatttatacaatttcttaaggaaaatgagatttgtattgtttttggatgacatatgggagaaggttaatttagttgagatcggagtcccctttccaacaataaaaaacaaatgtaaagtggtattcaccactcggtccttagatgtatgcacaagcatgggggttgaaaaaccaatggaagtccaatgcctggcggacaacgacgcatatgatttgttccaaaaaaaggttggacaaataacactaggaagcgacccagagatccgtgaactttctagagtagttgctaaaaaatgttgtggtttaccattggcgctcaatgtggtaagtgagaccatgtcatgcaagaggacggtacaagaatggcgtcatgcgatatatgttttaaattcatatgctgcaaagttttctggcatggacgataagatccttccgcttttaaagtatagctatgatagtctcaaaggggaggatgtcaaaatgtgtttgctatattgcgctttgtttccagaagatgctaaaataaggaaggagaatctgatagagtactggatatgcgaggaaattatagatggaagtgaaggtattgataaggctgagaaccaaggttatgagataattggtagtcttgttcgtgcatcattgttgatggaagaggttgaattggatggagcaaatattgtttgtctgcatgatgttgttcgtgaaatggctttatggatcgcatctgatttgggaaaacaaaatgaggcgtttattgtgcgtgcaagtgttgggctacgtgaaattctaaaggttgagaattggaacgtcgtgagaaggatgtcattgatgaagaataatattgctcatcttgatggccgtcttgattgtatggaactcacaactttgctactacaaagcacacatttggaaaagatctcgagtgaattc

SEQ ID NO: 1013 - DNA, 91530 bp, Arabidopsis thaliana
gaattcgcaataagttcataaggagaagcgacaaactgcaacttgctcccgtggactaaaaataagatttctagtactatagaatgattgtaattgttaaatttttgtaataattgtgaaaataatttgggatcaaagcttcaaacaatttacttggacttatgtcttgggtttctttctcaatgcaattccatatggattgtggccgagacagtgcacgagaccatgaccgggagaggtatgtcgagttttagagtagagatcttctaggagatgtgcatgtgccagatgtggttatcacagtcgcaaacacataaacattatatagagcgttttatagatgttttagagaggtgcatctttttgttttgtcttgtgtctttattctttctcttcgtgaatcttgtaataatcttctacaaaatgttccttatgaaatatgagggcatataaggtgtgttatacacaaacgggaagcaagaagaaaattagagttatgggcccaaagttatgcgcatatatataatcaaatcgaaaaactgtaggaaatacatgataggtcaaaaaaccctgattttcatttgaagacgacgatgatgatatccgatcttccggaggatatggtagaagagatactgtctagggtttcaataatatctctaggagcattgagatggaacgatttatctaaagctcgggtcatatgtaaagcagaagctagacaacagtttgctggtttcatgataaagggatctaaggtttgttcaatgagatttgatcttcatggaatccaaaataacaacgtcgaagtagttgagccatctataaagcaaatagctaagtttaatcatgttgagatatctcaagtctttcattgcgatggcttattgttaatgatgagtaaggaggtcagcaacactaggctcgtggtttggaacccgtatttggggaaaatatggtcgattcaacataggagtgcttatcattccgaaaacaggtatactctcggatatgataacaaccgtaaaccacaaaatcttgaggtattttataaattacgaaatctacgattttaaatctcattcgtggagggttcttaatatcattccccactcgggtaacaattttcgtaaaggttgcatatcattcaataaagggaattacttatcttttcaatggaggagagaaaataggggaaggaccaactggatgtttactttgttttgattttacaagagagagatttgggccgagtcttcctctaccatttcacgttgctcatttatatactgtgactctatcttctatttgagaggaacaacttgcagtgttattgcataattggggagcatttgcgatggagatatgggtgacaactaatattgagcccaatgcggttcttatggagcaacttcttaaaaattacttactgtacacttccgattttagttgggagttttttcattgaccaagagaagaaacacgctgtgatttttgattcaagcttatcttgtggatccgtagcttgcatcattggagagactggaaacttgagaactgtggatcttggagtagctgccgtgccgtatcgtcagctaccagtgtgctcttatgctccaagtttagagcaaatcaaccaaggccaagaactaccccttattggtcagaagaaaatatcaagattatcaaccagtcttatttacattatgttatttgtttcgttcatcaccttcattttgttctttgactctgttttcttttgaataagtctagtcatacaatgattgtttttttcctgatatatatttaatcatatgatactcaaaagctttgttatattgaaggcttaacccaaatatttatggaacaacacaagtactgggtttccactttccttgataacttgattaccaaatatggttgatgaacagaaaagaactgagaacaaaagacatatgtacaacaggttacatattatatgacttagaattctatgtggaaaacattagttaacattgtctttgcctctttggtgaatttctcatcgtcccttactctcattctcaactgctcattaggttaattgttctctatgctgtcttaatatagctctttcatctttcatcgtcttcctcgattctctcctatacttcttgggatctatccgtggtttagcttgttccacacccttctctcccatgtggcaactgtgtcaaagcttccctaatcattccaaatttgtgccaaatctcaaaataaaagctgtttgtttcaagagaatcgaaaaatacctaacaccaccttcccttttggttccatacttcttaagttgacactcctcatcgattttgatctcatcaagcagttgtaaaaagtaatcatacctttcccaaccacctgtcacagcacagccttgtacccctaaatgcgagcaatccttgtatttacattttcctccctcgaccattttccgtatctaaggaaagagtaagaaacaccatcagtgcacaatcaatcagtctcacatatggggaaatgggcacaagcaaaaagggtacaaacctcaggaaaacacaagggaagtttttgctttgttactttcagcaacttatgcttgttaaagccaggagtatcagcaaggtatccacctccacaaagaggaagtagcgttacatttcgggttgtatgtttacctcttccatttctatgtgaaacttcccctacactctgatcttcaaaccacttttttttattcttcttgttttggcctttatacattgtcatgaggatatggtaaaaaacaaaaggtttagctatagaatgaagtaggacaaaaaaaaacttacaggcttaaacacttcttcgtgtttaatgtcaccaccgtagctacttctcaatatattgattaagctggactttccaacaccactaggtccaacaatgacagaagtctgatttcgcaggttaaacgcaatctcatcaattccgactttagttcccacactacagaacaatggttcatagttccaactacgcaatcttatcttccaagattccacttcctgaaaacaagatcattactctaatcaaaccctgaaatcgagtctaaactataaagcagcaagtgttctgaactagtagtgaactaatgagctatgaaattccaggatatggttctaatcaatcccctgaaatagagtacaaaggatcaaagtggtctaaactagtcgtgaactacgcaatgtctttctagcaaaaacagtggtgcatagttccaactacacaatcttatcttctaagattccaagtcctgtaaacaagatcattgctctacttaaacccctgaaatggagagtataaactagtagtgaactatgcaatttacttcctaccaaaacctagttgagtcaatatgattcatcatccttacctcttgagtgacgagttcacatttgttcaaagcaactgtgattcgaattccaatagattcagcttccaccaagaacctagtaagtgtaaatggatcaatcttaggttgatcaagagaaaacagaatcactaagtgatcaacattcgcaaccggtggatccaaaacctccgagactcgatcaaacacattgataatcttagctctccgatcaacccaatcaactttatcaacgagaactttatcaccaacaagaacagtcctacctatcttcttcagtaactttctcaccacacaaagcaactcaacgccaatcttatcatcctctccattatcactctcaggtacatcttgaacaatgacgcgcatgtagtcagctagagcggtggcgattgtaccgatggcttgaagctcaacgaggttaggtttttcgtctaacgggagaaccggagctaagaaggatctgagaatagtcttgttcgggtggggatttttagtgacattagggttctcttgtcgtatcgctgagagaaaataaaagctgcggcggattcggagaccagttccaaatccgccgtgatagatcgttgtacgacggaggatggaggtgagagcggcggcggaagaaaatgtctgcataggtaaaatctagaaggttctaagaaatggcttgtcttccaagatattagtgttgacattgattacagagagagagggagagagatcttcgcattaaatttgtaattgctgaatatatgatgtttactcttgcgctgggcaaaatattcgttagatccgatttgatccgttattcggttgaattcgattcgaaaaatctggatgtccgtcgttttacaaggcaaatcaaacactgaaaaataatatcttcttgctttgttttaaatgttgatttaagggaatgttttgtgtttatcaaaaaaaaaaaggggaatgttttgattggtggagtgttgctttgagaaagaatgaaagaataataagcagagggagtcaaagcctcaaaggattcggaatagtttgacttaagtttttacacagtaacagaccagaacaaaccggttgacactcttaaaaaataaaataagaaaagtagtagtagtacacttgtattgctatctttacgcggtattgaatattcaacaaagaatttagctaaatacatttcgttatcatcaactcagtgtgaggtctttcttcatttggtttcaagagaaagtttttttcctttttctaatttacgttttgagatgggttggtggaggaagaagaagaagcctaaatccgagatagcttccgaaagaggagcgaagctgttaaaagatctgatcgaatgctgcgatggcaaatccaatcccatcaaattcttttctgctgatgagatccgcaaagccaccaacaatttcggcgtgtctaatcttgtttccgaattatctcatgattttgactacaaatggtattcaggcaagaacgagaaccatgacatgatacttgtcaggaaagctttttcccagtccgtctactacaaagatacatttttccgcgacatagcagtttcatcaatggtgagtggtcacaaaaacttcctgaaattgattggatattgtcttgagtttgaagagccagtcatggtttatcatggtgtcaagaaacattatcatttagaatcaagtgaacagccgtggaaaaggagaatgaagatagcagaggatatcgctactgctttagcttaccttcacaccgccttcccaaggcccttcgtatataggtgtttgtctcttacgaatatattattggatgaagatggtgtcgcgaagctgatggatttctctttctgcgtctcaataccagaaggagaaacatttgtccaggttgactatatagcgggaacagttgattacttgaagcctaattacttgaagcatggtgtagtctcagaggaaacggatgtctttgccgttggacattccatgcaaatgcttctaatgggggaaaaaatatttgataggattatgagaagaccatttcctacatcaaaatttatggaagagccaaaaatggatgagattgcagatccagaaatgggcgaaatttcagaagaagagctttgtcaaatgaaagctttcctattgctctcactgagatgcaccggtcatgttggggaagttccaactatggtggaagtggctaaagaactaaagagtattcaaagatgtcttcacaatgacactttttctccttcagttgaaacccaattcgactctcatcaagacatttcttcctcggtaatcctctcaaaccaaactaaagacactagggcattgctaagatgtattgcctgccacgtatttgacgaaatgtttcaatgggttatgatgaattggtttcgttttttcagaagaaatcgaagaatatgctgaaaataacttcggttcttgtttttttattcagacattatcaatcgcaaagctttagtttctttacctttgtcagatcttgttgggaaaaatgaccaaagagattaagatggcaccgagacaactagaaaggcaagcatatataagtatttttgtgtatttgtgaagagaacagaacaagagtagttaactttgtaactcttttattgcttacttcagatgattacaaatgccaagcacttctaacaaatgtacacaaaacttctatttctttttatgtgacttttgcctatcaaagcttgattcattttctttctttctaaacctaaatcgaatcaatctttgaacggttgtgcaaaggatagacaattaataattcgaatagcgttgtaatcttcaattgtataatggtcttcctcttctttcttcattcatgtaatcgctttgttctccttttggaactactcattttagtcctcttcattgcctccctccatagtgaactgattgtttgattatattttaaataatatattctagttagatttataaactgtctaaacacgaagaaaaatagttgtataccttttttttttgtgtcaaactaaaaaatagttgtattacctttattcaagatttccaaaacatccgaacgaaaaacaaaaagattttatccaaagcctgaggtgactcacggccatgtaacatatgtggtttactctaattaacaaatggatcaaatggggttttatacgttaaaggctaatcaaaattaaaatatgaaccgtcaaaaatggctagctaccacataacttgtcaacatcgcgcggacaaatgattattacaaagaaaacgatttttaaaaagtgaaacgatcgctttcaggtcgccgcttttagattcagaatttcataaataagtaggctatagattaaataagagattaacaagccttctttttcattatggtgggtggtttaagtcaaacttcacgaaatgtttgctttgtcttacttttcattaataattggatgactttatcctttttctaagttttaacactaaagaatgtgtatatttggattgaagttccagatttcttaaagtcattcggaatcaaagatgtactttggaaaactttgttttttttttttaataccaacgaagcctgtaatgatttaccattttggtcttttagagagtttcggaaaaactagaaggatacttttttttcctgagatgttcatgatgcttaacatttaaataaaatcaaaatcttttgaaagtgttactttctatgatttgattaatgtcaccaatttttttttgtaaattaagaatcaataacaccctcttagtattattatcatggctttggatttcattccagttttagtttttttgggtatgtttagcttccttttttccaaactaaatttctaaaaaatatgttttttcggatttttttttgattatttgtttaaccgtcggttatgtttttcagtatagcttacgataacaatatcccacatcggaaattaggaaaagatcatgatagtatataagatatatgtcatcatttactcattgccaagtggttttgtttgaatgagataatatatctcattcattcattgtcaattagttttaagttaaaaaacttatattttaatatagtatcaaaatgcttgatccatacattttccagctcggttcgtattcgatatgatccgaatttggtctattgatccttgcttaatatatcgagagcagtggctaaaaaatcatcatctctacaaagcgtattatcatcgtcatcttgccacactgttagcaatatatattcatcctctcattttcacatccatttgataaagataatttgaattatttatatgccccctacatagcgaggattacaaagaaggaataaaactgaaagtgaaaaatgggatgcgactttaatagagtttcatggtcaccactacccataccagttggtccacgtcagacgtatacaaaggcatacgatacgattgcttgtgctttcagattgagacaccaaagatcaccgattcaccatcatctgatctgatgatatgcttttttcccatcttctgagtctttctttttttcttctaaatttcacaatatacatatattaatttcaataccattaccatcaataattttatagctacaactaaataacctacaatatacagaaaatataaaaaccatttctaattttaaaatgggttttgtgtaaaaaagactttaattattgcaactttatttacatcttaaaaaaatatagattaatcatacaaaatcaacaataatatataatataattttttttgctaccgtcaaatttataaaatttgaacaaataatatgtcaaattgaagtcctcacgattaagaatacaaatttagttttagaattttaaaattttaatgtatgtaattgtgaaattgtaggattaatctaccaaaaataattatatatataaaaaatatgatcaaaaatggtaaactttaacaaaaaaaataaaaaatgacaaatctggacaaaaattagtttatgcagtatataatattatttttgtagcaaaaacatgtctttgttttcttggttgtctcgatcaaaaacatgtcttgagagcatatatgaatactaatatagtattaaactataggatgatggggtcattgacgtggtgactagttgacattattatcaccgtaagatctgattgtgctatataatccctaatctgacgctccatttatttattcctccattaccattattagatctctctgtctctttctttctgtcaaaaatattatcttctttgcaccaacttcaacgcattacgaagcagaagacagaacccaaaaaccgacaaagttcccctattctctcggtataacctcatctttatcttctttctccgccattttctcttttctttgtataaatgtctttacccattttggattagattttccccctccaagtaaatgaatcatctgcttcttcaggtctccattgattctcctactctgttttcctcctatatttgtatttgatgttttgtttttttctttggaaccaaacaagtcataaagtttcgatctttgagatcttgcccaattcttggaactagtgtttggttttcttgataatatttctgtgagagaattcttcaattttcagattttcttgataatgttttgctcttttaggaaataatttatagccattcagatttattctcttgtttctttgtggtatatggtgcttgtaattttgcaaaatttggagcaccctatctttttgtttgatgttgatcttattggttcttgacttctttcaaagagttgacttatctgtaaaaaaatattttgcagaaaattcattacttctaaagatggatgttgtaggtggctgatgactcttcttccctagcatgacctttattggtaacatcttctttactcaaaaaagaaacattccttttggaagaatcttgttgttgttgttgttgactaatcttttttatcatgttcttggcagatacagagatgtgtatgagaagaaacaacatcaatttaacaacagtcatagattctaacgaagccattggtatggaacatgaattagattctgctagacatcaatattcttcagtgctcactgcaattccattcttctccgctacattgtttattcctctctctttgaaaatcactatacgtgacgggtttcacgaaagtctttaataacatttccatacacaaaacacaaatagtttagagatttgttcttagggagatttagctatctctctgttcaaaagattggtctaaagatgcaagcttttgctttaagtgggaagaaaaggattgtgaatcacggcatgtgtttttccaaaggaaatcttgatctcggttcacgcttgtctgagaattttatggatgatcctttgatcccgggattgcctgatgatgtcgctaagcagtgtctagcgcttgttccgcgtgctaggttcccatccatgggaagtgtatgcaagaaatggaggtttgttgtccagagcaaagagtttattactgtgagaagactcgctggtatgcttgaggagtggctttatgtcttaacgatgaatgctggtgggaaagataaccgatgggaggtgatggactgtttgggacagaagctatcatctcttccaccgatgcctggtcctgcaaaaacagggtttaaggttgttgtggttgatgggaaacttcttgtcattgctggttgttgtatgatcaacggttcgcttgttgcatctgctgatgtttatcagtatgatacatgcctcaatagctggagtagactagcagacctggaggtagctcggtatgatttcgcttgtgctgaggtgaacgggcatgtttatgttgtgggaggtcatggggtagatggtgagagtctgtcaagtgcagaggtgtatgatcctgagacgtgtacatggactttcatagagtctttaaggcgtccgaggtggggttgtttcgctagcgccttcaacgggaagctatatgtgatgggtgggagatccaacttcactattggaaactcaaaacttcttgatgtgtacaacactcaatgtggctcctggcatggtagcaaaaacggtttaacggtaagtctttttgagtcttttgctcattgagtattattccttagctcggttttcgagtatagcgattgtttttaagattcaactttttgatatgttcacttgcagatggtcacagctcatgttgaagtagggaaaaagctgttctgtatcgactggaagaaccaccggaagatgtcggtgttcaatgcggaagacgaaacctgggaagtggtggctcttccgctatcaggaagctcgagggccgggtttcagtttggtaagctgagtgggaagcttttgctattctcgtctcaggaagaaaccggtcaatgtactttactgtatgacccggatgcttcaccaggcacacagtggaaaacgtctgagatcaaactctctggttcttgcgtatgcagtgtcacaatcacagcctgattgataccattgtgttgtttacatttctttttatgatccaaatccaaagagagcattgtcgtctcttttaagttgatgataacactgatttaataaagtggagagtgttttgtttgaaactgttgtagtgttgttgtgaatttctcctctgtttgtttcttgtaacatatgattgattacgttttgatttattttggaatttgtgtaaaggcaaagctggttggtatttacaatggcttacattgagaagttacagagacttttattaatccagttttgaaattacaacatttttggaaacactctcttaaaatgcaaaaccaagaatgaggattctaaacttcgaagtagaaaacatatatttagttatagagtaaaaagaaaaacacatcattggtttcagctatggttatcactcactcatgtgagcaaaaagagtaccataagattccattgaggtctttaccaacctctcatgcgttcccttctcagcaataacaccgttttgcacaaccgcaatggtcctgagccgatgagtctataatttcattagaggctcatcggctcagcactatcacggttttgcaaaacagcgttattgcaaagaagggaacgatgaaaggttggtaaagaccttgaagaaaatatcatgctactctttctgctcacatgagtgagtgagaatgatagttgtaacggacgttgtgttttaacttcttccagtttagctagatcttttttctactatacaagcttggaaaacctcaaagaaccaacgttaatttcaattacttaaacatcaaccgagaagttgatgcaactgagaagaacaaacgctaattgcagacctcttataaaggcaaacatgaatcctccaaagaaagttgctgttacttgtatgaatatcccaacctgtgcatcaaaaccatcacactctcagtattttgtgtcagcaatgaatgtaaaataatcgattaattagtattcctctgttgtaattacattttttaagttattcggtgtaattcacgaacaatgttttgtaaaagaacttacatcaataaagacaataattaaaagcaatcgaagaatctaacctttaaaacttctttaaccatgttttctggatctgtggtgcttaaagcgtctatcgagtcaccacaattcagtatcatcatcaacaggtgagtgagtccgtttgcaaccgcagcgatactgcttagtagtagtatcataagaaaaaatctcccattgcttgcaaaataaaacattttattctccataattttctcctctcaagaaattgaaagttctgaaaaataaaacatttcgagtgtgtgtatttgagtattgacaaacgttatgagtctctcctttaataaggatgttgtatatatagtactagtaaagttaaaaaaaaacatttactaggtggtggttggctcatgcataatgtattaatgtaataccagcatgtatatatctcttctgttcaagtggttgttaggtcaacaatgggttaaaagcatgaataagaataattccaaactcttttgaccaaataaaagagaaagaaaatgaaatttccaactcacttttgcatgagataaagaaaaaaaaaaaaaacaatggattttaaagttattaaaaagacacagctactctcaaccaatgaattaccaaaatgttggttcttagatatattataattttagatgttgattgattatagtttacgaattatataactatagtagttcaacgaggcaagtcatgaatctctttcctattgaagtggtttgagtggtttattttggaatatgttaaaaggcaattagcatttgctgttttagtcagatatcagtcaagaccacgagaataagggatgtgcagagaagctagagcttccggtatatcttttccaacaatttatcgtaatttgggcttaacgtaacaaaatctggggcatatacctcgaccaaagttaactctgtaacactataatataaccaccatgagaaaataataaaaccctacatcaaaactgatcttctaactcaaatgtgttggtaatttaaagtttcgttcccgaagaggttctaatctaaaaaataggataatcttctgacataattaacaaggtaagcgcagaccagccggtgaagagacgcgtgcctttgcctgttcccttaacttgatcatattgttcccagatgtaccccgtctcgtaatagtttctaaccacgttcctgtatttttatgacatgtttcaagttaatatcaaaccagacctctctatcgcagataccatataataatataccttatcaaattgctccttagttccgtgtaaattgctttcgacttttctctatacggtccatccactgcaggaattttgacacatggtaaaccgaatgcatatgatagtaagaaaacgtagaggtcttgtagtatgatgtggcgcttttgaccaagtggagggtagaaaattacctatagagtaatggtaaagagaagaaagaatcatgtagttcatgttcatccatataggacctctccagtatggtgcatcatgctcagtgttacgtttcatatacatagaactgcatcaaaacaatgttctttcttatcattgaagaagataatttcgactatgtatgctccttcttgtgggcttacctggttttggcaagcgaaactagtccatagtcactccataagatgctcctatttgaaatgagatcgagctgtttctcgagaattggagaatcctttctcaaccaaaaatatgtgacgatttagattttaaaaaacaactgatccatgagggcttcaaagatcacgaatagtggaaaacatattggccaaaaactcacaggtgggatgattctagacatgaagggaaagaagctgacgtaacccaagtgaggaaccaattttagctttggcttcccaaaagtcttccttacaagttgtcgagataattgaccattttcttgaattacctctttccatatcaacttaacctggggatcaattcaccgaacatttgggttaatgaaaagaccaagaatcatccgttcttcttcttctatatgacaaaaatttgacactcagacttgttgatttatgaagcttctcttactttttctgtatgattgccaaagtcaaagtaagccccatagtcactatcatagtgcatctgctcagaaattatccatgaatgagaatagagaatggtgagaagaaaaagaaaattaatgaagttaaagtgagaaaattgttggcatctgatagagaataaacctgattcagaagattgaaatttgaaagcagcttgacagttgaattgtaattctcctgcaggattttttttttttacgtcagtaacatgtgaaaaaaaaaaaaaaaaaaaagacgcccctttcttttccatcttgtgctaacctttgaaagtttgtcttcttttcctaaaagctctgtgatggaatgcatgcaatctgcagcaaggtacatccagcatctaagatcaacatgtcgctcatcttcactagggtgcgaagcccggggataatcatccagccccgacgaaagcgtctgcaagaaatttaagatatcaaattcatctctgaggatctgtcaattgatctaccatatccgcaaataaacagctgacacagtagcaatcctactaaaaatggtcgctcacacacccaataaattttgagacattttgtcgctaacaagaatatactgcagcaaaaattcatcaatcaatggtatcatatattgatatagagcatacggaagcagctaaagtcagagaaaaccttaaaactcgacacagtctatgtgagggttaaaaatagagccttcagtttatgagaaacaaagaaatagtaccttagggttaagttcttgagttgttgtgttgtctctgccatgccaaaagtagcttccgatctccttgcctagagtttaatcaattcattaattactaaacatatgaactagcccactccaaccatattaagcctataaaaatatcagttctatataaaaactcatcacatctacggatcgtgattaacaacaagaaatccaattgtgattggtaagcaatagtcacttaagatattactactaactctaaaacacatagcagttgaagactgaaaggattctataaatctatacactagaggacatccatgttgttacctttctgggaagtattaaaccactgaaaccaagcatctaagcgtacagaagctcgctcaaggaatgacaatacttcatccttttctgatgcgacaaacttttccatccttatagcatcaatcagatctgaaaaaaagagattgtcactatatggagctgaattaattgtaagcctttatctatatttacaaggataggtcacattttcaatccacaaaattagtaggaagccgaaagcactcttatgatcttggctacaaagttctaaacatctaattgtagtaggaacagaaatatcggtacaacaaacggaaggaagctgataacgatattgctgattccctcttctataataaatgctggtcaaggattggtagtaaaataaactaatttttatgacacaaaggcatacatgaaacaaagagagcaatgacaaacgaaaaagtaagtagagataaaagaacaacagattcttaccacgtatcaccaaaaacagagttggtggattgccattactcgggtattgaactacgaattcctctggaaccttactgcaggtagagaaacactataaaacaattacaacaataaccatgactaccacggttagtgagagagagtaaatacctcaaagcttcagcacccaaaatttgctcacgtggaatccatccatctatgttcaataggtctaaccagtgtccaacgatatccaaggttatacgaatatcccaccgcctgatcaaagcacacacaacaaattccaaagtatgatcaactagtaggaggaatatagcttgtaattttgtaataataattggtcaaacaaaagtggcaatagcatagcaaagaaatcttcaacagacaaatgattaataagaacgaaccagatcaacaattgatggaaaccttcgtcccacaaaaaccccctaggaaaaaaaggtcggcttggaacagctgtgtacagctcggctggccaatacagcaagaaattatcccgacttccaggctgcaatagaaggtatcaattgtgtggttctgtgagaggtccaagctagtttgcagatgggaggaacataaataggatgaaaaaataatacataagatgctggatggaaataaactcgcctgagtgcttttaggaacataaatttttgattggccatagaagtaaccaatgcccccaagcatgtttgcaattgcagtccttccaacccccaatgtttctgaatcatgctggaaccagaggaaactgagattgagaccctcaatcttttatgaacatcgatttgaatagatgcaaagtattaactatatgtacgttatgacaactaggagctgacaacatatgtacgccattgagaaacagaatagcacataagcagagagagactaatcctagtggaaggagattctgagaggtgaagaatgaaactgctgaagtcaatacagcaagtgctcagcaatcgctgttctcgacttcacatccagacaaagttgttaacagtgattttttcacaacaacatgaagatccatgaaacaagacctctgggtgagctaaagaatatttattagcatgggtaacatgtgtagcataccttttcagaaagcttgaagcattcattaaactttgcatcaaattcttgatgtttctttttaagtagatcagagagtggcaaacctacacgacatatacatgaaacttagtacaaatgcaataaaagtagacaacatcaatgatatagtgccatcagagaacatttcttaaatggacgctccactgaatcataacagatacacataattagtattcttagcgaagctacagaataataagctactgcttttcctcaggttggagggacacttaagaaacacaaaaatacacacagaacccaaacataaatttcagactagcattctttatctgagttatgaaactcaaaaggataatgttgccgtaaaaaactcataaacggaggagaagttcttccatactcaaactcaaatggaagtcacatccacaaactaaggttaagaaaatcaaaacacatcactaatgatgcttgataataacaggaggttaactatacctgtgagacttgttaaacgcttttccacatttgaactttctcctttgatcccggagatgaagggaatatcaatcgtaaatggtagcctcccagaaatctgtatgttgccattggacatggtgaaacatattgatcacagattccataggagttaagaaaattctatatatttttacaaaaatacacatgcatacatctttattaagactgattacctgaaagatgtaaatgttagaagaatcctctgatgtgtcagagagctgaagtcgtccaaacttccttgcctgaaaacatacaagcaaagagaactgtaagcattgcggtctttaaaaaaatatactttggaccctttcaaaatgagttatgagctcgaaaactagcagacctgcagagcaagattttgctgaactagatcagacaaattatatatgtgaggcgtcttgaaaccggaataatgtgtctcgagctgattctgcaaatgaagaacaatcaaaatggttatatccagatgagcatcagcggatgacatccgaaacatgacagaaaatgtcaaaccacccgcagatccacttccagcagagacagctacaaaagtcctaagaattctacagagcaatttcaatcacaaattacctgtgattttaagtgtatctgccagtctcctacatcttcacgtgaccccgaaaccaggagagagctcccttggaaatctaaaccatcttggcctaaatttaaaacattgccaccttcatcagctaaataaaagaagagatgtgcacttctcttcacatcatcattcaacctagtttagttccaccatggtcaaataaaaaacccattgtcatgccacagtgtaaaatgaatttctatcaataagccaaaataacaaaaagccgacactgtgaagaaaagtatattacagtacgaatgcatattagcaattaccctttattttttacatcaatccgaactgcccaatccccaccataaccaaggccgtctcccttggacttcacaaaactcgtctctattaccatatcgttttcaaccagctcttgccgaccataatcccgtccattatgttctctccagccaaatgtacttaaatcatcagagttttcacagaaatgccgcataacatacatctcatctttgacaccaagccacatcaagccagctaccaaggacaatggagttctgcattgccatatacaacttctttacttgtacaaagaatatcccagagtagagattcattcacagtggaatttgcatacctagctcgaactccaaaataaacatgaggacgataagttccccagtataagctctctttgtgctcgccctgaaactggtacacatatacaaaaaacgaatctttccaattcatgactttgatgatttaaaaaaacgagtagtgaatataatattagtgtaccattgacaaatccatgactttcggagcaggaaaaggagtgataaccctaggcttctgggactcatcaaacaacaacccgtgacgaactagccgattgattacgaagtagattactataatccctaatatgattaacccaaccaatatcttgagattcgtcttgaaagcaccgatcgatacaagttccttgcctttgccgcggcggatactcggaggataagcgcttccttcatcggagccgggagataatgatgatgatttgattcgaccacgcgcgctccgacggctagctccggtcatggtcgggtaaaatataatcgaaatgatgatgaatgtgtgtagttggttttgtgattggcgatgatcagtgaagctgggaagtgaggaaggtagagaagagttgactttgaccaatcgtgtttgctctctaattttgttttcttttcctaaaataaccgagacgaaccgaaccaaaccgaaaccgaaaccgaaacctaggaattgaattaatcacttgagaatgcaagagcacttgaatactatttgccaaaattatagaaactactaactagagaagggtttgggggaaaactctttattatgtgttattgatctcaataacattgatacaatatatatatatagagcctaagaatatgtttattacgggaagaaattcaaattgtgtatgaccaaatctgttttactttttgtacactcatatccatgaccatttatatgtttgatataactctgccagtttccatgtagttgctttatcatatatggatacgaagattatatccaaacacagggctatgcactttacgattttgcgggagcgtgctattgaagaggtgaggttttttccttattcagttttcttaagcattctataagttttgcctacattgaagggattatcacccattttgtgtgaaacagttggttgtgctcgaaagtcttaaaaagagagagattgaagcattgcaccatctcaccaccacccaaaagactcgtaggcgtttttgtttcttctgttaattttttttgttatgttgtttttgtttctttatctatctatctatctttctcgtgaacttggtatgctatacaaaattataattattttttccaagattgcttatacacaacacaacacaaaggagttgaacagaatgatgagtgacagtactgtactcgtgggtgctactactatctatacacatattcacacgtccttgaaaaaaatgctctttgatcacaaccatataaacctactagttcgctcaaaatcctgcaaatacaaaaattcacatcgttacttaacaggataggatggtttagattagtttgagtggaaatacgtatgggatagagttagattactggttttttttttttttttttgagttttcgtcaaggttagaaccactcagccatgcatttagggtaaagctcactctcagtagcaatggaggagaggccacgaagctctttctgaactttccgtctctcgtaaaagactgagcacgcaagggaattgcatttcactccgctttgcaccacccagtctcccccaccacagtgtctgcatatctgcaaataagataatataaagaaaaatcaattaatggaccaacaaagttggaactgaatgcatctacagagattcaccaaggtcacaacttaagcacacatggaaagaggtctacactcgttcttgttataaaatagcaaacatttctgaaagataatctgaaactaataagtctccactttttagcataaattgttttgcgactaccatgagatgaaactgtctctttgaattcaaagtgtgtgcaagattaaatgcaaatgctcacatcagaaagtgtacaagtttctatgaagcacacgatctcttggaaagtaaagacagtaagatgatggttgtaaacgttaccaagttctgtaacagttcataaacgttagattttggagtacttaccgtggctaggtgttgcatctctctctccaactttgaagtcttccaaacaatggttgcagcagcagcacttttattttgaaggcaccggttgcatagttgagcagattcttgaacaacttccccacacaagatgcaatgtttcgatagataaaaataatcaatccttgttttgtgtgagtttttagagtttaagggacgttgaccaagggagcttctggtgagacggggcatctccaaaaaccactggtttaagtctgcacccacgagtccaaataccctttgcaaagctggtataatttgtttgttgatgtagtataagtcattcagtcggtagggtgtatcgacgtccaaaagaaccagtggatcaacaaccatatcaacaagtcgagctcctggctccccatgaatcacaacataaggcactcgttcagcatagcgtggctctgtccgagggtctgctttcattgatttggttgccacaatagctgctggaggaaggagtgaagagtctcttgtgctgtaagtacccaaccgaacttcttttgcaaagataaaatcttgaagagacactctccctgatagtatccgcttccactgtctatacaagtacgacttaacctgcacaatgaatagagaaaagcagatgtacgacactgcagtttcagctgataattcgaaagagtgcaagaaatcaaatttgtaccttagagatgttcttctgttcaaaaaagagtctcaacgattgctccatagttttcgcaacagcttcacaagtgtctcttcgaacagtttcaataccttttgcatcaaatataggctctctctgattgggactttcataactgtacccaacataacgcttcttcgtaagaaggaaacaagggtgatagactttctccatctttaaagtgactgggtgtgggttcatttcagttattgcagatgcaatctcttgtccgactacaaaagcttcttttacagttcgtccttttaggaggacaaacatactacagaagtaattaaaatgcatgaggccacgaggaagaagtaaataaagaaactgtgatacatacttgtcaaggctgctgaaatgaccataataaacactcggaagtaatacgaatatatattaacttatgcaagcatgaaaccctggctatactttatattgtaggaagttaaaatagtgccatgaaagatggtggttaatgtttacctatcagtgtcaccatatacaactctagcgttccaattatcattggcattgacgaatgaaatagccttctcaagtgtgctacgaccacactggacaatactatctgccagctctgcacaaggcattcgaccactgaagccagcagcagtataaccataagtcacatttgctatcagctttaaagcaagctgcctcgcattaaatatctgaaagaagacactgtataccatcaaaattgcaaattttatcttcaaaccaaaaatttggactctgatcaagataaccatacccggtgaagaactgcttctgaaggagtcaactttttcattgcttttttcaccattattcttgtagacagaatctcctctagcagcctaggtaaaattcctctacgcacctatagaaagaagagaaggtgactactatgcttaagctaaataagaaaagaactcatcgatgcagaaaacaatgatgctttcgggaaataagatcattgtttgcattgattatgatgactttaaatacaagatttaatttgctcaagaaaaacaatgcacattacctctggtggcacgtacatcacactgtttggggtctgtaggatctgatttaaatcctgaagaacatcgaggtctagagagtatgagctgaccccaagggtgttcatcttcaaatgtgcaagttttccgagacatgtagaaaagcacagattatatgctataatcattgaagggtaaagagattgaaaatccaacacaataacaggatcatcgtaaaaggcagattctggttccatcacaagaggtacacattccatagctggctgagaggcaacctacatgatcacatgatttagttaggagaatactaatgagtaagaagggcgtgaaaagattatgaaagctatcatgaagacaaaacaaggcatgaccagtccattgaataaggccagacgactggttataatccaagaaacgttaaaagtaaatcacttggaagtagcagataaaacgaacctgttggtttcctggagaaatagcaagataattttgtgtatgtgctaatctcagaagcatggattccactctgtactgtgaacctcgggagagaactgagaaaaagtctataccaaaaacacgagcaagttctgacgtacgatttatctgcaaacaatgatttagtgggatcaacaacttgcagataattcactatataaatcaagttctaaatgttacataccatgtcaagttggctcattatctcaaggttcaaatttgctcgccgaatcacatattctatgcatctatatcttgcacccgcaggaccacttgaaaaccattctgtcaataccttataggggattgatggaaccttctgcctcaaaacagcctctgacacagcttcaatcgtgtacatgttgagtttaacttccccgcgaatcaaacgccatgcattgagaacaattctacctccaacatgaacaccactagcatgtgtgcggccccactcgtcctcaattaccacttcttctacttgagcaggattagctaccaacggatctggcagcagattattaccaagttttctcttattatctgaattgtttgttgtggtcggagatggcgtcctagatatattattgagaaatcttataccaagctgtgcagctctttcagctagaaaaccaatggatccgccctgtatatcccagcccagaagaacatctggatcccatttacataaagtctcaataaaatatctgaatagttgcctctcttcaaggaatacagacaacttgcatccagataggccatcaacatttctgtagtgagacaacaataaaagcatgaatacgtcaggcgcaagatttctaagaaaccaaaaaaaagtaaatctggtatattacctctgatcaatgctatctggactaaataaaagcacaaatacttcagctacaaaactatcgtcattctgcacgacgagagctataacattgacagaatcaaatcgtggatcaggtcgcaggtcccctctagactctgcatgaacctataagtttatagatattaacatgtatcaatgaaccttttcgcagaagacatcatcttaaattaagaaagttcatttgtactacagagggccgtttggtaacagcattaacaaaatataatatactaagacgagcttgtaaaggtcaaaactcattttaacgagctgcacgttttgacttcctaagtccactgtttgtaaaccattccaagtgtccattactaatctatacgtgcaaaggccatttgaggactcttagtaattgaagctgtagcttcacaaagacgagggttaagttaaagcacctctatactcagaattgtaagctgttgccccgcacccatgctcgcaggatctcggaatcccatttgacttaagggagtgggcccagatttcccatcagggcctgaaatctgagacagctcttgggaaacactggcctgcaagttaagattaagaaacgttcctttgggtttcagatctatctccgactctgtataagcatttgattctgaattcacaaaaaggttattatgctgctccacgtgctcagacacagacaccacattagatgcagaagcaagatcagtgaaacttgctccacgatcattatgattatctcgtaatggttgtttttctgaatcaatattagagtctcctggacgtggaaaaattcaaaagtttaaaacaaaagttatcattttcacttacttttaatgaaatgaatatcttaatcagggacagtaccattttcgtaagggaaaacgctttaagcatgtatattgaaactttgagaatatgttaaattgaattaaattaggcagtccagtgacttccgactaactctacacaatacctttgtcattcgatatccattgtaaaacagaatccacagaagggggtgaaaaggcaggggtcagtaggtaaagattggagccgtcattgagatgatgcaagggaataccaagggaagttccttggaaaaagtgtttcttttcctccttgttgtcctccaagggaaaaaacgggatgtcgttggaatttccctcttccaagagaacaaaaaacaaacaggatgtcagaagtatctcaggtcgaagtaaaaataaataaagagcacagccagagagaagttctgcaagaacttaagttgacctaacttcagttttataaatttatatttcaaccgcatttgcattaactgtagaagtggcagaaactagaaccagaacaagatgagtaaaggtaccatattcatcatgctgtttttccctggcatgaatttcatgagaatgtgcagaatcctgcagtccagcacttaggcaatcgagagaaggaggcttcttgcttaaggttaggcatattaatcttcccgtctcatcagtttcattggcagttgactcttgctccctccccgatttttggacactatctatttcaatcccaacatgtatattgctagacactagtgttcctgattccacagtttgtggatccttaccaaatggaacagtggtagatgacaaattccttaaaacttcatcactgttttgacttgctgtctctttagctgaacatctatcaacagaatgaagttcagatgactcagtggatatattacactcgcaatttccagaatctataggagataaatttggagtatcgccacaaacaaattcgctaaattctgcagaaagagcaggaccttgttttttggcctcacatctcaaggtgcactcatttttttccccgtgtcgggaatctctaaccttcctagacttcatatgctgtgaaacaggcgattctccatggcataaccgtttttttctcatcaagtcccgcagagaacatccagccaaaacgtttctgtcaattgtattacaaacatctgcttgatgttctttgactggaacaatataattgtctgtcatctcattcatggggtaagaactaatctttgttaaaccaagtttatcactagcatttgtactgtcaaagtccttctgaagatttttggtcagtgtaaaaggtaaaggtccccatactgagttgctaggcttgttgctcttagagaagctcctgttcttatactccattacttcactcgtatgtaaatcactctttctgtatctccggaatgaattttcgcttgctccatttgaagtggagctatctggaacatcactagcgacttctatttcaagagattgtttgtcggatgaagttctaagattctggctatcaggattactaggtaaagctctcttagtcgaactcccaaagtctggaagattttcctgagaatcaagaatgtcttgacattccttttgggattggctcacataatctgtactagccatttcaagaaccttgttaatagacgctaaaggcaaaagaggactaaggatagtttcccggagaatctcatcatctgagtttatgtcctctgcagcctgagatgaggcaaaccacttaaagagacccaaggcttcagcatcttgtatttgagcaggtgtatctctgtccgtgggtgttttcatatattcatcattttccattgatgcttcttcactcttctcgccaagtggagaaagctgttctgatgcaggaaactcactgcatgtaccaaccatatgattcaaagcctgtagatcagtaatttcaggtttggcatgcatatctggaccagctgaagatactgcagtaggcttcataccaggcggagacaattcaactttgtttagcatttctttaagcatattcccaaacccaacataatctgacatagtctgcaacacatcagctgcagagggtttaccaggatcaggaggtataggtgcatcatgcacaccagtcctttcatactcctcctgaacaaaagtgacgaggttaggcaaggtaataccaactaaataatttcaaagtagaaccaagaaagtagaatgaacctcccaaattgccacaagcgactgaaccatgttagtatcagactgggcttgtgaaagggagttgtacattttaaactgttgattgagaatatctacaagagaagaggctagttcaaacgtccggtcatacatgaaacacaaacaattaaatttcgaatcaggaaaattaccactactagtagcatctccctcaagttcacagagactctgacgtctgtaatggtgttggtgcctatgctggctctggctcaacggtgtatcagattcttcagagagattccacatccactgacctgggattgttgacaagctccaaacaggaaaactgacgcttgcagcagcacttgaatttgcctgctacattgtttcagtattgtgatataaaagaagataaaactaccacacaatataacgcaaagcatcaagtatttgaagatctacctttgtaatagccacttcgtcaatcctttgtcccggacaatcatccaaatcaaatctccttggccggaaatggtgaggcactgggctacggaacttcatctttgatatatgcacatgacccattccatacaaattataatcaacctatagaagaaaatcacagaaacttcagtattgaaatgcagacaaactgtcgtggaattacagggagggggacacttagtatctaaggtttggttggaagggttcaagagcaaatatataagtgaaaagtagctgaaaactgacaagtaaggaaggcttcagggcaccaaaagactattctcaaattattatatatagttgtggttggatcagcattacttattaacatgaatatgtgcatgactatcccatagaaaaagtatccccccagctccgtttttcattttaattacattttgatggtacataatccgtagcaattttgacagaataactttcatatctgaaattgctaagtttgacaaaatcctagtcactaaacgatttctttggaatacataacaacgaaaaattaccagaaactggagaataaagggaatatgagactcgtaaggctgcaaacttttaccaagaacagcacctgcctagagaggaaaataaaaagagttatcagcatactattttcaccaaaattatatgcatcatacataaagtacagaataatggcggagtggaatcatcaagatatcgtaccagaagaagactggcagcacgagccacatcgggtggatggtagctactatactgttaaggtgattaaataataaactgctcaagaaaatggtattgctcgaaaattaaatatacaggatacagataaatcttcacaaaagcctcctctgttgagtggtacccataaaacttctttgctcttacaatctcacaatcatggatatgttgcctttttgaagcagcatttcccttaagctacaagcccaaatcaagtatcaatattgattgtaacacatctatgggaacacgcagaaaccacaaaaaaaaaaaaaaaaaaaaaaaaaaaaagccagatacataaacgcagctcattgtcaagagtcaagactaaaaaaccatggctcacttggtataaaatacacacctttagagccttctctaactcaagggataaagcaagtgtacttccatccactgaagcaaaaaaaaaggaaaattgtcattggtgcttgactagctaactctagtatatttctcagtagacttataaatgggttacgaattcatacctcctttatgatgctcaagtggaatttctgagcacggaatatagagatatggtaaagcctataagagaaacaaagtttccaatcttagcaacaagcaaacaaacttttttttcttaaaacaagatagtaaaattaaaactcttacacgatgaatgtgcaagcaagtcttctgaccagcaggtgtagagccgtatatccttataacagggacttcatttacctcactaccttaaattcccagcaacaaatcaaatagtaacaagtcaaaaacttgccctttaacatctaacgaaactggagcattactctagtcaaaatttctgaagtcaaccattggattcaaaaaggcgtaagctttagaaagtataaagagagaattttgccttaccttggaagctactgtagcaaatattataaccagggattggagaagccatgtaataatcgattgaaactatccgtaaactgaaaacattggaaccggattgagaatcagccatggctgtttcgccgtgactttgaccggaaccacgaattatgatttggcgccagtacccgcagaatctgaaaccaaaaaatcaaaccggatcattccgttttaaatcttctaaccaaacggttatagttcggttcattttgtttaagacgtggttaccttcagtgaatcgctctctcttgcttgtagtttcttctactctacctaaccgcgacgccgcctgagttatcccagctacttaaccgttctccgacaaaggttgccggtgtaaaatgtcaaaaagcagaaaagcaacaaacatttaattagtgggcctgataaatataatgggccaatctaaattttaattatccattatgcttttttgaaaatttaccccaagttaaatattctgtgacccgtttaaatctaaaaacccaaatccacatttgcataaactctatgaaaagcgaaatttcaaatggatggttcttggaagatattagatcttgtatgtgtatcttcaactgaaggacaagacaagtgcccgttaactaggagttgtcttttaacagatgagaaaaagacagcaaaataaaagacaaagccatttaaagcctaaagtataactcatttgattcaattttcataacaaataattattcaataaaaacaaatcgaccactagtcccagacgtgggagtgacgtaacgacctcgtgtaagaactatcggagatacaaaaatataataggaaaaattaaagaaaaaagaatataataattgaatcagattttgtcgatgttctcagagacgttcttcatacgtggacggacttcagggtcaccttcggtacaagcgagagctagatgaaaaacggacaagacttgttgcttggcgtgaacttcttgaagtaacattggatcaaccatgtccgacaatggagtctcctcttcaaaccctttcctcacccacttcaccaaatccggcacctcaacaaccaccgtagacgtcgaggaagagcttaacggagaagaatccggcgatttcccggtgagaagctccataagcacaacaccgaaggagtatacgtcccatttctgagtaggcctccctccagggagccgggcctcgggggctttatagccgttggatctatctgagggtttgatggaagtgtaaggaagagctccacctaagaaaccacccgcagcagaggaggaggaaggttcgttagaagaggcagaagcggcagtgatggtgatgagacgtgtgagaccgaagtcagagatgtaaggagtgaaggaggaatcaagaagaatgttggaaggcttaacgtcgccatgtaccaacttccttggactacactcgtgtagataagctaacccacgcgcagctccttttgcgatctttatacgcgttgaccatgttaagctcggtgatggttgaccattcctccctattcacacaccaaaacaaacaagtatccaatattaaagtaagtaatgagttacgatgagaaaaagacgggacagctagaggctcaacagagtgggtgtataaaatcattactcttagcccacaagtaaacttctctcatcattgtttcctcattctgctatttttactaattacttctactctaagactctaccacacttaaatcatatactaatacttaaaaaagatatttattattcggacatgtcgaattctcttacaagacatgtctcttttacatgtaacttgactaaattctaaattaaaataccaaaatatgcctaaaaagagaaagaaatcttggtccactcttgctttgacaatcccacaaactatctctcagatctaatctcatctctcactaaggtagtaatgtctaatctagcgttgacaaagtcaaagtcaacataaatttcttaagtcaatagaacagaaccggatctcaaactttagttagtagactaattcgataagcagaaaaagaagaaggaagaagtaatgtaatacctctaagagcatcagctaaacttccattgttaacgaagtcactaatcaaaagcttctcatcaggagcccaataataagctcttaacttcaccacattaggatgtttcactttccccatagcttgaacctccgtaacaaactctttatacctctgttcccctccttccccaagtcgccgcaccgccaccggaactccattccctaacaccactttatacactatccctaacccactcttccccaaaacatatgcagaagctctcaacaactcatcaagctcaaaagaaaaccctttatcaatcgctacaagctctccatctcctttcccttctcctctctcattaccttccgcttccgaatcatcctctttcggaaaccccgtgatacaacaacacgatttccccttcaccgaaccaccaccgagtttcgcattccctgtgcagctacaccctccctcagagtcttttttcttccagtacaagtaaactaacactaaaccaataaaagctacacttgctgcatctgccaccgagatcaacactattaatccagtacttaaccctcttctagaatccgcattattctcgggcgactttcgagtccccggagagttctcatcagtgtctttacaagttttctggagagggaaaccacacagtttcggattattgagaaatgcggttggcccctggttagagaacgaaccagattgaggaatctcgccggagaaatcgttgttccggagatcaagagagactgtcaccggtagatttcctaaggaattagggatttggccggataaatggttaaaggagagattcaaagtaccagagagagacttaagctctccgatatccttagggatttcgccggaaaattcgttagcagagagatcaagctgagctaaattagtcaattccggccagatatcaccaggaatctcaccggaaaagttgttagcggagaggatcaaccgttgaagctgtttacacttgttgagatccggtgaaagagttccagagagcgaattcatagacaaatcgagattctgaagctttgggagtttacagatcgaaggaggaagagtaccggagagattgttaccgtataagaagatactatgaagcgacgtcgcgttgaataattgagtaggaattgaaccgtaaagttcgttgttgtggaggttaagacgacggaggtaaataagtgagccaagctctgaggggatgtagccacggagatgttttccggcgagggaaattccaacgacgcgagaggtagaagagtctgagatgttcatacaggagattccggaccaatgacaaggatcggtgtcgttatcgttccaatcggagaaagcggaggaggaggagtgatcgacggcggatttgagtgagagtaaagcgataccgtcgggggaaagagaaagagaaggagaagtgttgaggagatgaagaagaagatggagaagaagtgagagaaggatcatttctctgtacttgaatttttctggtttgtgaaaataacagagagtgaagaaggtgggtgacgaaagaatgagagattggttggttcttgaagggtatttatttatgttagttatacctttttaatcatactgtaatcaattaattaagggcaaaacatcaatttatggcaacgtatttaataattcaattacaaattttttgttttcatttaatttagtttgacataacacatttttgtaataatgtttgccaaaatttctattggtcatcagtaattttgtcgattgataccgttttgattgtgactaatcgtaaaatatatagcggtattacaaatatcatttttattgtaatgttttagaaaaaaaagttttactgtttgggggttcataaattagatccactattaacataaaattatctaaattagtaatgtttatattgatgagtactataattttgactgactgtgagtactgtaattttgagactttgtgaacaaaggtaaaagtatggtggcatgtgtaattgattgccaattatatatttatttatcataatgatatttttttttcgccattttttttttttcattataatgatatcataatgataaagaaacaaaaaaagagagaaaaatatcatagtggtcctcacaaacatggattagcctaatccaaatgttgattagggtaaataactaacactactcacgtaagtgttagggattagcaaatgaaggaggtacggaacattgtaactccttgggaactgttacggtcagggtccctgtccctcacttagccgtcgaagtaaatgccatgcctttgacacgtgctcgctggtctctcaaagtctctgtatagaagttttttccaataattgtgtttaaaattgagttttataaatctttttcttattataaatctttttcttattatttcaattttgcgactaacatcttagaatatttttcataaaagggttatcaatttagtttaaattaatttttctgtaaatttacattttagaatcagtttaaaatgaattttctgtaaatgtacatttaaactatactatttgaggtgtgttgttaatgtcgttatgtccccctataatcattaaaacacgcttagaagctaactaaagcatgaaatctataagataatatcttatttaagtgaagtatgagaaatgagattaaatcattttatttatcacatcatgtttctactgtctagtctactaaactaggataaaattatttcaccgtcattgttgctagtttcgaaagtggctttatatttgctatgcttacggattcttttggttttggctggcttggctaaattttaattctattattcacatgatcaagaaattgaaccaaaattaatatcactacttaccaatttggtatgagttttttttttccgaccaatgttgtccgcaactgttaaaatatacagtacatctacatcatacatgtttctgtcatgtggtagttcgatttgtagaatggaccaacaaactactctcacgtgttaccatacagatattatatcacgttctaccatacaatcttaacacatatagatatagtctcaagattgaaaatgaacatcgtaaagattactcaacttcagcagctctttaaagttttgtattaccaacaaaaaatttccaatacaaatactggtggaaaaatattctcccgaattttgctttttcccttctactttgctcttttttttatttttcattgttcttacatcatttagccgtcacacccaattgataaaaagaaaaagaaatgagtatatggattcctaggtataatgatgtctggattatctgttacaagttttacaccaagaatattaatgatgatatcagcatattggaagaagatgaagcactcattgattccaccggtggatgagtttctctcaagaaaccgtaatccttttgctttgcacccaagtcatattcttttcgattatcttaattagcgttagttctatcttgcattatgttggctcctatgtcgtcttttgaagaagagaggtagaccctattttgctaaacttatgtactgtataacataataatactattttgcccaaaaaagaagaagttatgagcatgactttatatgaatacatcattaatattctaccggaacgacatatagtagctagatttctacggaatttcttcagtttgcgagttctatataatacaatacttatcatataaagttgtatgttttaatattaatattattggtgaatgtggttagaagttcttgtccaagttatttagaccttaaatattacttccatgtgttatattttacatgttatctcttgaatttggtcttcttttatgtatcaattaagttgagatgaatatgtatagatcttttactttcccggattcggataacggaaaaatttataagagtcatgcatgcacgtatattgatacttaagatattacttgctcttgtaagagtatgtatcctaattcccgaatatataatccgtttatatctctattaaacgaagaaaaacatttcaagtaacaatgagattcacattatatcagttttcttattttcaattcaccttgcctccagcaccgtgatggtaatactcgccgatacattttccggctcctgtggctcaaccttcatttctggaaagcttctccggggaccatcatagaaagcaggctctttaggcaaagaaagagcattatttccttcgccatatatcatggacacaacgtctaacatacttggtctatcttccgcgttttcttgtacacacaatagagcaacttgaacgcatctcaacacttgagggtaatcaagcgcagaatctctcaaagacagatctatcacctcacgaattttgttctctttaaacagattccacacctgagaaaacagagtttcagcgactagtcgactacgcaagcaagaaagatgagaatgttaacaaataagagaagaaagttttgcttttacatgaactatgagattcaaaggtccttctaagtcatggtgaaagctattgttcttcctcccacaaatgatttcgagcattagaaccccaaagctgaacacatctgatttcgccgagaatagtccttctctaaaatactccggcgacatatagccactacacaagagagcctattaaaatgtgatcaaagaatcttctccttgtttctagtcactcttaacttacaatgtgccagcaactcttttggtgttggctcttgtttcttccgctccaaatatccgagccaatccaaaatccgatattttcggattcatatcctcgtctagcaaaatattactagctttgatgtctctatgtatcactttcaatcttgagtacttgtgaaggtacaaaagcccttgaatgattccttccatgatcctgaaccgcaacgtccaatccaaaacgtttttcctcaagggatctgcacatatttgttgacattttttcagatgtaatctcgaaagattcttagccttttaataaccaaaatctcaccaaagaggaagtagtcaaggctcttgttctgcatgtattcataaatcagcattttctcatctttttcgatgcaacatcctaaaacctgaacaagatttgtatgctgaagctttgcaataagtatagcttcgtttttaaactccactaatccttggccagatgctaaagatagtctcttgatagccacttcttccccatttaataactttcccttcaagaaagtagcagaaacataaaaatctgctttaagttaatctaaaaaacatgaagactctggactaccttatatacaggaccaaaacctccttcaccgagcttgttttcatcggagaagtcatctgttgccgatactacactttcaaagctaaaaatctgaagctcgttattactcttcctttcatttctcttgtgtatgcagctcctatcaattcccaattcacgtagtagcatttcttggtctattgttgaaccaaaccttagtgataaaattctcctccgtatgaaaccaatcactaacatattaatagcaaatattacattaatagacatgcttttacaaatattattcagctaaatctcaggtacgtacgtaccttgaggagtgagctctctccatagaaagtagtatattccacgaaataaaacacgtcctggatcataaaaagaaagaaagagggtgaacttgttagtaagaaaaccattgagactaaaactgttttgtgagtaattctgatacaatttctaccttttacattaaatttcctcaacacgagatagattataaaccaaattataggtgtcatgaggaacagtgttgccacaacaatatgccaagctgccacttttttgttctcttgacctacaacatattcaatattccagaaaacttaatgtccaatagatttgctgcagttactaaagcgacactgacaaaaaaaacagagaatatatttccacaagttatataccatttccacggatatatatagttctaggactatgagaagccgaccctttgttggtaggataagtattccagatttcgcaacccgtaccatccggctcggttgaagcataggcaagacaagaagagttttgcaaacatatagcactgcaatcaactgaactaaacgttccactaagtacaaaaccattgcttgcggaagaagatactgtcactctgaaagaagtgaacccatatggctcatcccggactacgtaacctgcagccaaacaattccggttcctataattttgcctgttacgttgccgatgcatttgctctctacgcaaaatgccttgttcgtctatcattatggttggaaaaaatgttctggcatcgtcctgatcacctgaatacataaaatattgtccactcttggttgaaacgaaggaaaagaggaaaccgcattcgtttaactcctcttcggagaaccgacctttattccaaagcccgctactccaatacatgtttccacgccacaagatggtcaatacgtttgtgatattagtatccatcccaaagacaaaagatccagaagcaggtaaagtatcacctaaccatgatgtaagttcccatctcttcctggtcttgccatcgaaacctagtttcatcccaggaagaagagtatctgttggataatcgaaactttgccacaaaacccgcttcatcgatccatcagcatccatctcttggagctgaagatttccagaatccaaaagctgaagggttgtgtttcttgtggtttctatagagcttagctcaagcatggttgatgctcctcttaaaatcttcaatctgccaagagaatccactgtgaggcttccagagcggtctgagattggattgttacggttagcaatccagacaggtctgtcctggctatcagtattaagataaagattgttgaaccaaattccaagatacaagttttctgaattcttaaagttgaaaaacttgagtttgaagattttaaaagcagaaacgagctcttgcccatctttcaagaactgaccctgatgtagcgtatctgtttcactgcatgattttcctaacaagagagataaagtaagaagagagacaaagatgccatttgaacacatagtttcagaaagatggatgatttggcaaatagatttctttctaaagtggttttttaaagatatatcttgtttgtgatcaaagtcatatcagaagttccaagtctactacgctgggagacaaaattgaagtcttggccgttgaagtttctaagcaacagctgttatcacaactaattagcaagaaagtgaccacaaaattgaagttgactcttattacctaaaacaagacacatacataacagaaccagacgccatgctcttgagcaattgtttttgtttttaacgaacatctcacgcctgttgggagaatacaacacccaataaggatttaaaagggggagactacttacctgagaaataaaaagccaattgctaccaagagaggagaaacagagttatatcatttcttcataaaaagacaaaaaagtatttcatcatggttcataaaaccccaaatcttattggtaaagaaaaataaataatttataatcattttgttgaaagaaaaaaacccaaaaaaaaaaaagaaataagaaatccaaaagcttcttgtattgattgaacggaaaatgttgttagagtacataataataaccctgttttacttggtaaggagaccattttattggtttcaatggtagaaaagaatacaagaatcagacttagcttgtaacatataactggttagaaataaagactcaagtaaggtatatcatccgtggaattgttgaccttcgaatcttgggttacaagcaaacgtaacaatcgttgaagctatcgatggaagataaagacttcctcgaatccattctctagcttattaggtcttctctacaatccacaacaacttgagaaagacgactatgtatgaagtacctcgaaagaaagtgaaggaataatgagaaatgagagaaaattggtaactcaagagtgtgataaactgctcatattgtttctctactatgtgtgggttccgtggagaaggagaagaatatacgacatagttttgataaaccaatttaaaagttttaatgattttactattacagtattagatgttttcgaagctagaagattttctctctttttctttttttttggcaagaatttaggtaacaaatataacaactcaaaaacaatatttttatatttaagtctgatataaaataaataaatgataataattttcaaattataaatttaaaaatctaataaattataaatacaaaatgataattaaaaagacgctaaaaacttcaatccgcctgggtggatgggaagaagcaaatctttgagtgagtttttaattcaagaataattaaaatactccatttggtgatttggtggaccgttagaaattaaaagcaaaatgcaaaaatattcaagtgggataacataatttaactgacaatttgttcatgtttccactaacttttctgatggaaaaaaacgcactatttgcaactataacgcactaatctcttaaaaaaaaaggttaaccataaactctaaactcttccaaaaaagcttaaatactcctaactaaccaaattaatcttttaaacaaaagtcaaaaagttacaaattatatgaaaactcacgtcaaccccagttacaatattgtctctggaaaacttcctaaaactagtacattaaataaatatttatagaaagaaccgttcattagttttaaattagaatactaattaacatcacagtaatgccgttcttaacttaataatttttaaaacagaacacacagattcttaagtacttcctcctccactcgaatatctttttattctctctctctctctctcacatttaaccccaaaatcatggatcgccttaccaagaacaaaaccctaattcatcatcacttgtctgattcttctctattggtttatcttttatgaaccttcctccttggccggtctctcaatatccccggtatgtaaatgtttgacctctatcttatctcttctgttctgttctttgttttgtctttgtttgtccatttttggttgttactggttccacacgtgttctccgcagctttatttttagtgctctcttttatttttaatgtaattcgcaattttttctattaatcgtagaatttcccggtttttgtggatgtgtttcagttccgttattgcaatttttccaggatttgctgtttgaataaaaaattctgttttttttttctttctcttttctgggttaagatctttttctcatagcaaaggtaatttctgtgattgtagcatgattcattgtttgttttaataatttctctgaattcatgtattgattcctttgtttctgggagatttttgtagttttagagttgttttggtgaggtttgatcatggatgtgaccgagcttgaagagaatctattcgcggctagcgatgccaaggttcggtttttaaattgaaatgttcgaattcggattgtaattgttggaatctgattaaatttgcatctctgattattgcaaacaaattttctattagaaatagtaattgggttatcttaaaggacatattttttattatcatttgatttcaatgttgttagagggtttcgtgtttttatgttcttggtgtttgatgatttgattgtcttgtgcttttgctacagttacatggagatatgtgcaaggaactatctggagttctatgcaaggtactttcaatcttcccgtcattggaaggagcaagaccgcgtagcaaatcagggattcaagccttatgctctttacatattgcacttgagaaggcaaaaaatattcttcagcactgttctgagtgtagtaaactttacttggtcagttttttctctctttggacaagttttatgctttctcgtttcgtgtgttttgcttctttaatgttctacattttccaatgtgaacaggccataacgggggatgcggttcttttaaagtttgagaaagcaaaaattgctctcattgatggtcttaaacgtgtagaagacattgttcctagctcaattgggtcacaggtaattattactcagttcatttcacattgtgatgattaagataagtccacttgttgattgatagttatgatgtttatagttgagaagtctgtttttttttatgtatgatttcttcagattttggaaattgttggtgaactagagaacaccaggttcatgcttgatccatcggagaaggaagtcggtgatcagattattgcattgcttcaacaagggaagaaatttgacaactgtaatgacaacaccgagcttgaaattttccaccgtgctgctactagactaagtatcacttcttctagagtggctctggcagaacgaagggctttaaagaaactcattgacagggcacgcgccgaagaagacaagcgtaaggaatcaattgtggcttatcttctgcatcttatgagaaaatgctccaagctattcagaagtgagatcttggatgagaatgactctccgggttcctatccatgttctcctaatgaagatcatgggagtgttcatgggtttggtcgtcagctatcaaggtttggttctttaaacgacaagcccatgaacagcataaattcaggacagatgcctgttccacccgaagaactgagatgtcccatatctttgcaacttatgtgtgatcctgtcattattgcttcagggcagacttatgaacgggtctgtattgagaaatggttcagtgatgggcataatacttgcccaaagactcaacaacagctcccacatatctctttgactcccaataactgtgttaaaggtcttattgcgagctggtgtgaacagaatggaactcaaattcctagtgggccgccggaatctcaagacctcgactactggagactagctctctctgactccgagtccaccaaatcacagtcagtcaacagtatagggtcgtataaattgaagggcgtaaaaattgttccgttggaggagaatggtactactgttgttgaacgacaaaacacagaagaaagttttgtgtctgatgatgatgatgaggaggattctgatataaatgtacttgagaggtatcaagatttattggctgtcttaaacgaagaggagggtttggagaaaaaatgcaaggttgtagaaaaaatcaggctattgctgaaggatgatgaagaggccaggatcttcatgggagccaacgggtttgttgaagccttgttgcgattcttaggatcagctgtagatgataacaatgctgcagctcaggatagtggagctatggctctgttcaatttagccgtcaacaacaacaggttagtacctcttgttgatgttggtaatacaataatagattgtgactttctcattactttttgtgttctcaaggaacaaagagttgatgttaacttctggggtgattcggctgctggagaaaatgatttcttctgctgagtcccatggttcagcaaccgcgctttatctgaacctttcctgtctcgatgaagcaaagtccgtgataggttcaagccaagcagtacctttccttgtccaacttcttcagaaggaaatcgaaacccaatgcaagctcgatgctcttcacgccctctacaacctttccacatattcccccaatatccctgctctcctttcatctaacatcatcaagagcctccaaggccttctcgcatcaacaggtgaaaatttgtggatagagaagtcactagccgtattgctaaatctagcttcaagccaggagggcaaagatgaagcggtatcatcacagggcatgatcagcagtctagcaacagtgctagacatgggtgacacaacagagcaggagcaagctgtttcatgccttttgattctatgcaatggaagagagtcttgtatccaaatggtgctacaagaaggtgtgataccatcattagtgtcaatctctgtaaacggaacacctcgaggcagagagaagtctcagaagcttctaatgctgtttagggaagaaagacagcaacgggaccagccatcttcaaacagagatgagccaccccaaaaggaacctgcccgaaaatctctctcagcaccgctgtctgtccatggatcaactcctgcttcagcttcagttcaagactatgaaccaagagtcctgtcgaaatcaatgtcgagaagaaagtcgatggcaagaccattcagcttcttctggaagaaaagctactcggttcgcgagtgagaaagaagaaaatatcacatgtacatacaagtacaaccttttatatgtaaagctttgtttttctttcttacaagttacaaaagtcatttcatagagaagaagatatgttgtacaggtctcattgtgattagtacactcgatttttgttgttcttttggttagccaaaaaaagatgtatatcaatcaaggtaaatacaagtaaaacaaaaccccagttttaacatcgtattcacttattgtcattcttctggtttattatgtttctatgataagtatccaaagttttaaaacaaatcttaaacttaggttacttagaatatgacatttacaaagtaatgaatacaagaagtacttgaaagagaccaaaacatgtaagctattgtgtcacccctcgggttcaaatctcgaaagaaatcaggtcgaataggattcagaacgcgagaaggtgagcgaatccgcgcttctactacttcgtttgatgggattctgaatccatccggtctcaaagagttccaagatcggatctctgcggctactgctgcttcgaccagtgcttccaccgccatcttctccactacttcctctctgtaatgcctccttgtacgacactttcttctccgtccccaaattcctcttctcttcctcctcttctgaaactgaccctgatctgctaaagctcctatcaactgtgatctctttctcattcgtccctttgttcttatctctccaacgtcccaacacgttcaccaacaaaccaagcctagaaataacatgaaccaacaaccaatctagccacgccactcggctcatcaaactcggaagtttcttgagcactccatcaagtttctctggcagagtctctacaatgatcaacaaatcaaagatcttaacaaacacattgcttgaagaagggaagtaagtctcgattgcgtcttgtaacgcgagtatatgatcgtcagctacagagagaaccgcgagaaaatgacgatgaaacggacttgtcatcgaaacaaagaagataacgaattcaaagagtttcctcaatagccaagaggatagattcttcttcttcttcatcagagtctggcttcttgtgtaaagaacacgagtcatggagagtattacaccaccacaagtctcaagaggacgacgtcgcggcctccttctcgccggttgctcctgtcaaaatccaaaatcacaaaaaataaccaaacatgtccagattatttgaggttatcaaagggtaagaacaaagagaattgcataccatttatgaggaatgtagcagattccaaatgttttattttctcgtctgtaaattttcccggaaaatgatcgagaaacttttgagaaaattagttcggtttcaggattttatacgttagtcaagggtaagcgagcggttagtcttgatttcagctgagcattttttagaacgagcggttacgctattctttttttaagtccactcgagaagattcgaaactgggttgccaaaagtgggttttttgaaaatatttttaaaaccaaacgttgggaatcttttttaaaataaaataaaaaaggaaaccgaatctatgacgcatgcatgaggtaagccattagatagattgtactgtgcgagtctgcgaatcaccgatggtcaacgtctcttctccttcaacttcaaatttagtctcttaccagtacgacttctcggtaacggaatcgttgctctgtttgccggagacgtgggtaagattggattgggaggtggagaaatgaagttgttgccgcgagagatcgagaagttagagctacatcaagctggtttccttgcacagaaacgtcttgctcgtggtattagactcaattacactgaagctgtagcacttattgctactcaggtacttcactattcttcaatttcatttactatttttatggtctgcaattcttaagtcgaagttatggttctcaacttctcatggttatgtagattcttgagtttattcgtgatggtgataaaagcgtggctgagctaatggatatcgggagacaactattaggaaggtgatgatatgatgaattctatagttgtttcactttttttgtttttgttttgatatattcagtactattttgcatcttctttttctgtaaacaggagacaggttcttcctgctgttttacatcttttgtatacggttcaggtaggtagtggtgtcattgattcttttttaatgttccatgctttgtcaagtcattataactatagttagggtgttgtaggtcgaaggtacatttcgtgatggtacaaagttagtcacggttcatgagccgatttctcttgaaaacggcaaccttgaacttgctttgcatggatctttccttccaggttccattttgatcattgtattctacagttagctttttatttttctggtatactttgcttagttagtaaaagtagtaatattgttaatgtgtagagattacgacttgttttgtagttccttcattggataaatttccagaagttcatgagggtgtaattattcctggtgatatgaaatatggagatggaagtataattataaatcatggaaggaaagcagtagttctgaaagtagtgaacactggagacagaccagtgcaggtttgttaaattttcatctcttgcttcttttgtattttcaaattactgtaagattctttatttttgaatccttattggtatggagataggttcatgaaatcagttgtagttaatttatcaagtcctttttaggttggaagtcactaccattttattgaagtgaatccactattggtgtttgacagacgtaaagctcttggtatgcgtttaaacatacccgctggaacagctgttcgctttgaggtttgttttctcatcttttgttatatgtctcggctaaataatgaccagcttttagtcatgtcagtgaaatttatatttttgtagccaggagaaagaaaaagcgttgtacttgtgaatattggtggaaataaagtgataaggggaggaaatggaattgttgatggtctagttgatgatgtcaattggacagttttaatggaaacaatggagagaagaggatttaagcacctggaagatattgatgctaggttaactcctagtccacctacttacatatacaaaagatataaagttttaactgatctctttgcagtgaggggatagcaggggaagatcctcgatttacaactatgatttctcgtgaaaagtatgcaaatatgtatggtcctaccactggggacaagcttcgcctaggtgataccaacttatacgcaagaattgaaaaagattatactgtttatggagatgaatgtgtatttggaggtggaaaagttctaagagaaggcatgggacaaggcatagagcaagctgaagctctttctttggatactgtcattaccaatagtgtgataattgattattcaggaatatataaggcagatattggcattaaaaatggtcatattgttggtattgggaaagcaggcaatccagataccatgcatggtgtgcagaacaatatgcttattggggtaatttatttcactgtataaaacacagtaaataccattttggagtacttacttactttctcttgtttattttcttagaataagactgaggttattgctggagaaggaatgattgtaactgcaggagctattgattgtcatgtacatttcatatgtcctcaattggtgtatgaagcagtgtcaagcggtgagtagagtagcctgactgaatataaagcataagtttgcctctaaattcataagtatatgcaggcattacaactatggttgggggagggacagggcctgcttatggtacacgtgctactacgtgtaccccttctccgttcgatatgaagttaatgctgcagtccacagatagcctgccactaaactttggctttacaggaaaggtgggatatgtttcttcttgatactgatatccttgttatccatgtactcatctgtatttcgaactcttacggttagcaaatgtatcgttgttagggaaatacagctaaaccgttagagcttcgtcacatagtggaggctggagcaatgggattgaagctgcatgaggactggggaactactcctgctgcaatagacaattgtttggcagttgcagaagaatatgatatccaggtcttttcttttccctgatgacatcctcttttaagaaacaggattgatagtttcccatatgtactcaattgttttgatttgacaggtgaacattcatactgacaccttaaatgaatccggttttgttgagcacactatcaatgcatttcgtgggagaacaatacatacatatcacaggttcatcagcttctcacctcttcatgcacctctcagatgcttccttcactgcttatgtttgaagcaaaatattgaagtgctatttttgtttgttaaatcattctggacagtgaaggtgctggtggtggacatgcaccagatatcattagagtttgtggagtgaaaaatgtactcccgtcatcaaccaacccaacacggccatatacgaaaaatactgtagatgaacatcttgacatgctggtatgagaattttatacgagtgatggtgaattgctttacttttgtcttgttaataacctcatatgcaaacacaaacagatggtttgccatcaccttgacaagaacatcccagaagatgtagcttttgctgaatcaagaataagagctgaaacaatagctgcagaggatatattgcatgatatgggagcaatcagcattatctcctccgactcacaagcaatgggtcgcattggagaggttcatagtatttgaattcttgaattctatatcctttctgtagagatgcttactttgtggcatgttctcttttgacaggtaataagcagaacttggcagacagctgacaagatgaaggctcagaggggagccattgatcctaacatggctgatgatgataactcaaggatcaagagatacattgcaaagtacactataaacccagctatagccaatgggtttgcagacttaattggctcggttgaggtatgctaatcttctccacacgtctcatatcttacttatacagctttattttcctctgtaactacttaacgtcagtgcttttgtttacttaattggaaactgcactgtgatgcaggtgaagaagctggctgatcttgttatatggcagccggctttcttcggagcaaaaccagaaatgataatcaaaggaggcaatatagcatgggctaatatgggcgatgcaaatgcgagcatacccactcctgagccggtaatcattactgactactagattctagactcgttttcttgacaacacgtctctaaagacggtcctttcttttattttatgatggtaggtgatatcaagacctatgtttggagcatttggaaaggccggaagtgaaaactctgttgcatttgtcagcaaggcatataatcttttgtcactctgtatcttccattctttccccaattcatttgtggattcagttaatattaactatagtttatgtattcttacataaaccaggctgccttgagaaagggggtaaaagaactatatggactcaagaagagggttgtagcggtgtccaacgtgaggcagctcacaaaactcgacatgaagctgaatgatgcgcttccagagatcaccgtggatccagagacatacgttgtcacagcaaatggcgaggtccttacatgtgcgccagccgattcagtccctctctcccggaactatttcctcttttaaggttgttgaaatttctgatgctctagtgcattttatcggcggcattgctaactacaatgagagacacctacagcactatagcaagaatatactgataggtcacatcccttatgttcatttgtaacaataagcttctttgaacaaacaaacaaaagaatagtgagagaagcaaatataaaaagggaatgtggtgaaagagatgatcaagtctagagagttgcaaggaccaatgttgttagactagaggatccattatagaattataaagtggtgtcttttttatgttgtctctgtcattttttaatggcatgaagttgttagtggcttgcttgattcttgtggggtaaaagcatttacatcattatagaagcaacttccagaagacagcaaacagaagattattgtactgagctttcctatgaatctgtgatggttatcttctcctctactaaatggtgtgtgtcaccatcttgttcatgttcaatatcttcttcattgttttgcatttagagtcaattttaaaaacttattttattttcctttacgtacatgcctaattctattatagaaattgaacttattttaaaaaatttgccactttttcattccatacaccaaaaaacacaagtatatgatcctcaatcacattgatacgaatgctatcttgttctgcggtacagagcattttcaacaacatatttggatatctatctagaatcaacaacaatttttttttacatatatttgtatttttcatattcatatggggtactttatattcgaatttcatagaaaactaatatctttaaatttacatttttgtaaacaaaatttagttgtattttagaaataatgtaatttttgtgtgaaaagggacatgataagaccgaatttgaagtagactggttacctaacataacatcaatggatttggatttcaaaagagagaaaaagaagagaaattattaaggataaaaccaacaaatcaataaagtatatgcataaatttacagactattaatatcatgaatctatcggtttgttcaaaaaaaaagttgttgttagaatttctctttaaaaatagtatggttaattaagaaagaatgattatacatataaaaacaaaactcctaaatgtttaaatgatttaaaactgagagaatattgttttacaatcttttagaggattgtgattctcataatcagaagaaaataattgcagatacaaagatcttagctggctacgtgaagggcatgcttgagatatcataactctgatgtgcatccacacatgacaattgacagtcttaacatattttatgtccaaattataccattaggcggattatttagaacttgtccacgagaaacatattgtatgtttgtgatccatattattatttcttctttcttctaatataaaaattatttaaattttattatatggcagaaaagcagtagtttggttggcatgactcgaatttaagatcgcaaatgtaaaatggatctcccagtcatcgtttttgttcatatttatatgcggttcggtcacagttgacatgttcacacggttcctctatttaattcagatttcagacaaggtgtaataatttgaatggatatgaaacatttgtaaatatttataaaattaatgaaagaccaagaggtttggagaattagtttatactataataagcttatcactaaagaacataattaaacatcataaaaagaaagaaaaatagagagagagatatagactttattattaattgactgtacatcgtattttcgactaatattaattgactatacatcggctattcgaagtatatatctactgataccatttttttataatcaaagtgtaattcatgattttaccacttgacgagttcttttaggatgagtgtagccatcaaataactcatttatcgatttttttaatggatataaaacataaacactatttcgattggcgagatgaaaaagcttagatatttcaacgcttgttaagaatcgatttctgacttgcaacttttttacaagtaggaacgactaatttactaccacttggagtaaacacgtaccgataagattgaaaagttacaatttagagatttgaggatttatgtaccgttcaaagaaatcgccaagtttaataatttgtttattctgttaggtaggaatacaacgagcatgtgcataattaaaatataaaataaacctaaacttaacggcggtcattgcctccaatgagtatatgcatgttatgtggtcggagtttttaatgtccaaactgggtttattttttgacatcaacatgcactttttatagtacaattaagtttggtgcaggcgcagcaagcaagccacacccgtacattactgcgtacaaacaagaagcggtcaatttttcgagaaagacgatccatacgttctgtgtaaataaaaaaataatcagatttaacatacattttgtggaaaacaattcttcttatatgaaaacaccgtagaatgtaaagccagaggagatttaccaaggtggcttcgttgagatatttgaagattgttccacttgtgccttctaaaacgttagtgatctgttatatacgttacctcgctaacaacatgttcatatataacacacaaaaagttatttatgtttttttatgttagaaaagagaaaaatattttatagcgttgacaaaaaatttaaccaaaagaaattaaagtgtcataccacttggtttttggagtctgattctcacgcgctcttacacgcgtacgtgacaagtaaattcacaacccatttacggggtggaagtgacgacactctctcacggtcaaacacattatcctgtccgaaaagtgaaaactaacacaaaacgtcaccgtttttccttgactcagtcctctagcacgaggtccacgagcaacgtttctcgtttgccttatttatcatctctctctatctctctcttcacactgccaaactccaaacaaaagtaaaaatgttcgtagcatctccggtaaagacgaacttcaacggcgtcagcctagttaaatctccggcgttttccgctctttcatgtcgtaaacaacaccgagttcctatatccagacaggttcgagctgtgatcagccgtgaagaaaaagcggtggatcaagaagacggcaaaaaaagtacaaacaaaccactaataaactcttctcaatttccatggcaaagatctaagtatacgggatcgaagactgttactgcggttgtgaaaatcaggaagaagatcaaagagaagctaacagagagatttgagcatcaattagagcttttcatgaaagctattggtcaagggatgttgattcagcttgtcagtgaagaaatcgatcctggtaaattatctaaaattcaagtttccttttttagattttgagaaatcagtttgttactattttgagctagagaacaaagctaaactgatcacttagattttgagttacggttaccaattttgttcgtttcttctttggattttattgtgttagatttagcttttgattcttgctagcattttttgttttcttgaatctttcttgattttttttttttttttttttttgctaccttcaagatgacagctatttactagtacataataattgattagttaaaaggcccatcggccaatcataattctaattctatccttcctttgctatcaatgaccattctgcttgaacaagttggtcattctaaagattgtatatttcattactatattacgaccaaatgataaaccgaatctttcttcttacttgctagatctgaaattaggcatagcttacattacaccaatttttgtacattattattttcttagattgccttgttcatttataaggcagatcatcaaatttatcaacccggttgttctttttcggtagtatcctctcggtaattggcccatagtttttgagtactttgtaacacaattattaaatcaaatgtaaatgcgtagggtcggtataaagttattgagagttttaaataatttagaaagaaaaaaaaagactcttgacttttcatagtttcatcatcccttttcttaatcccacgtcaccgaatgtatttaatgcatatttgttttgcttaccacattttttagttacatgttacgtatagagattagatatgtatatgaatagcttcttgatattttgcagaaactggtaaaggcagaaagagtttagaatctcctgtgatgggactcccaaaggctgtgaaagatccgagatacctcgtattcacagccgatttcactgtcccgattaactttggtaaacctggtgccattcttgtcaccaatcttctttccactgagatttgcttgtcagaaattatcatcgaagattccactgacaccattctcttccctgcaaacacttggattcactctaagaatgataatcctcaagccaggattatctttagaagtcaagtgagatatcttcttctttacgtcattgaagtgtcttaaaatgtgttttgctaacaagtggaaccattgtttcatagccatgcctaccttccgagactccggatgggattaaagaactacgggaaaaggacttggtcagtgtccgtggtgacggaaaaggcgagagaaaacctcatgagagaatttatgactacgatgtttacaacgatttgggagatccacgtaaaacagaacgagttaggccagttctaggtgttccagagacgccttacccaagacgctgcaggaccggccggcctctcgtttcaaaaggtgattgatctctctgtcactcactttgcatagttatggttcatagagagaacattttgtgtagtaatatataagttagtgtgagacatttttgtggttcttgacttggtgaattcattcagatccaccgtgtgagagcagaggaaaggagaaggaagaattttatgttccaagagatgaagttttcgaggaaatcaagagagataccttcagagcagggagatttaaggctctcttccacaatcttgtaccatctattgcagcagcattgtcaaacttagacattcccttcacatgcttctcggatatcgataatttatataaaagcaacattgtcttgggacatactgagccaaaagacactggccttggcggctttatcggcggtttcatgaatgggatcctcaacgttactgaaacactgctaaaatatgacactccagccgttataaaatgtaactttgtctatgagattctctcattcagagtaatatcattttcttaaaccatatacatattttgaatcctcttttatgtgttgttttcaggggacagatttgcgtggctgcgagataatgaattcggacgtcaagctcttgctggtgtcaaccctgtgaacattgagctactaaaggtttgtttcattttaccatttgaatcaaaaatcttctatgaagagtttttgaaacttttgaaatgttttgataggagctgccaattcgaagcaatcttgacccggctctatatggacctcaagaatctgttctcacagaagaaatcatagctcgagaagttgaacattatggaactactatagaaaaggttagctattagtgtacatttttctggttgagataaaatcttctcatcttgttgatcgcgactaatgcaggcgcttgaggagaagagattgtttcttgtggattaccatgacatactcttgccatttgtagagaagataaactctatcaaagaagatccaaggaagacatatgcttcaagaacaatcttcttctattcaaagaatggagccctgcggccattggccatagagctctcgctgcctcctacagccgaatccgagaacaagtttgtttatactcatggacatgacgctactactcactggatttggaaactagccaaagctcatgtctgctcaaatgatgctggtgttcaccaacttgtgaaccactggtaaattaagtcacttccttgctttgtagtctccattgatgttttcaacagtacataatttgtgttttttggcaactatcttaggctaaggactcatgcttccatggagccttacatcattgctactaacagacagttgagtacaatgcatccggtttacaagctacttcatcctcatatgcgctacacgcttgaaatcaatgctcgtgcgcgtaaaagcttaatcaacggaggaggaatcatcgaaagttgcttcactcccggaaaatacgcaatggaacttagctctgcagcgtacaagagcatgtggcgatttgacatggaaggacttcctgctgatcttgttcggaggttaaacatttttgctttgtttataacaaactaacaaactactccgttttaatctctcgctaatgcagtctctggcttcatttacaggggaatggcagaagaggattcatcagccgaatgtggcgtgaggcttgtgattgacgattatccatatgcagcagacggtcttttgatctggaaagccatcaaggacctagtggaatcttatgttaaacacttttactctgattccaagtccataacatctgaccttgagctgcaagcttggtgggatgagatcaagaacaaaggtcattacgacaagaaagacgagccttggtggcctaaactcaacacaacacaagacttgtcccaaatactaaccaacatgatatggatcgcctcgggtcaacacgcagccataaacttcggacagtacccgtttggagggtatgtcccaaaccgacctaccctgttgaggaaacttataccgcaagaaactgatccggactacgaaatgttcatgcgaaaccctcaatacagctttctaggctctctaccgacacagctccaagcaaccaaagtgatggcggtccaagaaacgctctcaacgcattcccctgacgaagagtacttgatcgagctgagagaagtgcaaagacattggttccaagatgaacaagtggttaagtattttaacaagttctcggaagaacttgtgaagatagagaagacgatcaacgagagaaacaaggacaagaaactaaagaacagaacaggtgctgggatgcctccttatgaactacttctccctacttcaccacatggagtcactggccgtggtattcccaacagcatttccatttagatgtatgcacaacagatttgtatcattattatgtcttatatgctggtagagtctctaatatgaggttacttcttttttttttccaatgtatcaatgataatattatgcacaagaaggtttaataatctctcactgaggttgacggccacatggagtcactggctatagatactctaatgttggagcagagcttagttgcaatattttttgaagttgacggcctcatcggtgaggaagccacacagtcgctcagccactttaacaaaaaaaaaaatgttcatttttttaaggttggatgtgtgaatggatcttattagtttatctagctgaaaaaaaccaagtttaatttattggacaaaaaattgtgactagccgaccaacaatgagatcttgtagctggttttaatatatgcgcttcatgttcctagctagtatattactcacacgtttgaataattcacataaacactattttaaaattctaatttttttatttgtatgataaaaaaaaaaaagcagtttagtagaatgcataatagtacaagattgagatctcaggaaataagtttcatatagtttacaacaaaaactatatatcattgatcccatcacacgattaataacgatgcccgtaaaaatatcattgacgaccctcagccatctcataatctatttggtatttggccctttcgtatttgtttatttgaaaatgtttcaatttgaattcctcacaaaaactttaaaatatatataaatttatatagtcactaatttatgatattaatgaaactttaaatcggaccatctaagcatattgtgatgaaacaacaatatacgtctagaaagtaatcaggtggtactggtcttactctattatatatgttcctcatcaatcatcgaccgttaaacttcaaacctaaccccactttgagttgtttaatctaacggcttaaaaccatcgtaaaccagtaattgatgtttataaatttcccctcccaaatcacaccgctaactaaatgccaaatccctcgattcctggatttatttcttcaaattaaaaaattcaattttcagatcaatcggagaaatgaatcataaccgtcgatatcacgagagtcttctgattctgtagatggcgatttcaaatgagatcgaaaccgccattaacgagaccttccataaacgtatcatcaaactctgatggagagtcagcaacaacaatcaccggccgttgaaacgcctttgttgctcaattctaatcaggatcatcaagaccgaccttcgccggaaatcgacggcggcggtggcggcggaggaggagaaggtgttaacgacgatctagaccgaacgctagaatggttagagacgtttttgacgctccttgggtttaatcaatcgtctaaacaaagccttgttctgtcttggatcgtgtttttatcgattggtttggtgcttccggtgacagtgttggagctaggtcattgtttagggtgtgagagatatcagtacaagagtttcgagctcaacatcgttgtttcgcaggcgttgttagctggtgtttctctgctttgcgtttctcataatttgagaaaacatgggattcgaaagtttttgtttgttgatcaacttagtggtcgaatggatcgtctcaaagctcaatacattcaacaaatcttggtgatttattctactttctcttcgtttttgagattgcaatgtgatgatgatacttacttcaaagtttgtatctttcttattgtgttgcagaactctgtaagattgcttgcagtttggtcacttccatgttttgctttgaagggtgttcgtgagatcatcagaatgtattatgtgcctcatgaccagccatggttatctgttgcaattctcttgtctatgatcttgtcgtggacttacttaagcactatctttctagctgcaagtgctatgtttcatttagtatgtaacttgcaagttattcactttgaagattatgcaaagcttttagaaggggagtctgaaatctctcttttcatctatgagcatatgcgtttgcgtcattatctttcgaaaataagccataggttccgcatctttctgcttctacagtttctggttgtcacagctagccagtttactacgctttttcagaccactgcgtatagtgggcgtatcacttatataaacggtggtgattttgcagtaagtcttcttcttattcactgattgttatgttcttatgtggtgagcttaagcttggaacatgatatgttttcaggtctctgcggttgtccaagttgttggaatcattttgtgtctacacgcagcaacaaaaatatcacacagagctcaagcaatagcatcagttgcaagtagatggcatgcgatgatgtcttgctcgtctacagattcaactcagataagggcatctcctagtggagttcatttggaggctaccacgaatccgcccatctcctttccgatttcccgttcagatagtgatgtggaatcaatggatcactacatgaggatgcctgttactaaccagtttccttcttatatgtccatgtcctcatatcacaaacgacaagctttcggtgagatttgtttcgcccttttttacttgtacctttacagctaaactcagatatgatgatagctaattagatgatatgttgcagtgttgtatttgcagatgaatccaggcgggataacgatattcgggtggacagtagacaggcatttgataaacacaatattcttcattgagctctctctagttacttttgtactcggcaagactgtagttttcggtactgaatgaccaaaaaaaaaaagggttggtgtatcatgcattattgcatagcttttttaccttctgccatatagtgagattcttcaattgataggagaagatatacttacatgagcgtctcttaactttttttttttttttttttcccgcgagcctctcttaacttggttacgtgaagagtgtacaaagctatattgtactagatggaggaggagtttcttgatcttgatcctgttgttggactcgtcgtttttgtaaaatccatacttgttcactctcaaaatatgtccgaacatttggattttttataaataatatcatattttatggcaatttgcaaatttataacatatggagtaaattgtaaattatataattaaaaggtattagtatataaatagaaatagaatatttctaaaaatattcttttttagactagaaaatagaaatatacattggagagaaagcaactctattttagagtaagatatagagctatacattggagattgtcttacaaaacaagcactgtcagaaagccatagcactaactggccagcctagcttgtgaacacattaaacctgcaaggattctcagtggcgaaaggaggaaaatcatcttcacaaatcaccacggaccctcaaagtgaataaagaaagcatgaatgatattctgagatacaaatattccaacctccgcttaagcagcagccctcgcctaaaatgtggtaattccaaggtatttgagaatatcaaggttgtattccaactgctatcttcgaccggtgtgctgtacttcagccaaacagaccgccagacccaagttcggtttgcgttaattccttcctacgttgctcttccaaaggatcagggctctttaccattctcctcccacgcctaggcatagaagaaaaagtaagagacagaattaaagtcaaccactgatcgtttcagtttagatagacctcagtacctgtcttgggcatgttgagcaggaaaagtaggcatgaaatctttggattttggcagagggacttcgcggaaccaatcatgctttagagcttcattaacagttattctctgcagaagaagccacagagatccaaaagtcaaggaacaattaaggtgcatactggattaacatgcatgcaacagatatatattttctattaccctttcaggatcgtacgttaggagcttgttcagtaagtcaaacccagcatcggacagaactggtgcaccagtgaacgaagtggctgggaatttcttacgtaataggttatacctaaaagtacaggtaagcggtgagaagagtgacataacaactatgaaaacaatataaatccactaatgagtcagagagccacaccacatcatctaaagctagaaagcctgggaacaatattagagactttaagcatatactaaggttatccttccatataaactgaaaataaaaggaactataaatacttactgatgcttgacaaagttgaccttgactccaggtagtttagagaacccaggccaaatagattcattgggagtaccaaggattctgaaaatctgtaaattaaagaaggagtaatttataagctgtatgtggtcccaggatggctggagatccaaatcaaaaccgatgtttaaaataccttgtcaagttgatcaaactccgttttcccattgaacaatggcgccttcattaatagttctgccatgatacagcccagtgaccacatgtcaatggctgtagaatattgttttgctcccaagagaagttcaggtgccctggaaaaacaaatgcagtcgttgggcttggtcccggaggaagtgattattgctaaaacaagaagggagagtcaacacaaggaacaaaacaagtcaaggaagttgaagcacgtatatttcctaatgtgcccagattacgttggttcatggtacgtggtgtccaagcaaataccgcaaaagtgttaagtatttaatggctaagctggcatattatgaagactattctcaaagaggaaagataaggatccaaggcagtcacaaaactcaagtttgtggtgccattggaacaaatatcagataccttggaacaccatttaaaaacaggactttaaaatcattgatcctaatgtgcagaaatagaaaagggagtacggtgtagtacagctataccagaaaggagacgtggcacctaatgttatactaacaatggccaaaaaaaaacaagaaagtccaccagaattcaaataacaatcgtaaatgtaaacaccacttaatttttttataaacaagaatagggtaaaaacgcactttacctgtaccaaagcgtaacaaccagatgagtataaggcttgagcgggctgccatattgccgagccaaaccaaagtcacatatcttcaactcaccccgattgtttaaaagcaggttagatgttttcaaatctcgatgaagcacccagttgtcgtgaagatacttgacgccctctaaaagttgaagcattaagcacttaacttcactttgactaaaacgctgcttcattgtctccatcaatgctttaagatcatgttccatgtattccatcaccatgaatatgctatcaaggctgctacccacgaccacctctttaacatccactattgatggatgatgaaaagaaaggaggatgttaatttccctaagagaagtcaatggaaaaccttctctttctttttccatcttcaccttcttcaatgccacaatttcgcctgtcttcttatcctttgctctataaacaacaccataagtaccttcatcgatcttatttaacctctcaaattcatcaacacttctacaaccctggagcatgtttatacttctcagtggagtactggcaggttcaggtgtctcatgccgtacatattcgtcatctgaatctgtttcactaaggctgtcaacagagttttctcttctgtgttcctcctcatctatttccatcttgtcactcttaacagcatctctctcctcaaaatcatctctgcttcccggtaaagaatggtgccccctttcatcggaatcagatgatctataaccttccctcactaactccccgacctcaggtgtttgagaggtattgcgaaatctcccctgcacgggaaatggtttcttcctccttttcttttccccaacttcttctactatttcaacttcatcagttggagaactattaccagcagcccacctagaggatgatatatgccgtgttggcatgttttcatcctcttccaggtgtgttgcatgctcttgtttgtcatcctgctcagcatttgatgactgttctaccacacacaaagaggacatctctaccgaaggtgacaaagcaggcatagaaaccgcagaaacaccaacttccacaggatcttgatgcatgtcactctttgcaggtgaataatgagaattaccaccacaactgacactaggtgactggcttgacctcttaactagtggtggtgggggaggaagaggagtgacctccacaggtttttcatttctgctcaaattacttctctcatggtcatccctatcccatactattggtgaaaactttctcttcttttccacaggactttgagctctattctctacctccttcacaactccattaactttcgccagtgattccgactcaatcaaatcatccgacccactctcactagagagctcgcctggttccctgtccacagacctagctgaaaacccgcatcttttaggaccaagatcgataaatacttctctactacctggattgctcttcgataaccgaaacccactactaaccattttgttctcttcctgtctagctccagacttaattctatctctatccccgtgtcttagattactaacccgtccctttccattatcaatagcaccgttcctaacatgattataatcctcgttcgcataagcactatcccgcctggaaaatctagaattcgattcctggtctctcagttcatggtctggatatcttatattcctcccagccgccatacagaacttcggtgagaaagggacccaaacaaacccaaaatcctaatttgacgaactcttaaatctgctactagctagctgtgttcaaaatcagaattgcagagactaaaccttgagatttcaaaagttgaattacgcaccgatttaacagctacttgcgatcaaatcgcttacaattgaagcagaacttgtgatcagaaccgcgaaaccctagaaaccgaaagcgagacccgtggatacggaggaagagaggacgaaacgagaagagaactcagaattggaaagtgaaaatacgattgataaggagttcgtaaagttccgattgacgacgggtggatatagattaccgtggagagggaacgaacaatggcggagagagagagagagaagaaagtttctcgtcgaaagctcaaagctttaggtctctaaaatcgtgtttttgtattcgccccctctattttattgttttagtataaggagccccttgatgaaaaaaaaaaaggtataaggagcccctaacttttgtaattaatcaatgtgtttctttttatttttatctctaaaatattttaaaacttctacgacaatattattgaaaccaaaaatatatttatttatttaaatttaacatgttatggtcttgagttttttttttggtaggctgttattgtttgagtttttatcgtgagattttaccatcaaattggcaaaacaattttattttcgtgggatagtcacacgactcacacccaaaattaatcgaattattgtcatcttaaccacaaagactattatcttgaaagtcgatgttggagcacttggaacataagaacaatctcattgatgatttctaaacataagtcttttattttaaagaaagaaaatttattataaaagaatgtgtgggctttttgattagtgaaaaagtcatctctaaaataccttatataggaaattttggagagaatttcttaactattcaagaaactcacatagttagataatattatttttgttgttttaatgttaagaaacttatatctagaaaccacaaataaaattgctctaagacatgaaaaccttaatattaccatcaaatcatttaaatcaaaaaacatatgttaatttttggagtcatgttaactttgataattatgtacctaatattgccgaaggccagtcaaaactaaaatgtctaatttcaatgtccgaaaaaatgattgtcacggtttgtggctgcataatgtttaggggaccacataaaccgttttagaacattatgaatattcataatctctcaatcacgaactaatcatttctcttcttgtttgtgttcatgactagcttggtcgaaacatatgagtcatctttcattctagacttcaatttttttgctctttacaaaatttgacaatcaaaatcactatcaagtactagtactattccatcatatctgagattatctttatttgatttgtgtggatgtcgtaatccgcaattagaattttgtggttgtttcgtgaaggtcttaaatcttgttagacgaacagtgatcaagtgaaaagtatttatgtatttcagtatagtttcagtacaatgtgtatccccttttacaatgtcaattgactcttatttatacaaatacatcgaatcaaacgagttaaatgattcgctgacttcacgccgcggatctcgcctcattaacttcgcacgttacgagtcgtcagctcggatcgtaaatgcttatcatttaagttgagattcctccgttaccaaattaatgtcggatcaacctttgaactgctgggcttacattgtgccttaaagccgggcctgaccttatcttagaagcccaaaattgcggggtcgggccaaatgcgagatcagacatctggtaaaaagcccaaaacttttgctttaccggtcacatcaaagattatgagtttccccaaatgtgtttgtgtcaattaaaaggttagcgacatagttttaagtgaagttagcaattaaagtgcggatagttggccactcgtgggaccttgattaactttgagagttcttggctcaatttcttttatctacttccccaaacaaaacttttttttttttttttgcgttagttattgaatatcactaaatccatacgattacattctaatgaaaatagacaattattgacaccaacaacgagagggaagcttaaaggagaaagaaaaagaagaaggcaagtgaccactcctccttatataatcagctttctccgatgtcttcaccgccttttcgtttaacttagcctccgcattcgccctcctctcttccgctatccttttcgtcgcagctagcttgttggccaacttctcctctgcccttgctttcatcctctccgccttcacctaaacacacgttcacacattgttttaaaaccttttcaatccataacgttatttttctctttaacaattaatagatccaatccatatcaaaccaatccacactactttgtcttttaaaaaactaaaaaaagactgaaccgaaattcggattgaacacgtgttgacaactctctttccacaattagacagaacatcttacctccattttcttcatctccatctcagcctttctcttctcgtgattctcccaagcttgtatcttcacttcctctctcttatacctaattccacacaaaaaaaaaaaactctcaaacacgaatcacattaacacatattaaaatcaaccataaatttaaccaattaacgttaatcacctagccatgaatttagcacgttctgcttcatcccaagccatggctcgagcttccatagcactcatagccttcttactctccacaaaaccattaaccttctcactattattactctctaccctcctaacctccgtcaccgtctccatcacaacccccaccgcctcaccacgttgtgaagccctcaccggtgaagtcacaggactcctcccaaccggtgtagtagctcgcaccggtgtagctgttctagaaggctcttgactaccaataggagtcatctcagtccccatatctctcacacaaacggatctaatcacagccgttggattaatactactttctttcctccaaacagattcaccacaatcaacattcttcgtctcaacctccggtcttcccgccgccatctcttcatcatcatactcaacgtactgatcttctccttcacgttctctctgtgaagctgaagctataagtctaagatcatccgcgttcgagtttctcggcttattacttcttgagtgatgactactcttgtcaccacctccaccacctccacgagcaaaccctacaccagaaagccatttctgagcatcgtcccattttgacggcgctggcttccccatagtagaccggtgatggtttggtgtccggttcgaacctttctgaaactcaaaaccgttcgatatctccggtgtcgctggtcctatccatcctttgttatcttctacactagatctcattcttacgaataaaatgacacagagatctattagaaggtttttatctatatggatagatagagaaatgacttagaaggataaaaataaaagatgtggcgaagcaatcaaagagtcgtcactctcataggaacccacttgatgatgaagttgagagatttcagaaatgtgacattaatgtccagatgggttgttgtagagacgagaatgatagtgtctttataactctctaattatcactatgtttttttctatctaaatagcataaattgatatagacccactattttttgtttttttactttaaattaatgtttttattagaatgctcagatctggtttgtgttaaaagcttagattaatcatgtgtacgtggggagaaagtgactaagtaatcaccattaaagtaaagcgatgataataatgcaaatgcaatgggaacaatcacaaaacaattagggggaatcttggaagaagtaaagagtttggggaaaaggttaataatgtagttcccgagagagtggtattttttaagatacgactactacagttgtactttttaacggtaactttagattagatttttttgtttagctgaaggtggttttgttgttgagattataacacgtgtacggttaaagatcttggaatgagtggcgagagatgggttttgtcggtccgggttagggtaaaagcgggtccgggtttgactgacaaggtcacgtggtctttgacaggtctccctattgcttttggtttcttatggattcaatatttatgtacttctttttactcgcattttctatttatgtttaaagtttctaatttaaaaaaaaagggtataattgcctttggatgttaatatgttatggattaatgtacaaaaaattaaaaaataaatgtgaataatgtcatgtcaaaaaaatgtgaataatgtccacattatttgaaaacgaacagtgtagtagagaaaacagttttcgattgatccgggtacttaatcatcttgtcgataaagacataatgtatgtagatcttagcacataggaaaattttaataaacatggtacatgttttattttctttgtcttttttttttcattaccacaaaatgtattagtcaagtaaacaatattgtagtagtctttggatgtacgacaagattgtacatctactctctttcggatagtatatatttcgggtgaaaaatattatgtcaaacaaaaagttgagatgtgttgttatgagtctcacatgataaattgagaaatattgttgttcttttatatgggatagatgatgatagtgaaaattttgagtcgcaattaacgactataaatccatctttcagaattgtaaaaaaaggtcatatgtttaccgatttggctgtggccaaatatggtcacgacgttaaccaaataaattcagtggccaaaaccattttggtggccaatcgataatcattttagtagccatgaaaaatatcttgctaatcagtggctaaattccaattcttttgtagtttgaaaattgatggttgtatacatgagtaatcatacatataatgtttaagaatgattatgacgacaagaaggagatgatagaatgtgaagatcaaaggtaactttcggttaaataaatataatgcatgattctccatcagaggtactaaaccagctctaatgacattggttatcttgaacctatttgtccaatgaatctatctgttgtatgaaagttaaggctaagtgtttctcctaataatatcacacattagaggaattttatcagctagcttgtgccagaggaaacagaacttaatgctaatatatatgtgtttaatgagccaaaagaaataaagcaaatcaacattagctctataagcaaaactttgtagtcatggaatttaagaggaaatgagatgatgagttttaaagtattgatgctcctgagtgctgaatctaaacagatcatgttcgttgtagttcaatgcacaagctcccattttaccactttacagatctgtgtaatgacgtttcaagtttcctttactagagcaaacctaactaaaatatattgtcaatgacaagaacagagcagcaaaaaaaacagagaaattaagctcaatttccaaattctatttgcatgtcatggctatctttaaactacctagcagcgccttgacacacaatggagcagaaaaggcgagattttgctgttcccagcttaagctacttggctaacaagatgactaagtacccaacaactgctgtagatattccaagcattccaccagcaataacctgacgccaccaaaatatagatagtctcaagtactaaccacaatcattctcttgcttggtgtgatctgacacaattagtactacatacttacctggggaggagtatgacctagaagttcacgcaaaggtctggtttcagccagaggatgctctgcaggaagttcatacacaatctgatttagaacctcagcttggcgtccagcatgtaaccttacaccagttgcatcatacataacctaccaaaccaaacaatcttaaattcttaatcatcccctgaagtgatataatcaagaaaggtcattaattaattaagtgattagctaaaaacatacaatggtagtgagaaccaaagcgatagcgaaatgtgaaccaccaaaaccttcttgtaaaccaacagctaaagctaaagctgtaaccgttgctgaatgtgatgaaggcatacctccagacccaacaagccgtttcaaatcccatctcctttctttatacctacaccaagtagttgtaaaatcaaatttctacaactagtctgtttctttaacctagacagatatgaaaacgtaccaggaggtgaagaatttgatgaattgtgcgatggtgaaagctaaaacggcggaaatcagagggtaatttgtgaaaattgagatatagtgcgaggaagatgaagccaccgattcctccattgaatgatggtgatcgattgatctcgtatcgtagggctttaatcgtctgatagctcttctacaggataaagaacatacagagaagacataaagttgcgtgtagaaatctttaccttgagactcctctaatggcttcttcttcctcaaattttattttcctagttttctcgctttttcttcggcaacaaacaacagcttttatttaatgttttttactaacaagtctacacgacctaagtacagatgagattattacttttttttatcaccgtttatattataatgacaaaacagctacatatcaataaagaattgacatctgaaaaattgcatattatctgaaattatataatagaaatattattttataaactctgttgatatgttagaagtttttgcgatattaatatacgtatagagctttttattgtttaaagtttttatccagaaagaaagtttaaattctgctagttggttcaaaaatgcacattcacaaaaatatagcatgcgatattagaatactgaatacactatcaatctatgattgatcagattatcagaatatgcttctgagcttctctgtttgctagagaatatgctttttaggctttaagtgaaaaacaacttgttctttaagccggcgtggacgtaaaattccaagagaatatccaaaatatgttctacaattgaagtatttaacaacatgagtttacatatatatagactctacactagggcttaactactgactagttacaattatagccttagcctatacttctcttttgcaagtctttggctttgttttggtgagtttcgactgtttactgctttgcaggtttatgaagcctctgggaggcagcagtgttcatctcaggttctgaacacacaccagagtgagcaagtgacggttcgcttgtaattgagtaggaaatcagtcgatattcttttgagtcactcgggttagaagtaggtttttgtgaaggataactcttggtattttggtatattcttcctgtaatatgttattatctatttcaagtttttctagtttatgatgcttttgtatgttaacattgtgtattttgtgttttgggaccaggaaatgatctgtttcgaaacagagcatttaacagacaaaagaaacacaactgtgaacagtttaaatacttgacttgttgatataatcctgattaggtgacttggcatattggttcaacttctacctccaactatatataatagccagcttcgaaaatccagtgagttttggaaagcaaaaacagctcataatttcgccctcgagaaaaggcaccagctttggatttcgaaggttaagagcttgtctagaaaatcactgccccgggttatttgtgattttaggtgttatttgtgattgaaagacagcatcatccagcaatgggaaccccatttgggagaagcaagtagaggatacacaacatattcagccactaaagagaaaaatctaacatggtggcatttttgaaagcaaacatcataagtttattcagaagcataaatgaaacaaagggcaactaaagagaaacagaaagaaaatattaactggcatggagaaaccatcgagcatccataagagacatgtcgtcaggaacaggaaagcgtttgagggtcttggttacaagattgaagacacagatgtcaaggtcacgaggtgacaattggcagggacggtagtgacgggtgaaatagatggagtctggttcgataccaagggtatcattagcaggcatagtgaaacccaagtcaagaagcagggcctcaccaccaagagaatcaacctcaagaacagtgtggcaggcgtaatctgggagttctacattaggatcatacttgtagacgcggaagcagtccctctgccatggattactctcaaccaacaaaacctctccagaggttgtaacagcaatgctagaatcccacgagtgataacgagaaagcattgagaatggtttattaccctcggtgatgtccttgaagaaaccttgcggtccagacagatctaggactttaacaaaacgacgacttgtcgagatataaagagagtaacgccccagtaccatataagataagccatccaaaaagtgggcgtctcggaaaaacagaggaatgtcagtgtaatgagtgtcccctttcttgcaaaagcttatataagagtggccagggaggtcgaagaaccacaccacaacgtaatctgttccactctcgtctacccacaaaaggcccctcacagtatcacaagtcagatcagtggcaacacgggcactatattccgggccattatattccctttcaaatactctatctcccacacgcctgaccttactagtatctgacgcaatcgactctagagacggaagaggggatcgttttctcgctaaagacatctatgataactaaattggatccagaatctaacaacaataaccagtaacccgagtttgccaggattcgagaccctggaaagtctcgcagttccctatggatcttctttccttcttttgggttgtacagcacacaaccaccgtctttcggtaaaagcatcagccatggagatccgcctttctggggtaacgtttccgacgagctacagggtcgtttgactgaagaagaagatacattcattatcaggcgcaagggttctcgcgtttgtggcctgagattgagggaggcgtgtcaccttctgtctgtagaagatactaaaactgggaagaaagattgtttcttttgatattgatccgttctcttcttaacgattacatgaggcatagctccttatttatactaaagttaagcccttgtaaaaccctagttaacattacacatgtcatcatctagttaccataaatctattctttgttcattgtacctcttttgcttgtgacaatcttcctcttttgcttgtgtaataggctaagggtattaaatttaatgtttatttttgtataagagaataattaaagcgttttttaatcaaaaaaattaaacacctaaagccgcatcaccagcgttgaccaacgttccggtcaatcgaattcggtattagggtttaaacccaaccgtcccccatttctccaccgcgcttagctaatgttgacgactcttcgatctcgttgttcgtctcttcttctaaatcaatcatggaagctagctcccaatcgcatcttcgcttcctctccctctttttcttcatccgccgggatctctaatgtctcagagattctcacacttcccgaagtggagaagattctcgccgacgtgaaagctgataacgtgactgtgattcctacacataatcattgtttctgggctgatttcactgtcatcgccaccggtagatccgattggcacttaagaaacatcgctcaagctttagtttatagggtacatacacatttcaccttccactttttcaattccttcgttgctattgttcaattgttgatataaggatggataatgagtacgtgttttgtgttaagagtgaatttgaagactaagatgataagagtgatcattgttttcttatattctttgtgttcaatcacaggccaagcaaaagcagaaaggagctaaacatgtaatgttaccttctgtgcaagggtacaatagcaagtggattgtcatagactacggttcgtttttgtatctacaagtcttggtttttcatttttgatttgtggtggctgtaattagctcttatggatacgtgtaggaaagtttgtagtccatgcacttgatgagaaagccagaggttatttcaatttggaaagcctttggtctgctgaatcctctggtactgatacttcagatcaggtaaacaattgaacgccttacatatagattttgtatggctgataagtggttactgctaatttcgtgaataaaagctgaaacttttagcttggggttatgtctataatggagataagagatttgattatgtcatgagcattcgacaaggactgtctctcgagtatttgattgaacctagccagttattaaatgtcatatctgatgcttctcttgctactacagaatctcttttagtattgatttacatttatctcctgatctcttgaagctctttacattcttctgtttcttttgtctacctttctcatcgattcattgagaaaacaattcagtagcctaggttaatgtctttattgattccaaagacacctttttgttcttgcaggatctccaaaacgtttttgtaaaggtccgaccaaagaacaattcgaaaaggaaaccggctaaagtgagttcttgatcctgtccgatggatacaatttctcataaacttctcgagtctagacgagttaagaataggaggattttaaagcctattaagtatttatctccttaatatttttttttttggtaagttttatctccttaatatttgtagtcatctatctattttttccttaatatctttgcttaaaaaaaataaaaaatttagtcatctatctattttttttttcttttttaaatatggaaaaggattaatctgtctctcctcctcaaaaaaaggaaacgaatttatccctcttaatataaataatcaaattggcaaacttgggaacagacactcttgaatctctctcaacatggtggtatccttgtctttgcatgcgtcttcttctattaggaaatcgaaaacaaaagcaagcttatgtctcgattctttaccagaagatcttctcgtggagatttcttcatgtaccggagcttcttccttgtcagcggttcgtaatctcagactagtttcgaaatcgtttcgacgtatctgtgatgaaaagtatgttttctaccgactatccctcaaagaaatcgaatttctcccatggcatgagaacagtgcaaaattcatcgagagatgtaccgagagtagaaaccccgaagcgttgtttcagaaaggattcattaactattttcgagataaacttcaagaccgaggactcgaatatttagctgaagctgcggaaaaaggtatcaaagaagcaaaatatgtctacggggtgattctaatctgtcttggaggcaaaacaaaacaaaagggtttcgagatcttgtcttctgttataaagcagttgatgtcaactacaatgaatgagttggtggaatttcgatacaagattcaaaagattagatacggtttttggtggtctgacaacacggtggtggaacaactcaaaacagcctacgttagtgagaagtgcaagtgcgattgtaaaaccaggatgttattattagtaatgaatcgtggttggtatttattcggtgatgaaaccgacttggatttttcttctgcttgtgagttatatctggtgcatcatgaagttgaacttttcttgagatgatttagtgatcaatgatgtattaaactaaattataactaataaagagtgatttttggttttactttcggatacatttatacgaggaagagtacaatggccaatactctactgcttcttattgcatgaacctaatactaaatataaatcgtaatacatagcttcttttggttataatctcaaccactactctagattgtattctgaaatagtacataaaccgaaattttccttttgaggccaaaaaatctaaaattgatggggagatatactgggcctgtgaatttgaaccgaaccgatttgtccgaaccgaaccgaaccgaggtttggacaaatcggttcggttaaggttaattgagtataaccgatcggtaagtgtttaaaatcatttcggttaaccgagattttcggttcggttcatgagaaccgaacggttaaccgaaaataataaaaccctaacctaacctagattactagccgcctactcttcttctttgtcttttttttttttgattcaccgggagacggaagctcccggaatattattaaaaaagaaaaaagaaaaaaaaacaaagcttacaaccggactcgtcttggtcgcgttgacccaagactatcctcatgcaaaatcacctctaaatcatccggaacatcaataagagaatgaaaacctaaaggtaaagaaaatgcatagttagctagaccgtcggctagacgattagcctccctatacacgtgagttattcggacaatccagtccttcgataataagccatggcacaaccgcaccaggaacgacagcggatgttgatcaccgatccctgtcttgagaaaaccaactaccaactccgaatcaacttcgagctccacacgagtcaacgccttagtccaagctaggtaaaatccataataaaccccccacagctccgctaaaggcgctgagcatctcccgatattaagcgcaaagcctccacaccaatttccagctccatcccgtatcacaccacccgccgtcgctaaccccgggtttccacgagaagcactcttcttctttgtctgataatgcccgttccttattctttttcttctattcttcttcttcaattcttcttcttcttcttctaaatgactaatatcattcttcttcttcgattcttcttcttcttcaatccttcttcttcttcgatcattcttcttcttcgatccttcttcttcttcttcttttctgagttggattcgtcatctgaatgctttcaaattgatggttggatttgatttgctttagtttcttcttgctttttctttgtggttttggattccgttgatgatgcccttcttcttcactgttgatttggatttcaatctagaaatgaaggcttttcaccatttttcacaagtttttttcctttttttttttaacacccagacaaaccgaaaaaccgaatgccaaaaaccgaataaaccgtgtccgaaccgaaccgaaccgaatcattagtcggttctattcggaatagatttcaatttccgaataacccgagaaaccgaaaaaccgaaaccgaataacccgatcggacaaaagtcgcaggcctaagatatactatacatctgaatattacatttgcatctaaccgtagcatgaaaagtgagaggaaccaaaggcttctattatatatggaattagcagagttgggcaaacgttgcaggttctgtttttaaatagagatgatggaagcgtgcatcgattctggaccgcctttgtaggtaagctcaacgaaagtacctgcaccttctcctttcgcaagtcttcccgggtttacacaaacgcacttggctgcatcctcctcttcgccaagggataaaatcttcataacaattcaagaaaaaattcagtaattcttcttttagagtctaacttctgaatttgatggcactattaacatactgactcaccttcacgaagtacctcatgtctgatggaagtagaagaatatccgggattgatgaaatctgtagcgccttaggagcgagtgaggaatcataagggaggctctcgggcggtggatacagcggatagaagctgtttcataagaatccaatttctgagtatttggtagctgagaatctagttggatctagtagacgcaaaagttaccttcgctgacggaggagatggctagcgagtctggacatgcgatcagtggggactccacttggattttttgacatctcctccccactcagctgttttagtacatccaccgtgcagcaacttaccttcacctgagaatacccagttaacattttatgttgcaaggacttgagagaatatggcttctcagaagagaactgtcacagtgattttctaacctggtttgcctcaaaggtccccgggtttgacagactagtcatctgtaatgtatgatgagacagagacatgaaaaaagtaaatatatatccacctgtgcacagagagagttgagtgaaggaagggagacttgttaatgagaagaatcaaatacctgatgttcgagatcaggtatgtgaatgtcgaaaggaggctgcaaacacaacaagaaacttttcgaatcaaacagagaagacgaatgcggaaactctagaagagagatattaagaggaaatagaaaagagcacctgtgggaatatgaaatcatggttagcatcacgaatggatggcaccagaaccactcttacttctgaacccatgaattccacgtaatcttgcaactgagaaactcaaaaaccataaacatctttgtttattccaaagtcagtcagtattcagtatatctatttgtcctattttcagtaccttcctgaggacttccacttggaatatctcattaaaggtggcatcaacagcgcctttcttaatctctggatgctcagaatccacaaatggtccaagctgagtttggaaataaaacgtaagtgatcccgagacacaatcacacaagagacaaatatctacagaatgtgtgaatgcattctagttactcaccagcacgagtaactgtggtggctttctttttgcataggctagtagctcattcagtggctcaaacagcaagttgtctgatgtggtgaatggtccggatgcaattatctgtcaacagaaagacctttaaacatcattttgaatcccaaactagaaaattatgatgctaactgattctaaacacaccatccttgtgcttggtaatgacaacttaatagctatgcataaaaacagaacatatccatacattcatctcaaatatcatcataaaagaaaaggggaacacagcatacaaattttgtttggcattatcgaagtcagtaactaaagtagctccactccaagttaccaatctagctaagtaaaacagctttgtaatctctaaattctcaacattctgcagttatctcatctcaacattatgattatgtgtgtataaatgtacgagaaagaagtgtgccagaatcatataaaataatcaatgggttccttgacgatataggtaaaaaaatactagtacagctcccttgacatgaaggagtgcatacttacaaatgaaacctctgatttttgacaggattcttctgcaggaactaagacttcctgatccaagatttgcctcttagcaggaggtagatccacgtcaacagtaagtgttaaaggaactgaatctagcagcttagatgcagtgagataatgtccactaggattttgcccctcaatgccaactacctgcatcaaattcagacaacttccacatgaatattatgagtgttctgtggaaaaaacacaatatctaatgttgttagctttaagctatcacctggccaggaaaaatggagaactgatctagtctctttaagtccactggaacacgctgtcctgaagtacgctcggcactgcaatcatcgaatttgttggcattaggataaggaaactctggatatttggaactgaggcttcatgtttaaaagaaagttatgccaataactaactataaatggctataccctataggaccacaatgtaagtcattctagtatccaaattgttgaatatgcaactttttataacacaggattcataatccttcacgatgatatacaaagaaaagtgaagtcatgatggactaacctgctctgcaatagaatggacttatcattcaaatgcccctctccatcacagcaaatcattcccacagcaaatatacttctctgcagcaatcagtagcacaatgtaataaattctataccccaatgttaatttatttgacaccaaagtagtatgtatgaacaaacctacctgtgaagcaacagccggatccacctgttcctcatataatcccgaggcagcaaatgcatctgcatgccttacgatccgatactcgagtgcactaaacctgtcctcagttctgtcatacatgaacctgcaacctggttcagggcctgagccattgacttttagagaacaccgctggctggtttgaactctcttaatgatatcatcctcactgttttctacatcattgttgtttccattctctgcatgtgccgccacattacccacattgaacttcaccacaaacttctcgattcgtgacccaaaaggtgtcacatgtccaactgacttcccagtagaatagccataatctcttgatctacttatcgaatcaaacggatccggatgtaaccgttgagacttgtttgtaggagtagtaacaatctcttccgtatcttcttgcaccccatccaaaagcctgaaccaaaaaaccaaatctctatatcttcaaaaacaaaatctgtttaaagctaatgcaaagtaagaagaaacatggtcaaaaagcacttacatatctacatctctatttgagtaaagatgcagaccagcttcttccactctcataatagattctttctgttcattctgaagatgcaatacaaacccatccatgtcatctttcttaacagtttgatcaagaagttgtctgttgcatcaaaccaaacacaatggaaaaaacaaacaaactcaattctcttcgccatcactaacacaaccactctaatcatgaaattggtcactatttaaacatcaatacaatctcaagaggtaacaaaagctttgaattttactattgggcaatggaaaataagaaaaatgtgatttttaccgattgagatgataaagttcccaacttgaaacaagatcagaaggcttaagactgtaatttatgcagagagtaacacctgtaagaaaaaaacagtcagatataaacaaaagttaaaagatctgggcagagagatattagattaggggatagtgtctcgcttacatctcttaagaatctcgtcttcttccacaagaataaagccgcttcttttaaactcgttctttatttcctcatctgtagccattttctttcaacttcactctctcgctctctctgtgtttcctagagagagaagctttttgttgtgggcgactggtgaagacgaaggcaagtggcgggaaattgtctggtttagggcgggatgttggctaatgcccttttctctaaccttcttatttaatggacccgagttttaaatgggccttaaattttgaacaaaaacaaatgggccttgaatacgttaaacgttaaatgagtgaaaggtgaaaacagttcaacagaaactgaaacggttgactaattccgttgactttttgcaacacggaaaatagttcatgtagggaatttgaataaatattttggtcagactgaatttggctagattatcaaatttggagtatgaaaaacacatgtatataataaaataggctatttaccttattgcttagctccgaaaccaacattataaattatcacacaaatttgtagggaattaaagaatttggtttttggattttgtaagcaaattgccaaaatctatctaaatccagattttctagatttgttttttttttaaactatttttattattttagaaaatctacttttattacaattgtgaatgggcaataaattagattttggtaaataaaaaaactaaaatatttttacctattttctactaaatattttcccatgattttccttctaatttcctacaaaatttcttatacaaatgtaatcttaggaaaattgaaggaagtcgtccttaccattttcgtaccaattatttttccatgactttctttccaatttcctacgagatttcctacgacaatacatttcgtaggattttggtagaaaattttgtacgaaattttgacgactattttcatagtaatctcacagaaatttggtaagaaatatcttctactaaaattttggtaggaaatttggtaggaaaaacctatgttttcttgtagtcctacactagaaaaaatggaaccttacgaacactagggaaagtatttgatgataaaggcaagcttgtctgtttgtttaagcatcgaaaagacggagaagaagacgcaaaataaaaagcagctgtctatttgttggaccaccctatttcctcacatcgttccacttcttcggatctcattggttttggtggtgctacaccaactgtttttaaccgaacaaaggaaggttgtttggtttcttatgttgagaatgatggtgttgttggtgacttcatcactcaattccaattcaggactctccctcaagaaatccacaagctcgacattttccatattcgctttggaagtacggattgtcatgattggaacacaatatccctgatagatgcggaagggatacaccgtttgaatttcatagataatgaaaagtgcttcaataccgaagtaagtttgatttttttttatgttttagtctctatttatgtcacactaatgtcgttaacaatatcttcttctttgtgtagtataattttcgtacaaaaagattaagtcaaaacaatctttcactaacaaaatggtgaactatgtgaatgggctcgacgtggaaggtgatatcttatttttgaaagcatgtggatgggatgttccaagagagattacggtccctttcatgatttatacttattttttgaaaaaagcggttcaacatcacctcactatctacgatatggccgttattgccctgaatcatcgcaaaccccctaaattcaacctttgcaagatggtcttggaagataatgcggagaattcccaagaagatgaactttttttacgaaagacttatgagaagatagattcacggctagaggagtacccgcggttgttctttaagaagaatagatggtaaatgattggttaggtagttataaagacaataatggtgtagaaataaatcatgtcatgtcttttaggtgttcttgaatctctgtgtcagtcatttcctaatgagcacccttagattccaaatacagcttttggcctgattagtacgtaactactgatttgcggataaataaaaaagtattagtaactccatcttttgtccattttatttttgaagaaagatctttaatttgagcattggcaaagaagttccacttttgtcttgccacaacaaaattcttctcgttctttgtttcaggaggcatattcatatgagacatttgaaccgattctaaataaggctgtattatcgagttttatgaaaacatttttttgtaaaaactttaggaccggtgtccgtatttgacagacgagagaaaactcgtttataaacaaaaacaagtctcgacaaatcctatttataaaccttcaaaccccaaattaagtcatgtatattaacacaatcattctatttatataaaaagaccgcgggtatctttttctgtaaatgattttgactttagttcccacaccgcaaaacaatatggttcatagttccaactacacaatcttcttaccttccaagattccacttcttgaaaacaagatcattgctctaatcaaaccctgataatagagtctaaactataaagcagcaagtgttctaaactagtagtgaactaatgaaatttctggatatggttgtaatcaatcgcctgaaatagagagtagaaagcatcaaagtggtctaaactagtagtgaactatgcatttctttttagcaaaaaacaggttgttggaattgagaatcctagattaaatcatacaagaagaaaagcttcatgagaagaagaagatgtagaacagaggaagaagcatcggaggaagaagacgatgtcggagaagaagtcgtgaacaaggtcaacgacataagcaaagtcaacaacataaaggagttgggctttgttgttttgtaataagtaattgggctaattgttttgttaggcccaaatgagtagaagtattgtgttgtgttgttagtttaagatagagtctatgttgtgtaagagtgaattaaggagttggaagttccaacatagtagagtggctgatgtaagtcttaggacaatgatgtggtctagagtctaagtgtgtgtagtgtagcaagtggagcaaaaccactatatgtatgtgtgtctttatgttgtataatattatccaagccaatacaatgtagtcttaaaagtaaatgcgttcttgttctttctctctagaacaagtaaaccaaaaacagagtaaaagatagagagaaagtgagaatcacaacacaggtgttcatagttccaactacaaaatcttatcttccaagtaaacaagatcatggctattttctctaattgcttaggttcgaaaccaacattataaaatatttttgagaacttaaactcggatgcgtagcagttagcactacgttttaattggccgaaccactatgtttgagtatttaaccaaattttcactacacacttacacataattaagacgtaagaagctcttaaaaattaaaattatgaacataaactacctaaagatcaggtgtgagtaggcttgatccaataaacattaaaatccctaataatatgtttgactccttagaatagagttttcgtagatgtatgagatttttaatatggttaatagacataattagtgggtgctcgaactgattttaaagatgatatatattttggataatacattatatcaaattttataaaaaaaaatacaaacctttagaattgaccattaattattggccactgaacaaatggcgaaatgaaagtatatatgagacacatgaccagttgtgtttcgaaaatgaaattgtcaaaacaacattggattgatggaaacaaagggttcgaaaaataaagtggtcttcaagagaagaattcgtagtttttggctgagataataatggttctgaggccaccaatgggagctaggatcgtcaatataacaccaactactatgcaaaactgcaattacagaaccaaacaacttgttattgtcaaatatatagggtagaaataaaaacacatatttagtagaagaagatgatgagtaaaagaaaatatacccaattaatacaccaagacaatccatacttctttggtttcttgatacaaagccacatgatgcatggtagctaaacatagtacaatacaaaaggtagatcaagttgagttactagaattttcaaacaaatgaataggcttaattagtgtattgaattacttacatagtaagttgttggggcaaaggcgaatcctccgaaaaacccgagcaatccaccaaaaaatgggatgcatatggcaacgaacatcgtgaaagctgttccattgatccaatgttataaattcatatgttactatctaggagaattgatttaatatgaataagaacttaccaacatatagagtacgagtgatgaagcggagtttgaaggaaggagcgaacatcatcttctttaccaaaaaggtttcgagcatgtcaaagaccggcattgcgtatatttggtagcttccaatgacatggacaaccacgaatgcgttagcaatggcgataagccagatgggtttctccaacgtcatgagaatattgtcgtccacactgtttccaaagatatagtagcaaacaaatgcaacgggaaagtagcatatggcaacaacgatgtatgcaactactactcctttccacattgcaatctttgatggtttctcaggtgttgaaggaatagtagcttgtatctccaacacaacgttgtgacctgcatacgcaaatgccacatctcctagtgcattcaagaagttgaatacatttcctgaggttgtagatgctctagacgagtagtctacatttggatgaactcctttcttcaccgaggttgcccaagcgattgtcgagtagctgcatatattacaatcacattaataaatctcaaatagaccattttttaaaaaaagaacaacaggctatattgattttgagttgtacttacctcaaagacataacggcagcagcaagggagacgatagatatggagttaaaattagggagatgagcaagaacaaagtgtatggaagcgaagatcatgatccaatatgtagttcttatatttttgcaatcggtgcaaagaaggtcatgaatttttttcaatgacttccctcccgtaaccatgtacacaatatccacacctacttcaacgattagttgttgtggcaccacgatccatagtccgagcttctccccaaacgcgtgttggcctaattcgtggtacctgtcgaacctcttccctggaaccatctcgtgcatttgcaccatctgccatagtgtgtagaatgttatcagccatgacattatcattattgtcactccaggtcccctgccatcaaaattgagtgtaatattaatattgaacgtgtatatagagattttctaatgagatatttatatatgtagctagattggatatataccatccaagattagacatggcgtaaggtaagctgagtacaccagccccgaccatggcggtgacattgtgaaacgcagagtaccaccacttggcatttctagaggatgttatcggtaaccaatcgtctacattcttctgctttgtggacgcgtccttggttggagacgattgacttttctccatcttattttggctttgaagaacagaaaaaaatgtgggacacaattagatgatgagaaccaaaaggattcaagagcaaggcaatttctttcctgaggattgaaatgtgccttgtgacaatgattattgcaaagagttctcaatttatatatacaatttcatttcactatttttttttccttttatatttttagtgaatttcaaaaaaaggaatttattggttgttgctttatgacagattagtttcacgctctgtttcacaagatagccatgatcgttgttggaattgttgcggtgtatgatctctaattacttataccacatggcttttttgatatttttggctgatgattatggtataagtcattagtcaatgctcttttgcctaacgtgaaaagtgttttgcatgctattaatgaccaaaatagtcatttcttgattttattttgattcatctattgatctgtttctagtataactgactacccgttatatcaaaagttaatttaggggagaatatagttactgcaggtttacaacccacaccttcctcttttaatgagaaaaaaaaacaaatcttaaaccaaattacttttctttatttatatttttgtataatattttatcttattttaaattgattttaataaccttaagtgttattttaccattttacaaaatgtgagggtttaaaaacccacaaattgagtgtctttttcatgtttttagaaaaagtttggatcttttaacccatttttcccaactttccataatcatctaaagttttatgtataaatcttatcaaatcatttagaatttattttgtaatcatatataaatcacctagatatccttaaatcttaataaaatccctccaaatgtttagtttcaacacaccccttaatagttgactaatcacctaaaagacagatcatggtaaattagcagttttttttttgtaaagtagcttgcaatcattgtaaagtagttttaattttcatgttcaatataaaatcttcgataggaagacatctttgatctccgaaaaaaccctaagcagtaccctcaaacgcaagaaccttagctcttgataatgaatgtatcttcttcttcactccaacgaccccggagctcgtcggatcttcaaggttttaacggagtaagttcgacgtttaaggaaacgttcaccggatctccatggctgatgcttttaccgaaagacggtggttgtgtgctgtacaacccgaaagaaggaaagaagatccatagggaactgcgagactttccagggtctcgaatcctggcaaactcgggttactggttattgttgttagattctggatccaatttagttatcatagatgtctttagcgagaaaacgatcccctcttccgtctctagagtcgattgcgtcagatactagtaaggtcaggcgtgtgggagatagagtatttgaaagggaatataatggcccggaatatagtgcccgtgttgccactgatctgacttgtgatactgtgaggggccttttgtgggtagacgagagtggaacagattacgttgtggtgtggttcttcgacctccctggccactcttatataagcttttgcaagaaaggggacactcattacactgacattcctctgtttttccgagacgcccactttttggatggcttatcttatatggtactggggcgttactctctttatatctcgacaagtcgtcgttttgttaaagtcctagatctgtctggaccgcaaggtttcttcaaggacatcaccgagggtaataaaccattctcaatgctttctcgttatcactcgtgggattctagcattgctgttacaacctctggagaggttttgttggttgagagtaatccatggcagagggactgcttccgcgtctacaagtatgatcctaatgtagaactcccagattacgcctgccacactgttcttgaggttgattctcttggtggtgaggccctgcttcttgacttgggtttcactatacctgctaacgaaacccttggtatcgaaccagactccatctatttcacccgtcactaccgtccctgccaatgcagacctcgtgaccttgacatctgtgtgttcaatcttgtaacaaagaccctcaaacgctttcctgctcttgacgacatgtctcttatggatgctcgatggtttctccatgccaattaaattcttgctttttcggtttcatttatgcttctgaataaaaatattatcatgttgactaatttctcagtgttaggtttctctgtattattaagtataacatattattgtttacatcgaaacgtagggagtggtggagagctctgatgttatttattttcatttttgtttcttttaaaaccaagcttccaaagtcatttacatcaacttcagataaacaaaacgtttattcagagagaatgacaagataactagtttgcttctcattgagagagaatgagaagatcatttgactcaaatctggttttgccaggaagtaattgcattagctcactactacttaatttcagggctttgattagagccatgatcttgtttacttggaagataagattttgtagttggaactatgaacccctgtcttttgctaaaaagaaatgcatagttcactactagtttagaacactttgatgctttctactctctatttcaggggattgattacaaccatatccacaaatttcatagctcattagttcactactactagtttagaaacattaattgctttatagtttaaactctatttcagggtttgattagagcaatgatcttgttttcagaaaattgaatcttggaaggtaagaagattgcgtagttggaactatgaaccatattgttttgcggtgtgggaactaaagtcgaaatcattttacaggaaaagatgatacccgcggtcttttaatataaatagaatgattgtgttaatatacatgacttaatttggggtttgaaggtttataaataggatttgtcgagactttttttttattaaacgagttttctctcttgtctgtcacataatgacaccggtcctaaagtttctcagtcctcttttttttttttcatgttttcataaaactcgataatacagccttatttagaatcggttcaaatgtctcatatgaatatggcttttgaaacaaagaatgagaagaattttgttgtggcaagacaaaagtggaacttctttgcaatgctcaaaatatctttcttcaaaaataaaatggacaaaagatggacttgctaatactttttttatttctccacaaatgagttattactaatcaggccaaaagatatatctggaatctaagggtgcttatgaggaaatgacatacacatagattcaagaacacctaaaagacatgacatgatttatttatacaccattattgtctatataactacctaaccaggggcagatctagaacctattttaacctagggcacaattttttttacatcagcatattttcttacaaatttatcttactttcttgtattttaaaacatattcactactatctcatttttcattttcaacaatattatgttttaacatattgataaactaagaaatcgtttaaaatttgtttagtccaaagatatctcatatatcataactaacttttcacttgttagcatttatgtggacaatataaaggaaaaacaaaggtctcacacgtcaaaacttactaatttagtttaatgactaattaacatagagatttggtgccaagcataacttggaaggtttgttttcatcgtagacatctactcggcgatccacaaaatcaattcaaaatatagaaacacgttttcacttttcaaagaccaaggttttgttctagggcaacttgaacgttatatcatctatatatacatttttgcagtcattttgtaaaataaatcctagagttggaacttatttacaatggctgccactggcttttaattattagttttttcagcaataaattgattaacaaacgaaaaacattccaaatatattacaatcccatatatcacgcagatttttccaaaatttgaactagatttcggtaaatatttaaaacaaaaaatgtttgacaacccaaaagacaattgcaatcccttaaaatgagcaaaacgcaactaaatacatttcttatcaattcactaaatcttatttctgcaaaatttgaactagatttcgagaactatttaaaacaaaattttgtttgacaaactaaaacacgattgcaatcccgtaaaatatttattttaattataaatttaaattagcagggtaccgcggtttttttttacagtacaggtttggcggaacgggtttggaaggacgttacttaataacaattgtaaactataaaataaaaatattttatagatagatataatttgcaaaattttatatatattaatttaaaaaaataaattgtctccacggtgtaccgtgagttaaaatctagttaaactaatatatatgtaacgtataagttgcatgttacacataatatattaatgctaatcatcagcaaactaataaaaccccgccaacgtttagatagtacacgtatgtaatagttgaataatagtgactaacaaagacaaagaaacaactatacaccaagtgtatatatcggagccacaagacacgttcaatctcattgacctcgttattataaaaacatttcaacactagtcattgtctcacatcaataaatacattgttgaaagaagataatcacacaaaataaaaaagtaggaagaaaactcttcacttgatgatttccactcaagattcaatcacagtgagcatagggattttggtgcaaagcgtgacttgaaaggttttctttcctcgtacacatctagtcgtcaatccacaagaccacaacagtcaattccaactatagaacacgtttttacttttttaaaggttttatcattttcactttagtttcttatacacatcaaaacttacttgccaagttacaaagtttatagcttaagtattttattatatataaaaaaaaactccatcaaaggaacgaaagttcaattacaaacttaaaaaagaaataaaaaataaatagagaactaacagatttacaatgtagcaattgca
